United States Patent Application Publication US 2018/0126003 A1 - sequence listing, part 157

SEQ ID NO: 275499 - DNA, 1947 bp, Artificial Sequence
  derived and/or modified sequence
atggtatccctgccccctccacagtcagacgtaaccttaccagggccaactaggcttgaaggagagcggcagggagacctgatgcaagcacctgggctgccaggttcacctgctccccagtccaagcacgccggattctcatgctcctcgtttgtgagtgatggaccccccgaaagaactccttcactgcctcctcactctcctcggatagcctcacctggtcctgagcaggtgcaggggcactgtcctgctggtccaggcccgggaccatttcggctgtctcctagtgataaatatcctgggtttggcttcgaagaagccgccgcatctagcccaggccggtttctcaagggtagccacgccccgtttcacccgtacaaacgccccttccacgaagacgtttttccagaagccgaaaccactctggctctgaaagggcattcatttaagacccccggacctctcgaagcctttgaggaaattcccgtggatgtggccgaagccgaggcatttctgccaggcttctccgctgaggcctggtgcaacggcctgccgtatccctctcaggaacacggaccacaggtcctgggcagcgaggtaaaagtaaagccacctgtccttgagtccggagccggaatgttttgctatcagcccccattgcaacacatgtactgctcctctcagccgccatttcaccaatatagccctggcggcggcagctacccaataccatatctggggtcatctcattatcagtatcagcgaatggccccacaagcatcaacagatggccaccagcccctgttcccaaagcccatctattcatattcaatcctaattttcatggcacttaaaaactctaagaccggaagtctgccagtgtccgagatctacaacttcatgacagagcacttcccttacttcaaaactgctccggatgggtggaagaactccgttcgacacaacttgtctctgaataagtgctttgaaaaagtggaaaacaagagcggatcttccagcaggaaaggctgcctgtgggctcttaatcctgctaagattgataaaatgcaggaagaattacaaaagtggaaaaggaaagatcctattgcggtgaggaaatctatggccaaacctgaagagttggactcactgataggcgataagagggagaaactcggctcaccactgttaggatgtccccctcccggtttatccggaagcggtccgatccggcctctggcacctcctgccggcctttccccccccctccatagcctccacccggcaccgggcccaatcccaggcaaaaaccccctgcaggatcttttgatgggccacacccccagttgctatggacagacttaccttcatctgtcacccggcctcgcacccccagggcctccgcaaccactattcccccagcctgatgggcatttggagttgcgtgcccaacccggcactccacaggactctccgcttcccgctcatactcccccatctcattcagctaagctactagcggagccctcaccagcacggacgatgcacgacactctgctgcccgacggcgatcttggtacagacctggatgctatcaatcctagtttgactgacttcgactttcagggaaacctctgggagcaactcaaagacgattccttagccctggaccccttggtgctggtgacctccagcccaacctcaagcagcatgcctcccccacagcctcctccacactgcttcccccccggaccatgtctgacagagactggatcgggcgcgggagatctggcagctcctggcagcggtgggagcggagccctcggcgacttgcatcttaccaccctttactccgcgtttatggagctcgaacccacccccccaaccgcaccggcgggtccatcagtatacttaagcccttcctctaaaccagtagccctggcttag

SEQ ID NO: 275500 - DNA, 1947 bp, Artificial Sequence
  derived and/or modified sequence
atggtgagcctgccccccccccagagcgacgtgaccctgcccggccctacccgattagagggtgagaggcaaggcgatctcatgcaagctccagggcttcccggcagccctgcccctcagagcaaacacgccggattttcatgctctagcttcgtgagtgatgggccaccagaacgcacaccctctctgccaccacactcccctcgcattgcgagccctggcccagaacaggtgcaggggcactgtcctgccggtcctggtccaggtcccttcagattatcccccagcgacaagtacccagggtttggtttcgaggaagccgctgcaagttcaccaggtagattcttaaaaggatcccatgcccctttccacccgtacaagaggccatttcacgaggacgtctttccggaagccgagaccactttagcactaaaaggacatagtttcaagaccccaggaccactggaggcttttgaagaaatccccgttgatgtcgccgaggcagaggctttcctcccaggattttcggctgaagcctggtgtaacgggctgccctacccttctcaggagcacgggccccaggttcttggcagcgaagtaaaggtgaagcctcctgtgttagaatcaggagccggtatgttctgctaccaacctccactgcagcacatgtattgctcatcccagccaccctttcaccagtattcccctggaggcggctcctatccaatcccttacttaggctcctcccattatcaataccagcggatggctccccaggcatccaccgatggacaccaacccctctttccaaaacccatttacagctacagtatcctcatcttcatggccttgaagaattccaaaactgggtccttgccagtaagcgaaatttacaacttcatgaccgagcacttcccttatttcaaaactgcccctgatggctggaagaattcggtgcgccacaaccttagcctgaataagtgctttgagaaggttgagaacaagagcggatcaagcagcagaaaaggatgcttgtgggctctgaaccctgcaaaaattgataagatgcaggaggaactacagaagtggaaacgtaaagaccctatagctgtaagaaagtcaatggccaagcccgaggagttagatagtctgattggtgacaagcgagaaaagctcggcagcccgctcctcggctgcccgccacccggactctccgggtctggcccaatccgaccacttgcacccccggcaggcctttccccaccacttcactccttgcaccctgcacccggcccaatcccgggcaagaatcccctgcaggacttgctgatgggccataccccatcgtgctatggtcagacctacctgcatctgagcccgggtctggcccccccagggcctccccagccattgttccctcagcccgatgggcatttagaattgcgggcccagcccggcactccccaagactctccccttccagcacacacacccccatcacacagcgccaaactgctcgccgagccctcacctgccagaactatgcatgacacattgttacctgacggcgatctcggcaccgacctcgacgccataaatccaagcctgactgactttgatttccaagggaacctttgggaacagctgaaggacgacagtcttgccctagatccgctggtgcttgttacatctagtcctacctcttcctctatgcctcctccacagccacccccacattgctttcctcctggcccttgcttgaccgaaacaggatccggggccggagatctagcggcacctggttctggcggctccggggccttgggcgaccttcatctgaccacgctgtatagcgccttcatggagctcgagcctacaccccccacggcccccgcagggcccagcgtatatctcagcccatcttccaaaccggtcgccttggcgtag

SEQ ID NO: 275501 - DNA, 1947 bp, Artificial Sequence
  derived and/or modified sequence
atggtaagcctcccgcctccgcagagtgatgtgacattaccagggcctacacgcctggagggcgagcgtcaaggagatctgatgcaggcccctgggctgccagggagcccagcgccacagtcaaaacacgccggtttcagctgttctagcttcgtatctgatgggcctcccgagaggaccccatcgttgcctccgcactctcctcgaatcgcctctccaggcccagaacaggtacagggtcactgtcccgcagggcctggtccaggacctttccgtctatcaccttccgataagtatcctggatttggtttcgaggaggctgcagcctcgtctccagggagatttctgaaaggatcccatgcaccctttcatccttacaaacgaccattccatgaggacgtgttcccggaggctgagacaacactggctctaaaaggtcatagttttaaaacaccaggcccacttgaggcgtttgaggaaatccccgtcgatgtagctgaagcagaggcctttctgccagggttctcggcagaggcatggtgcaatggcctaccatatccttctcaggagcatggtccacaggttctgggctccgaggtgaaggtcaaaccacccgtgttggaatcaggagcagggatgttctgttaccagccgcctctgcagcatatgtactgtagctctcaacctcctttccaccaatactcgcctggcggtggctcgtacccgataccctacttgggcagttcccactaccagtatcaaagaatggctcctcaagcttcaacagatggccaccagcctttgttccctaagccgatttactcttattccatactgatattcatggccctcaagaatagtaaaaccggcagtctgcctgtctcagagatctataatttcatgaccgagcactttccctactttaaaactgctcccgacggatggaaaaattccgtccgccataatctgtcgctgaacaagtgctttgagaaggtcgagaacaaatctggttctagctcacgtaaaggctgcctatgggcccttaaccccgctaaaatagataaaatgcaggaggaactgcagaagtggaagcgaaaggatcctatcgcagtccgaaaatccatggccaaaccagaagaactggatagtctgatcggcgacaaacgggagaagctgggctccccattgctggggtgccctcctccaggtctttcaggctctggaccaattcgcccactcgcccctccggcagggctgagcccacccctgcactctctgcatcccgctccaggtcctatacccggtaagaatcccctacaggacctcctcatgggacacacaccaagctgttatggacagacttatttgcacctaagcccgggtctggcgcctccgggtccgcctcagccattgttcccacagcctgacggacacttagagttgcgagcgcagcctggcactcctcaggacagtcctctccctgctcatacaccaccttcccattcggctaaactactggctgagccctctcccgcaaggacaatgcacgatacacttctgcctgacggagacctgggcactgacctggatgccatcaacccatcactgacagacttcgatttccaggggaatctgtgggagcagcttaaggacgactccttggcattggatcctttggtcctggtgacctcttcgccaacttcttcaagcatgcctcccccacagcctcctccacactgcttccctcctgggccatgcttaactgagacaggtagcggtgcaggcgatctggccgcacccggaagtggcggtagtggcgcactgggcgacttacatctaaccacactgtactccgcctttatggaactcgagcctacccccccaactgcacctgctggaccctcagtctatttgtccccctcttctaaaccagttgcccttgcttag

SEQ ID NO: 275502 - protein, 214 aa, Artificial Sequence
  derived and/or modified sequence
MPSPWGWFAVTACGAQRNNFEEPVALQEMDTSNGVLLPFYDPDSSIVYLCGKGDSSIRYFEITDEPPFVHYLNTFSSKEPQRGMGFMPKRGLDVSKCEIARFYKLHERKCEPIIMTVPRKSDLFQDAEPVLISLRDGYVPPKHRELRVTKRNILDVRPPSGPRRSQSASDAPLSQHTLETLLEEIKALRERVQAQEQRITALENMLCELVDGTD

SEQ ID NO: 275503 - DNA, 645 bp, Artificial Sequence
  derived and/or modified sequence
atgcccagcccctggggctggttcgccgtgaccgcctgcggcgcccagagaaacaacttcgaggagcccgtggccctgcaggagatggacaccagcaacggcgtgctgctgcccttctacgaccccgacagcagcatcgtgtacctgtgcggcaagggcgacagcagcatcagatacttcgagatcaccgacgagccccccttcgtgcactacctgaacaccttcagcagcaaggagccccagagaggcatgggcttcatgcccaagagaggcctggacgtgagcaagtgcgagatcgccagattctacaagctgcacgagagaaagtgcgagcccatcatcatgaccgtgcccagaaagagcgacctgttccaggacgccgagcccgtgctgatcagcctgagagacggctacgtgccccccaagcacagagagctgagagtgaccaagagaaacatcctggacgtgagaccccccagcggccccagaagaagccagagcgccagcgacgcccccctgagccagcacaccctggagaccctgctggaggagatcaaggccctgagagagagagtgcaggcccaggagcagagaatcaccgccctggagaacatgctgtgcgagctggtggacggcaccgactag

SEQ ID NO: 275504 - DNA, 645 bp, Artificial Sequence
  derived and/or modified sequence
atgccttcaccctgggggtggttcgccgtaactgcgtgtggtgctcagcggaacaattttgaagagcctgtagctctgcaggaaatggacacttctaatggagtgctattgcctttctacgatcccgactctagtatcgtatacctgtgtggaaagggcgactcctccattcgttatttcgaaataaccgatgaacccccattcgtacattatcttaacacattctctagcaaagaacctcaacggggaatgggattcatgcccaaacgagggttggacgtctcaaagtgtgaaatcgcacgtttttacaagctgcatgagcgtaagtgtgaacccatcattatgaccgtgcctcggaaaagtgatctgttccaggacgccgagcctgtgctcatctcattaagagacgggtatgtccctcctaagcatagagagctccgggttacgaaacgcaatatactggacgtgcggcccccatcgggaccccgtcgatcacaatccgctagcgacgctccgctgtcacagcacacattagaaaccctgctagaggaaatcaaggcgcttagagaaagagtgcaggcacaggagcagagaattactgctctggaaaacatgctgtgtgagctggttgatggcactgattag

SEQ ID NO: 275505 - DNA, 645 bp, Artificial Sequence
  derived and/or modified sequence
atgcccagcccctggggctggtttgctgtgacagcctgtggggcccagaggaacaactttgaggagcctgtggccctgcaggagatggacaccagcaatggagtgctgctgcccttctatgaccctgacagcagcatcgtgtacctgtgtgggaagggggacagcagcatccgctactttgagatcacagatgagcccccatttgtgcactacctgaacaccttcagcagcaaggagccccagaggggcatgggcttcatgcccaagaggggcctggatgtgtccaaatgtgaaattgcccgcttctacaagctgcacgagaggaaatgtgagcccatcatcatgacagtgcccaggaagagtgacctcttccaggatgctgagcctgtgctgatcagcctgagagatggctacgtgccccccaagcaccgggagctgcgggtgaccaagaggaacatcctggatgtgcggccccccagcggccccaggaggagccagagcgccagtgatgcccccctgagccagcacaccctggagaccctgctggaggagatcaaggccctgcgggagcgggtgcaggcccaggagcagaggatcacagccctggagaacatgctgtgtgagctggtggatggaacagactag

SEQ ID NO: 275506 - DNA, 645 bp, Artificial Sequence
  derived and/or modified sequence
atgcccagcccctggggctggttcgccgtgaccgcctgcggcgcccagaggaataatttcgaggagcctgtcgcattacaggagatggatacatccaatggagtcctgttacccttttacgatcctgactcttccatagtgtatctttgtggcaaaggcgactcctcaattcgctacttcgagattaccgacgagcctccttttgtgcattacctgaatacattcagctctaaggagccccagagaggcatgggatttatgcccaaacgtggtctcgacgtgtctaaatgcgagattgcgcgcttttataaactacatgagaggaagtgcgaacccatcattatgacagtccccaggaagtctgacctcttccaggacgccgaaccagtgctcataagcctccgggacgggtacgtgccccccaaacaccgcgagttaagagtcactaagcggaatattttggatgtgaggcctccgtcaggcccacgacgcagccagtccgcttccgatgctcccctgtctcaacacactttggaaactttactggaggagattaaagccctacgggaacgggtgcaggcccaagaacaacgaattaccgctctagagaacatgctttgtgaacttgtggatggcactgattag

SEQ ID NO: 275507 - DNA, 645 bp, Artificial Sequence
  derived and/or modified sequence
atgccttcaccatgggggtggttcgccgttaccgcctgtggagcccagagaaataactttgaagagcccgtggcccttcaggagatggacacctcaaacggtgtactcctgcccttctacgatccggactcttctatcgtgtacctttgcggcaagggtgatagtagtatcagatactttgagatcacagatgaaccacctttcgtccactatctcaataccttcagttctaaggagcctcagaggggcatgggctttatgccaaagcgagggctggatgtttctaaatgtgaaatcgctagattttataaactgcatgaaaggaagtgcgagcctatcatcatgaccgttcccagaaagtcggacttgtttcaggacgccgaaccggtgctcataagtctgcgtgatggctatgtcccacccaagcatagggaactgagagtgacaaaaagaaacatccttgacgttaggccgccatctgggccaagacggtcgcaatcagcatccgacgctccactgtctcagcacaccctcgagacgctgctggaggagattaaagctttacgtgagcgggtgcaggcacaggagcagagaataacagccttagaaaatatgctctgtgaactcgtggatggaacagattag

SEQ ID NO: 275508 - DNA, 2309 bp, Artificial Sequence
  derived and/or modified sequence
cgcagacgggaagctgctcagcaccggcttcagcaggatgagtgagcggcaactcgcgctctgggacccggtaggccaggccgcgccgggcgcgctagctcgctccttctctgggtctgccgggagcgccttcccgggctgtggctggcgcccaagaggccagagcggagcggggagctcccattcgggaaaagcctcgctgcgactccggggagccagcagacacccctgctctagggatcggcctttgagcgcgcttaagggttcgggatcggctgagagccgcgtgcctcctgctctctccaggcccggatgctctccaggtcaggggccagacgtggccccgcaggaagctgagtgcttaggccccatttgtctcttccccgcatccgctcctccaccccggacacccaagtcagcaagctggttgctcatccctccatgctcctcagggcaggcagctgggtgatgtccctccctgtctccccctccccccaggagaggtttgcggcccacgaggggatgaggcccatgcgggccgtcttcacgcgccagggccatatcttcaccacgggcttcacccgcatgagccagcgagagctgggcctgtgggacccggtaacgcagctggaggcttgggttttgctgcgtcgcgtgaaggatcctgcgctggcgcccccacctggtgatgccgagtccctgggggtggtttgctgtgactgcatgcggcgcgcagcggaacaacttcgaggagccagtggcactgcaggagatggacacaagcaacggggtcctattgcccttttacgatcccgactccagcatcgtctacctgtgtggcaagggcgacagcagcattcggtactttgagattaccgacgagccgcctttcgtgcactacctgaacacgttcagcagcaaagagccgcagcggggcatgggtttcatgcccaaaaggggactggatgtcagcaagtgtgagatcgcccggttctacaagctacacgaaagaaagtgtgaacctatcatcatgactgtgccccgcaagtcagacctcttccaggacgccgaacccgtgctcatttcgctgagggacggctatgtgccccccaagcaccgcgagctccgggtcacgaagcgcaacatcctggacgtgcgcccgccctccggcccccgccgcagccagtcggccagcgacgcccccttgtcgcagcacaccctggagacgctgctggaagagatcaaggccctccgcgagcgggtgcaggcccaggagcagcgcatcacggctctggagaacatgctgtgcgagctggtggacggcacggactagccccgcgcgccaggcaggcggagcggggcggggcgcacaagctcggccccgccccggcttttagtcccgaactccggaccccgccttcttgggctgggcccgggggcgggactggggagggaactccgcccctcgcgggagaccagaactcttggagcttaggggagacccacgtcgctccagcggaggctggactgcgagcctcgtctgggactcggctggagctggcctagggaggcctggggtaacctggggggctcagcaatggtgctgcacggcgaggtggtgtccccctttgtcctccgcccagggcagggaaagtgcttagtattagcgtgatgcttggggttattggagcctgagcttgacctcaaacgggtggcgatttgatgggtacccccaggctggggaaaatgacagcgcttctcctaatcagctcactggattccatcaccctgagcggtaaaccagatgggcgtcaccccagttctgcagacacatacacaacccgtttgctgcagagccggacccagtggctacacccacagcggtctgtggtagagaactctcttccttctttccaccgacaggggcgagggctgcttcctcgcggcagcccccgcgaagaaatctcgagagaactggcatgaggagttaggttcatcacaaatacacacacactgcccccaaccctctgccgttgcctctctcagaaaaacaagacgtactgaatgaaatattttactaagcgttcagtctgtgcctcctgcatgggtgggagtgaggggaacgagacccccagcctctgcaaatgctacccccaggctcctgggagacctggcgatgcactcctgggctcagggtccatcaggcagcctcttaccctagagctctctccactctgaggttcagaaggaccccaacccacaccgtaggcgttccccccaagtaaagttaggtagcaaaagcctccggt

SEQ ID NO: 275509 - protein, 185 aa, Artificial Sequence
  derived and/or modified sequence
MFETMAIEIEQLLARLTGVNDKMAEYTNSAGVPSLNAALMHTLQRHRDILQDYTHEFHKTKANFMAIRERENLMGSVRKDIESYKSGSGVNNRRTELFLKEHDHLRNSDRLIEETISIAMATKENMTSQRGMLKSIHSKMNTLANRFPAVNSLIQRINLRKRRDSLILGGVIGICTILLLLYAFH

SEQ ID NO: 275510 - DNA, 558 bp, Artificial Sequence
  derived and/or modified sequence
atgtttgaaactatggcaatagagatcgaacagttacttgcccgactgactggcgtgaacgacaaaatggctgaatatactaattccgccggagtccctagcctcaatgccgccttgatgcatacgcttcaaaggcacagagatattctgcaggattatacccacgagtttcacaagaccaaggctaactttatggcaatccgtgagagggagaatctcatgggctcagtgcgcaaggacattgaaagctacaagtcgggcagtggagttaacaatcggcggacagagttattcctgaaagaacacgaccacctgagaaacagtgataggttgattgaagagaccatcagcatagcaatggcaaccaaggaaaatatgacaagtcaaaggggtatgctgaagtccatccacagcaagatgaatacactggcaaatcggttcccagcagtaaattccctgattcagcgcattaacttaaggaaaaggcgcgattcactgattctgggaggagtgattggcatctgcactattttattactcctgtacgcgtttcattag

SEQ ID NO: 275511 - DNA, 558 bp, Artificial Sequence
  derived and/or modified sequence
atgtttgagaccatggcaatcgagattgaacaactcttggcccgcctcacaggcgtcaatgacaaaatggccgaatataccaatagcgccggagtgcccagcctcaacgccgcgttaatgcacaccttgcagcggcaccgggatattctccaagattacacccacgagttccacaagacaaaagccaactttatggccatccgtgagcgagaaaacctcatgggctcggttcggaaggatatcgaaagctacaagtcggggtctggcgtgaacaatcggcggacagagctgtttttaaaagagcacgaccacctccgcaactcagaccggctgatcgaagagaccatctctatcgccatggcgactaaggagaatatgacatcccagcgcggaatgctcaaaagtatccattctaaaatgaatacgctagcaaaccgattccctgcggttaactctttgatccaaaggatcaacctccgtaagaggagggactcactgatactaggcggagtgattggaatctgcacaattctactgcttttatatgccttccattag

SEQ ID NO: 275512 - DNA, 558 bp, Artificial Sequence
  derived and/or modified sequence
atgtttgagaccatggccattgaaattgagcagctgctggcccggctgactggagtgaatgacaagatggccgagtacaccaacagcgctggggtgcccagcctgaatgctgccctgatgcacaccctgcagaggcaccgggacatcctgcaggactacacccatgagttccacaagaccaaggccaacttcatggccatccgggagcgggagaacctgatgggctctgtgaggaaggacatcgagagctacaagagcggcagcggcgtgaacaacagaagaacagagctgttcctgaaggagcatgaccacctgaggaacagcgacaggctcatcgaggagaccatcagcatcgccatggccaccaaggagaacatgaccagccagaggggcatgctgaagagcatccacagcaagatgaacaccctggccaaccgcttccctgctgtgaacagcctcatccagaggatcaacctgaggaagaggcgggacagcctcatcctgggcggcgtcatcggcatctgcaccatcctgctgctgctgtatgccttccactag

SEQ ID NO: 275513 - DNA, 558 bp, Artificial Sequence
  derived and/or modified sequence
atgttcgagaccatggccatcgagatcgagcagctgctggcccggcttaccggggtcaacgacaagatggccgagtacacaaatagtgccggcgtgcctagcttaaacgcggcactgatgcacacactgcaacggcaccgagacatcctgcaagactacacccacgagttccataagactaaagccaacttcatggctattcgggagagggaaaacctaatgggatctgttcggaaggatatcgagtcgtacaaatctgggagcggagtgaacaacaggaggaccgagctgttcctgaaggagcacgaccatttgcgcaactctgaccggttgatcgaagaaactatatcgatcgctatggctactaaggaaaatatgacgagtcagcgggggatgttaaaatcaatacacagtaagatgaacaccctggccaatcgatttccagctgtaaactctttaatccaacgaatcaatcttcgcaagagaagagattccctgatcctggggggcgtgatagggatctgtacgattctcctcttattatacgcctttcactag

SEQ ID NO: 275514 - DNA, 558 bp, Artificial Sequence
  derived and/or modified sequence
atgttcgagaccatggccatcgagatcgagcagctgctggcccggctaacaggtgtgaatgacaagatggccgagtacacaaacagtgctggagtgcctagcctgaatgccgccctgatgcataccctgcagcggcacagggacatcctgcaagattatacccacgagtttcacaagacgaaagcaaatttcatggccatcagagagcgggaaaacttgatgggaagcgtacgaaaagatattgaatcatacaagtccggaagcggagtgaataataggcgcaccgaactcttcttgaaagagcacgaccacctgcggaattccgacaggttaattgaagaaacaatctcaattgcgatggctaccaaggagaacatgacaagtcagcgtgggatgcttaaaagcatccactccaaaatgaatacccttgcgaatcgattccctgcagtcaacagtctgatccagaggattaatctgaggaagcggcgagatagtctgattctgggaggggtgatcggcatctgcactattctgcttctgttatacgcatttcactag

SEQ ID NO: 275515 - DNA, 558 bp, Artificial Sequence
  derived and/or modified sequence
atgtttgagactatggccatcgagattgaacagctgcttgcccgtttgacaggggttaacgataagatggccgagtacacaaatagcgctggagtcccttcattgaacgctgcccttatgcacactctgcagcggcaccgggatattctccaggactacacacacgaatttcacaaaactaaggccaattttatggcaatcagggagcgggaaaacctgatggggagcgtgagaaaagatatcgaaagttataaatcaggaagcggtgtgaacaatcgaagaacagaactcttcctgaaggagcacgatcacttgcgcaacagcgatagactcattgaggagacaattagcatagctatggcgacaaaagaaaatatgacttcgcagagagggatgctgaagagtatccattctaaaatgaacactctggccaatcgattccctgctgtgaattccctgatccaacgtataaatcttcgcaaaaggcgggactccctgatcctggggggtgtgatagggatttgtacgatattgctgctgttgtacgcctttcactag

SEQ ID NO: 275516 - DNA, 558 bp, Artificial Sequence
  derived and/or modified sequence
atgtttgaaaccatggccattgaaatagagcaacttctggcccgtttgaccggcgtgaacgacaagatggcagagtatactaactctgcaggagtccccagcctgaacgcagcccttatgcacaccctccagaggcatcgcgatatcctgcaagattacacacatgagtttcataaaacaaaggccaactttatggcaatccgcgaaagggagaatctgatgggatcagtgagaaaagatattgaatcctacaagagcggctccggcgtgaacaacaggagaaccgagctgtttctgaaagaacatgatcacctacgcaatagcgatagactgattgaagaaactattagcatagcaatggcaaccaaggagaatatgacttcccaaagaggtatgctcaagagcatccactcgaagatgaacacattagctaatcgatttccagccgttaacagtctcattcaacgcattaatctgcggaagcgccgtgattctcttattctgggcggagtgattggcatctgcacgatcttgctgctgctttatgccttccactag

SEQ ID NO: 275517 - DNA, 558 bp, Artificial Sequence
  derived and/or modified sequence
atgttcgagaccatggccatcgagatcgagcagctgctggccagactgaccggcgtgaacgacaagatggccgagtacaccaacagcgccggcgtgcccagcctgaacgccgccctgatgcacaccctgcagagacacagagacatcctgcaggactacacccacgagttccacaagaccaaggccaacttcatggccatcagagagagagagaacctgatgggcagcgtgagaaaggacatcgagagctacaagagcggcagcggcgtgaacaacagaagaaccgagctgttcctgaaggagcacgaccacctgagaaacagcgacagactgatcgaggagaccatcagcatcgccatggccaccaaggagaacatgaccagccagagaggcatgctgaagagcatccacagcaagatgaacaccctggccaacagattccccgccgtgaacagcctgatccagagaatcaacctgagaaagagaagagacagcctgatcctgggcggcgtgatcggcatctgcaccatcctgctgctgctgtacgccttccactag

SEQ ID NO: 275518 - protein, 176 aa, Artificial Sequence
  derived and/or modified sequence
MTMCSGARLALLVYGIIMHSSVYSSPAAAGLRFPGIRPEEEAYGEDGNPLPDFDGSEPPGAGSPASAPRAAAAWYRPAGRRDVAHGILNEAYRKVLDQLSAGKHLQSLVARGVGGSLGGGAGDDAEPLSKRHSDGIFTDSYSRYRKQMAVKKYLAAVLGKRYKQRVKNKGRRIAYL

SEQ ID NO: 275519 - protein, 315 aa, Artificial Sequence
  derived and/or modified sequence
MLTKRALQKPCSDRFLRTAQINRSRRPVTSVTSGSSSRSRASPHRPLFLSSASLSAPPSLRVTLPPGSARLQTFEQNTSLGKRVPQLLLLLPLVPAASAQTPTPDGDASRVVTPAQELEEALCPPSYLAALLAAGGVEGMTMCSGARLALLVYGIIMHSSVYSSPAAAGLRFPGIRPEEEAYGEDGNPLPDFDGSEPPGAGSPASAPRAAAAWYRPAGRRDVAHGILNEAYRKVLDQLSAGKHLQSLVARGVGGSLGGGAGDDAEPLSKRHSDGIFTDSYSRYRKQMAVKKYLAAVLGKRYKQRVKNKGRRIAYL

SEQ ID NO: 275520 - DNA, 948 bp, Artificial Sequence
  derived and/or modified sequence
atgctgactaagcgcgctttgcaaaagccctgctccgaccgattcctgcgcaccgcacagataaacagaagccgaagaccagtgacttccgtgacctcaggctcttcttcccgaagtcgtgctagtccccatagaccattattcctctcttcagccagcttatctgcacctccgagtcttcgggtcacgctgccccctggctctgcccgcctgcagacttttgaacaaaacacgagtctaggaaagagggttccccagctgctactccttctgcccctggtgccggctgcctccgcccagactcctacacctgacggcgacgcatcccgagtagtgacaccagctcaagagctggaggaggccttgtgtccacctagttatcttgctgcactgctcgcagccggcggagttgagggcatgaccatgtgcagcggcgcccgattggccctcttggtgtacggaattatcatgcattccagtgtttactccagtccagctgcggcgggcctgcggtttcccggcatacggccggaagaagaagcttatggagaggacggcaatcccctacctgattttgacggaagtgagccgcccggtgccggatcccccgctagcgccccacgcgcagccgctgcttggtaccggcccgctgggaggcgggacgtagcccacggtattttgaacgaggcctatcgcaaggtcctggaccagctgtctgcggggaaacaccttcagtcgctggttgccaggggcgtgggtggaagcctaggcggaggcgctggggacgatgccgagccacttagtaaacgccattcggatggtattttcacagactcctacagcaggtataggaagcaaatggccgtcaagaagtacttagccgcagtcctcggaaagcggtacaagcagagagtcaaaaataagggaaggagaattgcgtacctctag

SEQ ID NO: 275521 - DNA, 1278 bp, Artificial Sequence
  derived and/or modified sequence
attctgtacttaaaggcaacaggcaggcagatgttgacaaagagggctctccaaaaaccatgttcggatagatttttgcgaactgcacagataaataggagcagaaggccggtcacctctgtaaccagcggtagcagcagcagaagccgcgcttcacctcatcgccccctctttctttcttctgcctctctctctgcgcccccttctctccgtgtcacgctccctcctggttctgcgcgtctacaaacttttgagcagaacacgagcctcggcaaacgagtcccgcagctcctcctgctgctcccgctggttcctgcggcttctgctcagacaccaacgccagacggcgatgcctctcgggtggtgactccagcgcaggaacttgaagaagcgctttgcccgccgtcctacctggcagctctcctggcagcgggaggagttgaaggaatgaccatgtgtagcggagcgaggctggccctgctggtctatgggataatcatgcacagcagcgtctacagctcacctgccgccgccggactccggttccccgggatcaggccagaggaagaggcgtacggcgaggacggaaacccgctgccagacttcgatggctcggagccgccgggcgcagggagccccgcctccgcgccgcgcgccgccgccgcctggtaccgcccggccgggagaagagatgtcgcccacgggatccttaacgaggcctaccgcaaagtgctggaccagctgtccgccgggaagcacctgcagtcgctcgtggcccggggcgtgggtgggagcctcggcggcggcgcgggggacgacgcggagccgctctccaagcgccactcggacgggatcttcacggacagctacagccgctaccggaaacaaatggctgtcaagaaatacttggcggccgtcctagggaagaggtataaacaaagggttaaaaacaaaggacgccgaatagcttatttgtagcgatgggttaccagctaccctgtgtatacagccctgacgcaatgaaaagtcgttttccaaactgactcaacagtcatcgctcgtgtgttctatccaaacatgtatttatgtaatgaagtaaagccattaaatgaatattttgataataatattgtttttctttctacaaagcactagagaatgcacagatatactttgtggaccaattattgatatatattataaatatatataaagaatatatatatatatatatatatatatatatataaagtatagagagaagttcatacaaagcgt

SEQ ID NO: 275522 - DNA, 948 bp, Artificial Sequence
  derived and/or modified sequence
atgctgaccaagagggccctgcagaagccctgcagcgaccgcttcctgaggacagcccagatcaacagaagcagaagacctgtgacctctgtgaccagcggcagcagcagccgcagccgggccagcccccaccggcccctcttcctgagcagcgccagcctgagcgccccacccagcctgcgggtgaccctgcccccaggcagcgcccggctgcagacctttgagcagaacaccagcctgggcaagagggtgccccagctgctgctgctgctgcccctggtgcctgctgccagcgcccagacccccaccccagatggagatgccagccgggtggtgaccccagcccaggagctggaggaggccctgtgcccccccagctacctggccgccctgctggccgccggcggcgtggagggcatgaccatgtgcagcggggcccggctggccctgctggtgtatggcatcatcatgcacagctctgtgtacagcagccctgctgctgctggcctgcgcttccctggcatccggcctgaggaggaggcctacggggaggatggcaaccccctgcctgactttgatggcagcgagcccccaggggccggcagccctgccagcgcccccagggctgctgctgcctggtacagacctgctggaagaagagatgtggcccacggcatcctgaatgaggcctacaggaaggtgctggaccagctgtctgctgggaagcacctgcagagcctggtggcccggggcgtgggcggcagcctgggcggcggcgctggagatgatgctgagcccctgagcaagaggcacagtgatggcatcttcacagacagctacagccgctacaggaagcagatggctgtgaagaagtacctggccgctgtgctgggcaagcgctacaagcagagggtgaagaacaagggccgccgcatcgcctacctgtag

SEQ ID NO: 275523 - DNA, 948 bp, Artificial Sequence
  derived and/or modified sequence
atgctgaccaagcgggccctgcagaagccctgcagcgaccggttcctacggaccgctcagatcaaccgcagtcgccgccctgtaacaagcgtaacgtcaggctcctcttctcggagcagggcttccccacaccgccctcttttcctgtcttccgccagtctcagtgctccaccaagcctcagggtgaccctacctcccggatcagctcgactacaaaccttcgagcagaatacctccttggggaaacgggtgccccagctccttttgctcctccctctggtcccagcggcatcagcacaaactcctacccctgacggcgatgcctcaagggttgtaactcctgcccaggagctggaggaggccttatgtccaccaagctatctggctgctttgttagccgccggcggcgtcgaaggaatgaccatgtgctccggagcccgtcttgctctactcgtctatgggatcattatgcactccagtgtctatagcagtccagccgccgccgggctgcggttccctggaattcggcccgaagaggaggcatacggcgaagatggcaaccctctgcccgattttgatggcagcgaaccaccgggcgcggggtcacctgcctccgccccacgtgccgctgctgcctggtaccgccctgcgggccgtcgcgatgtcgcccacggcatcctaaacgaggcttacagaaaggttctggatcagctttccgcaggaaagcacttgcagtccttagtggccagaggtgtaggaggtagcctcggtggaggagcgggtgacgatgccgaacctctctccaaacgccattctgatgggatcttcaccgactcctattccagataccgcaaacaaatggctgtgaaaaaatacctagctgcagttctggggaagagatataagcagcgagtaaaaaacaaaggccgaagaatcgcctacctctag

SEQ ID NO: 275524 - DNA, 948 bp, Artificial Sequence
  derived and/or modified sequence
atgcttacgaagcgtgctctgcagaaaccttgttcggatcggttcctccgtacagcgcaaattaaccggtcccgacgaccagtgacatccgtgacttccggctcctcatctagatctagggcaagcccacatcgcccattgttcctgtcttcagcatctttatccgcgcctcccagtctcagggtgactttgcccccaggcagcgccagactccagacgtttgagcagaacacatctctaggcaagagggtcccccagcttcttcttctactacctctcgtgcccgctgcttccgcacagacaccaaccccagacggtgatgcaagtcgagtggtgacacccgctcaggagctggaggaagccctgtgtcctccctcatacctggccgctctcctcgctgcgggtggtgtcgagggcatgaccatgtgttccggcgctcgcctggcacttctggtctatggcatcattatgcatagcagtgtctatagtagtccggcagccgcaggtctgcggttccccggtattagacccgaagaggaagcctacggcgaggatgggaacccgcttcctgactttgatggttcagaaccacccggagccggatctccagcttctgctccgagggctgctgctgcatggtataggcccgcaggacgcagagacgtggctcacggcattttgaacgaggcataccgcaaagtactcgaccagctcagcgcgggtaagcacctgcagagcctggtcgcacggggagtggggggaagcctgggaggtggggcaggtgacgacgcagaacccctgagtaagcgacatagtgatggcatttttaccgattcttactccagatacaggaaacaaatggccgtgaaaaagtatctggctgccgtcctggggaagcgctacaaacagcgtgtcaagaacaagggacgacgaatcgcctacctctag

SEQ ID NO: 275525 - DNA, 948 bp, Artificial Sequence
  derived and/or modified sequence
atgctgaccaagagagccctgcagaagccctgcagcgacagattcctgagaaccgcccagatcaacagaagcagaagacccgtgaccagcgtgaccagcggcagcagcagcagaagcagagccagcccccacagacccctgttcctgagcagcgccagcctgagcgccccccccagcctgagagtgaccctgccccccggcagcgccagactgcagaccttcgagcagaacaccagcctgggcaagagagtgccccagctgctgctgctgctgcccctggtgcccgccgccagcgcccagacccccacccccgacggcgacgccagcagagtggtgacccccgcccaggagctggaggaggccctgtgcccccccagctacctggccgccctgctggccgccggcggcgtggagggcatgaccatgtgcagcggcgccagactggccctgctggtgtacggcatcatcatgcacagcagcgtgtacagcagccccgccgccgccggcctgagattccccggcatcagacccgaggaggaggcctacggcgaggacggcaaccccctgcccgacttcgacggcagcgagccccccggcgccggcagccccgccagcgcccccagagccgccgccgcctggtacagacccgccggcagaagagacgtggcccacggcatcctgaacgaggcctacagaaaggtgctggaccagctgagcgccggcaagcacctgcagagcctggtggccagaggcgtgggcggcagcctgggcggcggcgccggcgacgacgccgagcccctgagcaagagacacagcgacggcatcttcaccgacagctacagcagatacagaaagcagatggccgtgaagaagtacctggccgccgtgctgggcaagagatacaagcagagagtgaagaacaagggcagaagaatcgcctacctgtag

SEQ ID NO: 275526 - protein, 123 aa, Artificial Sequence
  derived and/or modified sequence
TEDLFLNMEHESLTLEKKSKLEKNIKDDKSTKEKHVSKERNFKEERDKIKKESEKSFREGMSAIEESIGLHLVEKEIDIEKQEKHIKESKEKPEKRSQIKEKDIEKMERKTFEKGTSYIRITQ

SEQ ID NO: 275527 - DNA, 5969 bp, Artificial Sequence
  derived and/or modified sequence
gagtgttttcagaagtgggaatagcaggcgaggtcttgaggcctgaagaagcaaagcgtcgcttagtcaatgctgagatgcgtcttgtggaacagaatttttgggacatttgcaggatgagttagatgaactccgtgctgagatggaagagatgagagacagttatttagaggaagatgtttaccagctgcaggaacttcggcgagaactggaccgcgctaataaaaactgccgaatcctgcagtaccgtcttcggaaagccgagcagaaaagcctgaaagtggctgagacgggtcaggtggatggtgagcttattcgaagcctggagcaggacttgaaggtagccaaagatgtatctgtcagattgcaccacgaacttaagacggtggaggaaaagcgcgctaaagctgaggatgaaaacgaaactctccgacagcagatgattgaagtggaaatatccaaacaggccctccagaatgagctggagagactgaaagagagttccctaaaaagaagaagcactcgggaaatgtacaaggagaagaaaacctttaaccaggatgacagtgccgatttgaggtgccagctccagtttgccaaagaggaagccttcctgatgcgcaaaaagatggccaagctaggaagggagaaggacgagctggagcaggagctccagaagtacaagtccctctatggggatgtggacagtcccctgcccacgggggaagcaggcgggccccccagcacccgggaggccgagctgaagctgcggctaaagctggtggaggaggaagccaacatcttgggccggaagatcgtggagctggaggtggagaaccgtggcctcaaggcagagatggaggacatgcggggccagcaggagcgggagggcccgggtcgggaccacgcacccagcattcctacctcacccttcggtgactccctggagtcctccactgagctccgccgccacctgcagtttgtagaagaggaagcggagttgctccggaggtccatctccgagatcgaagaccacaaccggcaactgacccacgagctcagcaagtttaagtttgagcctccccgggagccgggctggctaggagagggtgcaagtcctggtgccgggggtggggcccccctgcaggaggagctgaagtcagccaggctgcagatcagcgagctcagcggcaaggtgctcaaactgcagcacgagaaccacgcgctgctgtccaacatccagcgctgcgacctggcagcccacctggggctgcgtgcccccagtccccgggacagcgatgccgagagtgatgcgggcaagaaggagagtgatggggaggagagccgcctgccccagcccaagcgggaagggcctgttggcggggagagtgactcggaggaaatgtttgagaagacgtcgggcttcgggagcgggaagccatcggaggccagcgagccatgccccacggagctcctgaaggcccgggaggactctgagtacctagtgaccctaaaacacgaggcccagcggctagagcggacggtggagcgcctcatcacggacaccgacagcttcctccatgatgcggggctgcggggtggtgcgcccttaccggggcctggcctccagggcgaagaggagcagggtgagggggaccagcaggagccccagctgctggggaccatcaacgccaagatgaaggctttcaagaaagagctgcaggccttcctggagcaggtgaaccgcattggggatggcctatcccccttgccccacctcacagagtcctctagcttcctctccactgtgacttccgtgtcccgggactcccccatcgggaacctggggaaggagctgggcccagacttgcagtccagactgaaagagcagctggagtggcagctcgggccggcccgaggggacgagcgggagagcctgcgcctccgagccgcgcgggagctgcaccgccgcgcagacggggacaccgggagccacgggctgggaggccagacctgcttcagcctggagatggaggaggagcacctctatgccttgaggtggaaagaactggaaatgcacagcctggctttgcaaaacaccctccatgagcgaacctggagtgatgagaagaatctgatgcagcaggagctccggtccttgaagcagaacattttcctcttctacgtcaaactcaggtggctgctgaaacactggcggcaagggaagcagatggaggaggaaggagaggagttcactgagggtgaacatccagagaccctctccaggctcggggagcttggagtccaggggggtcaccaggcggatggcccagaccacgacagtgaccgaggctgtggctttccagtgggggagcactccccacactcccgggtgcagattggagatcacagcttgcggctgcagaccgcggacaggggacagccccacaaacaggtggtggaaaaccagcagctgttcagcgccttcaaggccttgctggaggacttccgtgcggagctgcgggaggatgagcgtgcccgactacggctgcagcagcaatatgccagcgacaaggcggcctgggacgtggagtgggccgtgctcaagtgccgtctggaacagctggaagagaagactgagaacaagttgggagaactaggctcctccgctgagagcaagggggccttgaagaaggagagagaggtgcaccagaagctcctggcagacagtcacagcctggtcatggacctgcgctggcagatccatcacagcgagaagaactggaaccgggagaaggtggaacttctcgaccgcctggacagagatcggcaggagtgggagcggcagaagaaggaattcttgtggaggatagagcagttgcagaaagagaacagtccccggagaggtggcagtttcctctgtgatcaaaaagacggcaacgttcgcccctttccccaccagggaagcctccgcatgccccgtccagtggccatgtggccttgtgcagatgctgactccatcccgtttgaagaccggccgctgtccaagctgaaggagtcggacaggtgctcggccagtgagaatctctacctggatgccttgtccctggatgacgagccagaagagccaccagcccacaggcccgagagggagttcaggaaccgcctccctgaggaagaagaaaatcacaaaggaaatcttcaaagggcggtgtccgtgtcctccatgtctgagttccagcgtctaatggacatctcccccttcctgcctgagaagggcctgccgtccaccagcagcaaggaggatgtcaccccacccctgtctccagacgacctcaagtacatcgaggagttcaacaagagctgggactacacacccaacaggggccacaatggtggggggccggacctttgggccgacaggaccgaggtggggcgggcagggcacgaggacagcacagagcctttccccgactcctcctggtacctaaccacaagtgtcaccatgaccacggacaccatgaccagcccagagcactgccagaagcagccactgcggagccacgtcctcaccgagcagtcggggttgcgcgtgttacacagcccgcctgccgtgcgcagggtcgacagcatcacggcggcaggtggtgagggtccctttcccacaagcagagccagagggagcccgggagacaccaagggaggccctccagaacccatgctcagcaggtggccttgcacctcccccaggcactcccgggactatgtggagggggcacggcgcccccttgatagtcccctctgtacctccctggggtttgcctccccactgcacagcctggagatgtccaagaacttgagtgatgacatgaaggaggtggccttctctgtcaggaatgccatctgctccggccctggcgagctgcaagtcaaggacatggcctgccagaccaatgggtcccggacgatggggacccagactgttcagaccatcagtgtgggcttgcagactgaagccctgcgtggcagcggtgtcaccagcagcccccacaagtgtctcactccaaaggctgggggcggtgctacacccgtgtcgtctccttcccggagccttaggagcagacaggtggcccctgccatcgagaaggtgcaggccaagtttgaacgcacatgctgctcccccaagtatggttctcccaagctgcagaggaagcccctccccaaagccgaccagccaaataacaggacgtcaccagggatggcccagaaagggtacagtgagtcagcctgggcccgctccaccaccacaagggagagccccgtgcacaccaccattaatgatggcctctccagcctcttcaacatcattgaccacagccccgtggtgcaggaccccttccagaaggggctgcgggccggcagtcggtctcgctcagcagagccccgaccagagctgggcccaggccaggaaacaggcaccaattcccgaggaaggtcgcctagccccattggggtggggtcagagatgtgcagggaggaagggggagagggcacgccagtgaagcaggacttatctgctccccctggctacacgctcactgagaacgtggcccggatcctcaacaagaagctgctggaacatgccttaaaggaggagaggaggcaggctgcccacgggcccccgggtctccacagtgacagccactcgctgggggacacagccgagccagggcccatggagaaccaaactgtcttgctaactgccccctggggactctagccctgcccgcctcacgctgaactaccttgttctgcactagctccatccctagagccctgcttctccaggcccgagagaccagcaaaccgtcgccctccgtcccgttgggccccacattcccccactgcctcacagcctcagtcacccggagacccgacgtccttggaggagcatggtggcgaggagccgcccgaggagcagccacaccgagatgcaagcttgcatggattatcacagtataattcactgtaatttgcataaccacaccatcaccatgaacaaaactctgcccaacaggagagatctagttttctcaaggtcaaagaatgttttttaaaaacacaaagctgctgaatgttcaacctgtgaaactgagatgtttctagaatgaaacagtaaatgtgcctgtaataacttaatttttttcatagctcagaaaactatttttgtctccatcttttttacacacagtatattaaacgaaaaggtaaataaggtataaatagatttaaaaaataaaagttttaaaaaatgtacattttaagagattctgaacaccctcgctgtcaatacctgactgcctctgttaaatttgcactgttacattttggttcagtttatttccatgttgaattagagtggattaagttaattttattttgtcagtgttactgttttttacgaattttttaatgcttcagactgtctgattcagtgaactttttgtagtgaaaaagccatgaagccagtagacaagacagatattctgtatgctggaggggatacaggatgattttgaaaaggtacaaagtcctcagtgggcttagaaaattcactgtatgatccttatattatcctacttggcttgcacgtcttcgggtgcatgtatataccgctactgtgtcctcgccatcacctaaatgtgactcagtctgttccactgtaatatgttgtgaatttccttgtactgtacttttattgttggtcttcttgcatcgatgatccaacagcaacaccatttttaaattattgtgaaaagattaactggcaatgtacagagtttactcaaagttttcttaagggaaaacactacaaaaagtcacaaggataccaaatggaaacacatgatgatgcctctgggtctgtatgagaccgtgatgaagtagaaataaagcccttctgagatggc

SEQ ID NO: 275528 - protein, 1545 aa, Artificial Sequence
  derived and/or modified sequence
MEEMRDSYLEEDVYQLQELRRELDRANKNCRILQYRLRKAEQKSLKVAETGQVDGELIRSLEQDLKVAKDVSVRLHHELKTVEEKRAKAEDENETLRQQMIEVEISKQALQNELERLKESSLKRRSTREMYKEKKTFNQDDSADLRCQLQFAKEEAFLMRKKMAKLGREKDELEQELQKYKSLYGDVDSPLPTGEAGGPPSTREAELKLRLKLVEEEANILGRKIVELEVENRGLKAEMEDMRGQQEREGPGRDHAPSIPTSPFGDSLESSTELRRHLQFVEEEAELLRRSISEIEDHNRQLTHELSKFKFEPPREPGWLGEGASPGAGGGAPLQEELKSARLQISELSGKVLKLQHENHALLSNIQRCDLAAHLGLRAPSPRDSDAESDAGKKESDGEESRLPQPKREGPVGGESDSEEMFEKTSGFGSGKPSEASEPCPTELLKAREDSEYLVTLKHEAQRLERTVERLITDTDSFLHDAGLRGGAPLPGPGLQGEEEQGEGDQQEPQLLGTINAKMKAFKKELQAFLEQVNRIGDGLSPLPHLTESSSFLSTVTSVSRDSPIGNLGKELGPDLQSRLKEQLEWQLGPARGDERESLRLRAARELHRRADGDTGSHGLGGQTCFSLEMEEEHLYALRWKELEMHSLALQNTLHERTWSDEKNLMQQELRSLKQNIFLFYVKLRWLLKHWRQGKQMEEEGEEFTEGEHPETLSRLGELGVQGGHQADGPDHDSDRGCGFPVGEHSPHSRVQIGDHSLRLQTADRGQPHKQVVENQQLFSAFKALLEDFRAELREDERARLRLQQQYASDKAAWDVEWAVLKCRLEQLEEKTENKLGELGSSAESKGALKKEREVHQKLLADSHSLVMDLRWQIHHSEKNWNREKVELLDRLDRDRQEWERQKKEFLWRIEQLQKENSPRRGGSFLCDQKDGNVRPFPHQGSLRMPRPVAMWPCADADSIPFEDRPLSKLKESDRCSASENLYLDALSLDDEPEEPPAHRPEREFRNRLPEEEENHKGNLQRAVSVSSMSEFQRLMDISPFLPEKGLPSTSSKEDVTPPLSPDDLKYIEEFNKSWDYTPNRGHNGGGPDLWADRTEVGRAGHEDSTEPFPDSSWYLTTSVTMTTDTMTSPEHCQKQPLRSHVLTEQSGLRVLHSPPAVRRVDSITAAGGEGPFPTSRARGSPGDTKGGPPEPMLSRWPCTSPRHSRDYVEGARRPLDSPLCTSLGFASPLHSLEMSKNLSDDMKEVAFSVRNAICSGPGELQVKDMACQTNGSRTMGTQTVQTISVGLQTEALRGSGVTSSPHKCLTPKAGGGATPVSSPSRSLRSRQVAPAIEKVQAKFERTCCSPKYGSPKLQRKPLPKADQPNNRTSPGMAQKGYSESAWARSTTTRESPVHTTINDGLSSLFNIIDHSPVVQDPFQKGLRAGSRSRSAEPRPELGPGQETGTNSRGRSPSPIGVGSEMCREEGGEGTPVKQDLSAPPGYTLTENVARILNKKLLEHALKEERRQAAHGPPGLHSDSHSLGDTAEPGPMENQTVLLTAPWGL

SEQ ID NO: 275529 - DNA, 4638 bp, Artificial Sequence
  derived and/or modified sequence
atggaggagatgagagacagctacctggaggaggacgtgtaccagctgcaggagctgagaagagagctggacagagccaacaagaactgcagaatcctgcagtacagactgagaaaggccgagcagaagagcctgaaggtggccgagaccggccaggtggacggcgagctgatcagaagcctggagcaggacctgaaggtggccaaggacgtgagcgtgagactgcaccacgagctgaagaccgtggaggagaagagagccaaggccgaggacgagaacgagaccctgagacagcagatgatcgaggtggagatcagcaagcaggccctgcagaacgagctggagagactgaaggagagcagcctgaagagaagaagcaccagagagatgtacaaggagaagaagaccttcaaccaggacgacagcgccgacctgagatgccagctgcagttcgccaaggaggaggccttcctgatgagaaagaagatggccaagctgggcagagagaaggacgagctggagcaggagctgcagaagtacaagagcctgtacggcgacgtggacagccccctgcccaccggcgaggccggcggcccccccagcaccagagaggccgagctgaagctgagactgaagctggtggaggaggaggccaacatcctgggcagaaagatcgtggagctggaggtggagaacagaggcctgaaggccgagatggaggacatgagaggccagcaggagagagagggccccggcagagaccacgcccccagcatccccaccagccccttcggcgacagcctggagagcagcaccgagctgagaagacacctgcagttcgtggaggaggaggccgagctgctgagaagaagcatcagcgagatcgaggaccacaacagacagctgacccacgagctgagcaagttcaagttcgagccccccagagagcccggctggctgggcgagggcgccagccccggcgccggcggcggcgcccccctgcaggaggagctgaagagcgccagactgcagatcagcgagctgagcggcaaggtgctgaagctgcagcacgagaaccacgccctgctgagcaacatccagagatgcgacctggccgcccacctgggcctgagagcccccagccccagagacagcgacgccgagagcgacgccggcaagaaggagagcgacggcgaggagagcagactgccccagcccaagagagagggccccgtgggcggcgagagcgacagcgaggagatgttcgagaagaccagcggcttcggcagcggcaagcccagcgaggccagcgagccctgccccaccgagctgctgaaggccagagaggacagcgagtacctggtgaccctgaagcacgaggcccagagactggagagaaccgtggagagactgatcaccgacaccgacagcttcctgcacgacgccggcctgagaggcggcgcccccctgcccggccccggcctgcagggcgaggaggagcagggcgagggcgaccagcaggagccccagctgctgggcaccatcaacgccaagatgaaggccttcaagaaggagctgcaggccttcctggagcaggtgaacagaatcggcgacggcctgagccccctgccccacctgaccgagagcagcagcttcctgagcaccgtgaccagcgtgagcagagacagccccatcggcaacctgggcaaggagctgggccccgacctgcagagcagactgaaggagcagctggagtggcagctgggccccgccagaggcgacgagagagagagcctgagactgagagccgccagagagctgcacagaagagccgacggcgacaccggcagccacggcctgggcggccagacctgcttcagcctggagatggaggaggagcacctgtacgccctgagatggaaggagctggagatgcacagcctggccctgcagaacaccctgcacgagagaacctggagcgacgagaagaacctgatgcagcaggagctgagaagcctgaagcagaacatcttcctgttctacgtgaagctgagatggctgctgaagcactggagacagggcaagcagatggaggaggagggcgaggagttcaccgagggcgagcaccccgagaccctgagcagactgggcgagctgggcgtgcagggcggccaccaggccgacggccccgaccacgacagcgacagaggctgcggcttccccgtgggcgagcacagcccccacagcagagtgcagatcggcgaccacagcctgagactgcagaccgccgacagaggccagccccacaagcaggtggtggagaaccagcagctgttcagcgccttcaaggccctgctggaggacttcagagccgagctgagagaggacgagagagccagactgagactgcagcagcagtacgccagcgacaaggccgcctgggacgtggagtgggccgtgctgaagtgcagactggagcagctggaggagaagaccgagaacaagctgggcgagctgggcagcagcgccgagagcaagggcgccctgaagaaggagagagaggtgcaccagaagctgctggccgacagccacagcctggtgatggacctgagatggcagatccaccacagcgagaagaactggaacagagagaaggtggagctgctggacagactggacagagacagacaggagtgggagagacagaagaaggagttcctgtggagaatcgagcagctgcagaaggagaacagccccagaagaggcggcagcttcctgtgcgaccagaaggacggcaacgtgagacccttcccccaccagggcagcctgagaatgcccagacccgtggccatgtggccctgcgccgacgccgacagcatccccttcgaggacagacccctgagcaagctgaaggagagcgacagatgcagcgccagcgagaacctgtacctggacgccctgagcctggacgacgagcccgaggagccccccgcccacagacccgagagagagttcagaaacagactgcccgaggaggaggagaaccacaagggcaacctgcagagagccgtgagcgtgagcagcatgagcgagttccagagactgatggacatcagccccttcctgcccgagaagggcctgcccagcaccagcagcaaggaggacgtgaccccccccctgagccccgacgacctgaagtacatcgaggagttcaacaagagctgggactacacccccaacagaggccacaacggcggcggccccgacctgtgggccgacagaaccgaggtgggcagagccggccacgaggacagcaccgagcccttccccgacagcagctggtacctgaccaccagcgtgaccatgaccaccgacaccatgaccagccccgagcactgccagaagcagcccctgagaagccacgtgctgaccgagcagagcggcctgagagtgctgcacagcccccccgccgtgagaagagtggacagcatcaccgccgccggcggcgagggccccttccccaccagcagagccagaggcagccccggcgacaccaagggcggcccccccgagcccatgctgagcagatggccctgcaccagccccagacacagcagagactacgtggagggcgccagaagacccctggacagccccctgtgcaccagcctgggcttcgccagccccctgcacagcctggagatgagcaagaacctgagcgacgacatgaaggaggtggccttcagcgtgagaaacgccatctgcagcggccccggcgagctgcaggtgaaggacatggcctgccagaccaacggcagcagaaccatgggcacccagaccgtgcagaccatcagcgtgggcctgcagaccgaggccctgagaggcagcggcgtgaccagcagcccccacaagtgcctgacccccaaggccggcggcggcgccacccccgtgagcagccccagcagaagcctgagaagcagacaggtggcccccgccatcgagaaggtgcaggccaagttcgagagaacctgctgcagccccaagtacggcagccccaagctgcagagaaagcccctgcccaaggccgaccagcccaacaacagaaccagccccggcatggcccagaagggctacagcgagagcgcctgggccagaagcaccaccaccagagagagccccgtgcacaccaccatcaacgacggcctgagcagcctgttcaacatcatcgaccacagccccgtggtgcaggaccccttccagaagggcctgagagccggcagcagaagcagaagcgccgagcccagacccgagctgggccccggccaggagaccggcaccaacagcagaggcagaagccccagccccatcggcgtgggcagcgagatgtgcagagaggagggcggcgagggcacccccgtgaagcaggacctgagcgccccccccggctacaccctgaccgagaacgtggccagaatcctgaacaagaagctgctggagcacgccctgaaggaggagagaagacaggccgcccacggcccccccggcctgcacagcgacagccacagcctgggcgacaccgccgagcccggccccatggagaaccagaccgtgctgctgaccgccccctggggcctgtag

SEQ ID NO: 275530 - DNA, 4638 bp, Artificial Sequence
  derived and/or modified sequence
atggaagaaatgagagatagttatctggaagaggacgtctatcagttgcaagagttgcgacgggagcttgatcgagcaaacaaaaactgtcgcatcctgcagtaccggctccgaaaggcggaacagaagagtctaaaagtagccgagacgggccaagtcgatggcgagcttatcaggagcctggaacaggatttgaaggttgcaaaagatgtttcagtgaggctgcatcacgagctgaagacggtggaggaaaaaagagctaaggccgaggatgagaacgagacattgagacagcaaatgattgaagtggaaatcagcaaacaggcactacaaaacgagcttgagcgtttaaaagaatcctctctgaaaagaaggagtacccgagagatgtacaaagaaaaaaagactttcaaccaggatgactctgctgatcttagatgtcaacttcagtttgccaaagaagaagccttcttgatgcgaaaaaagatggctaagcttggccgagagaaagatgagcttgaacaagagttgcagaaatacaagtcattgtatggcgacgtggatagccccctgcccacaggcgaagccggaggtcccccaagcaccagggaggccgagttgaagttaaggctcaaactggtggaggaggaagccaatattttaggaagaaagatcgttgaactggaggtcgaaaaccgaggtctgaaagctgagatggaagatatgcgcggacagcaggagcgtgagggtccaggaagggaccatgcgccaagcatccccactagtccgtttggcgatagtctggagtcaagcacagagttgaggagacatctccagtttgtcgaggaggaagctgagctgttacgtaggtccatttccgagattgaagatcataatcgccagttgacccacgagctcagcaaattcaaattcgaaccgcccagagaaccaggctggcttggagagggagctagccctggcgcaggaggcggcgcacccctacaagaggaacttaaaagtgcacggctccagattagtgagctctcaggaaaagtgttgaaacttcagcatgagaaccacgccttgctgagcaatatccagagatgtgacctggctgcccacctgggcctgagagcgcccagtccacgcgactccgatgctgagtctgacgccgggaagaaagagtccgatggtgaagaaagtcggttgcctcaacctaaacgcgaaggccctgtgggaggggaaagtgacagtgaggagatgttcgaaaagaccagcggcttcggcagcggcaagccttctgaagcgtcggaaccctgtcccacagaacttctaaaagcacgagaggactccgagtacctggtaacactcaagcatgaagcccagagactggagcgaaccgtagaacgtctgatcactgacactgacagtttccttcacgacgctggcttaagaggcggagcccctctgccaggccctgggctccaaggtgaggaggaacagggcgaaggagaccaacaggaaccacagctgctgggcaccataaacgcaaagatgaaggcattcaaaaaggagctacaggcattcctggagcaggttaatcgcatcggcgatggcctctccccgcttccgcatttgaccgaatcaagctcttttttgtcaaccgtgacttctgtatcgcgggactcacccatagggaacctggggaaggaactcggccctgatttgcagtctcgactgaaagagcagctggagtggcagcttgggccagctagaggggacgagcgggaatcgttgcgtctgagagccgcccgagaacttcatagacgggccgatggagacacaggatcccacggtctggggggccagacctgtttctcacttgagatggaagaggagcacctgtatgcactaaggtggaaagagctggagatgcactcactggctttgcagaacaccctccacgagagaacctggagcgatgagaagaacttgatgcagcaagagctacgcagcctgaagcaaaacatttttttgttttacgtaaaactgcgatggctgctgaagcactggcgtcaaggcaagcagatggaagaggaaggggaggagtttaccgaaggagagcacccagagaccctgtcccgcttgggtgagctcggtgtgcaaggcggacatcaggcagatggccccgatcatgacagcgaccgcgggtgtggctttccagtcggagaacattccccccattcaagggtccaaatcggcgaccactctctgcggttacagacggcagaccgtggccaaccacataaacaagttgtggaaaatcaacaactcttttctgcctttaaagccctgttagaagactttagagcggaactacgggaagacgagcgtgctcgcctccgactacagcagcagtacgccagtgacaaagcggcttgggatgtggagtgggccgtgctgaagtgccggctggaacaactcgaagagaagactgaaaataaattgggtgaactaggctcctccgccgagagtaaaggggcactgaagaaggagcgtgaggtgcaccagaagctgctggctgactctcattctctggtcatggacctaagatggcaaattcaccacagcgaaaagaactggaaccgcgaaaaggtcgagttgctggacagacttgaccgggaccgccaggaatgggaaaggcagaaaaaggaatttctctggcgaattgagcaattgcagaaggagaactcaccccgcagagggggatcgtttctatgtgaccagaaagacgggaatgtaagacctttcccgcaccaggggagcctgcgaatgccccgaccagttgccatgtggccctgtgcagacgctgactccatcccgtttgaagaccgaccgctctctaaactgaaagagtctgaccggtgctccgcaagcgagaatctctatctggacgccctgagcctggatgacgagcctgaggaacctcccgcgcatcgcccagaaagagagtttagaaatcgcctacctgaagaggaggagaaccacaaaggcaatcttcagagagccgtctcagtgagcagtatgtcggagtttcaaagattaatggacattagtccctttctgccagagaaagggctcccttccacaagcagcaaggaggacgtgacaccaccgcttagccctgacgatctcaaatacatcgaagaatttaacaaatcttgggactatactcccaatcgtggtcataatgggggaggacctgatctctgggccgaccggactgaagtgggccgggcgggccatgaagacagtaccgaacccttcccagactcttcatggtatctcacaaccagtgtgaccatgaccaccgacaccatgacctctcccgaacattgtcagaagcagccactgcgctcccacgtcctgaccgagcaaagtggcctgcgggtcctgcatagccccccggctgtacgccgtgttgatagcattaccgctgctgggggggaagggccctttcctacttctagagctaggggtagtccaggcgacaccaagggcgggcctcctgagcccatgttgtcaagatggccctgcacctctccaagacactcgagagactacgtggagggagcccggcgacccctggatagccccctatgcaccagcctggggttcgcctcccccttacatagtctggaaatgtctaaaaacttgagcgatgacatgaaggaagtagccttttctgtgcgtaacgcgatttgcagcggcccaggggagctgcaggttaaggacatggcttgccagacaaacgggagtaggaccatgggtactcagactgtgcagaccatttcggtgggcctgcaaactgaagcactgcgggggagcggggtgacaagcagcccacacaaatgtctgaccccgaaggcaggcggcggagccacccccgtgagcagcccttccaggtccctgcgctcacgtcaagtggcccccgccatcgaaaaagtacaagccaagttcgaaaggacatgctgctctccaaagtatggctctcctaagttgcaacggaaacccctcccgaaggcggatcagccaaataacagaacctcgcctgggatggcacagaaaggttacagcgagtctgcgtgggctaggtccacaacaacacgggagagccccgtccatacaactatcaatgacgggctgtcctcccttttcaacattatagatcattctccagtggtgcaagatccctttcagaaggggcttagagccgggtcccgctctcggtcggccgagccacgccccgaactgggacctggtcaggagaccggcaccaattcccgtgggagatcgccatccccaatcggggttggcagtgagatgtgtagggaggaggggggcgaggggacccctgtaaaacaggatctttcagccccaccgggatacactctcactgagaacgtagccagaatccttaataagaagctgctcgagcatgcactgaaagaggaacgacgccaggcagcccacggtcccccggggcttcactctgattctcatagcctgggagatacagcagagccaggcccgatggaaaatcaaacagtcctgttgacagcaccctggggcctttag

SEQ ID NO: 275531 - DNA, 4638 bp, Artificial Sequence
  derived and/or modified sequence
atggaggagatgagggacagctacctggaggaggatgtgtaccagctgcaggagctgcggcgggagctggaccgggccaacaagaactgccgcatcctgcagtaccgcctgaggaaggccgagcagaagagcctgaaggtggccgagaccggccaggtggatggagagctgatccgcagcctggagcaggacctgaaggtggccaaggatgtgtctgtgcggctgcaccacgagctgaagacagtggaggagaagagggccaaggccgaggatgaaaatgagaccctgcggcagcagatgattgaggtggagatcagcaagcaggccctgcagaatgagctggagcggctgaaggagagcagcctgaagaggaggagcacccgggagatgtacaaggagaagaagaccttcaaccaggatgacagcgctgacctgcgctgccagctgcagtttgccaaggaggaggccttcctgatgaggaagaagatggccaagctgggccgggagaaggatgagctggagcaggagctgcagaagtacaagagcctgtatggagatgtggacagccccctgcccactggagaggccggcggcccccccagcacccgggaggccgagctgaagctgcggctgaagctggtggaggaggaggccaacatcctgggcaggaagatcgtggagctggaggtggagaacagaggcctgaaggccgagatggaggacatgaggggccagcaggagcgggagggccctggccgggaccacgcccccagcatccccaccagcccctttggagacagcctggagagcagcacagagctgcggcggcacctgcagtttgtggaggaggaggccgagctgctgcggcgcagcatcagcgagattgaggaccacaaccggcagctgacccatgagctgagcaagttcaagtttgagcccccccgggagcccggctggctgggggagggcgccagccctggggccggcggcggggcccccctgcaggaggagctgaagagcgcccggctgcagatcagcgagctgagcggcaaggtgctgaagctgcagcacgagaaccacgccctgctgagcaacatccagagatgtgacctggccgcccacctgggcctgcgggcccccagcccccgggacagtgatgctgagagtgatgctgggaagaaggagagtgatggagaggagagccggctgccccagcccaagcgggagggccctgtgggcggggagagtgacagcgaggagatgtttgagaagaccagcggcttcggcagcggcaagcccagcgaggccagcgagccctgccccacagagctgctgaaggccagagaagattctgagtacctggtgaccctgaagcatgaggcccagaggctggagaggacagtggagcggctcatcacagacacagacagcttcctgcatgatgctggcctgcggggcggggcccccctgcccggccctggcctgcagggcgaggaggagcagggcgagggggaccagcaggagccccagctgctgggcaccatcaatgccaagatgaaggccttcaagaaggagctgcaggccttcctggagcaggtgaacagaattggagatggcctgagccccctgccccacctgacagagagcagcagcttcctgagcacagtgacctctgtgtcccgggacagccccatcggcaacctgggcaaggagctgggccctgacctgcagagccggctgaaggagcagctggagtggcagctgggccctgcccggggagatgagcgggagagcctgcggctgcgggccgcccgggagctgcacagaagagcagatggagacaccggcagccacggcctgggcggccagacctgcttcagcctggagatggaggaggagcacctgtatgccctgcgctggaaggagctggagatgcacagcctggccctgcagaacaccctgcacgagaggacctggagcgatgagaagaacctgatgcagcaggagctgcggagcctgaagcagaacatcttcctgttctacgtgaagctgcgctggctgctgaagcactggaggcagggcaagcagatggaggaggagggggaggagttcacagaaggagagcaccctgagaccctgagccggctgggggagctgggcgtgcagggcggccaccaggctgatggccctgaccatgacagcgaccggggctgcggcttccctgtgggggagcacagcccccacagccgggtgcagattggagaccacagcctgcggctgcagacagctgaccggggccagccccacaagcaggtggtggagaaccagcagctgttcagcgccttcaaggccctgctggaggacttccgggcagagctgagagaagatgagcgggcccggctgcggctgcagcagcagtatgccagtgacaaggccgcctgggatgtggagtgggccgtgctgaagtgccgcctggagcagctggaggagaagacagagaacaagctgggggagctgggcagcagcgctgagagcaagggggccctgaagaaggagcgggaggtgcaccagaagctgctggccgacagccacagcctggtgatggacctgcgctggcagatccaccacagcgagaagaactggaaccgggagaaggtggagctgctggaccggctggaccgggaccggcaggagtgggagcggcagaagaaggagttcctgtggagaattgagcagctgcagaaggagaacagcccccggcggggcggcagcttcctgtgtgaccagaaggatggaaatgtgcggcccttcccccaccagggcagcctgaggatgcccaggcctgtggccatgtggccctgtgctgatgctgacagcatcccctttgaagatcggcccctgagcaagctgaaggagagtgaccgctgcagcgccagcgagaacctgtacctggatgccctgagcctggatgatgagcctgaggagcccccagcccacaggcctgagcgggagttcaggaaccggctgcctgaggaggaggagaaccacaagggcaacctgcagagagctgtgtctgtgtcctccatgtctgagttccagaggctgatggacatcagccccttcctgcctgagaagggcctgcccagcaccagcagcaaggaggatgtgaccccacccctgagcccagatgacctgaagtacatcgaggagttcaacaagtcctgggactacacccccaacagaggccacaacggcggcggccctgacctgtgggccgacagaacagaggtgggccgggccggccacgaggacagcacagagcccttcccagacagctcctggtacctgaccacctctgtgaccatgaccacagacaccatgaccagccctgagcactgccagaagcagcccctgcggagccacgtgctgacagagcagagcggcctgcgggtgctgcacagccccccagctgtgagaagagtggacagcatcacagctgctggaggagagggccccttccccaccagccgggcccggggcagccctggggacaccaagggcggccccccagagcccatgctgagccgctggccctgcaccagccccaggcacagccgggactatgtggagggcgcccggcggcccctggacagccccctgtgcaccagcctgggctttgccagccccctgcacagcctggagatgagcaagaacctgagtgatgacatgaaggaggtggccttctctgtgagaaatgccatctgcagcggccctggagagctgcaggtgaaggacatggcctgccagaccaacggcagcaggaccatgggcacccagacagtgcagaccatctctgtgggcctgcagacagaggccctgcggggcagcggcgtgaccagcagcccccacaagtgcctgacccccaaggccggcggcggggccacccctgtgagcagccccagccgcagcctgcggagccggcaggtggccccagccatcgagaaggtgcaggccaagtttgagaggacctgctgcagccccaagtatggcagccccaagctgcagaggaagcccctgcccaaggctgaccagcccaacaacagaaccagccctggcatggcccagaagggctacagcgagagcgcctgggcccggagcaccaccacccgggagagccctgtgcacaccaccatcaatgatggcctgagcagcctcttcaacatcatcgaccacagccctgtggtgcaggaccccttccagaagggcctgcgggccggcagccgcagccgctctgctgagcccaggcctgagctgggccctggccaggagaccggcaccaacagccggggccgcagccccagccccatcggcgtgggcagcgagatgtgccgggaggagggcggggagggcacccctgtgaagcaggacctgagcgcccctcctggctacaccctgacagaaaatgtggcccgcatcctgaacaagaagctgctggagcacgccctgaaggaggagcggcggcaggccgcccacggccccccaggcctgcacagcgacagccacagcctgggggacacagctgagcccggccccatggagaaccagacagtgctgctgacagccccctggggcctgtag

SEQ ID NO: 275532 - DNA, 477 bp, Artificial Sequence
  derived and/or modified sequence
atgcccgagccccccacccccagcgtgggcagctgcgccgcccgggcaagccgcatgagcgcggctccttgtagccgcgccccttcaccgatagatcacccgagggccgaggagtgcggccgggcagctcgagattggcaggctgcaccccccgcagcacccgtgagagaccccctcggagaagcttcatgggcccctgaaagcggcgaggacatggaaaatctttatgtccagctcaaactgcaaagcgttggaacctgtttcaatagggaggaactaccatccgttcttcaaggtgaagaattgggagctacctctgtaactaataagcctggcctgtctgccatgagaaaggagaccgaccagcaagtgggagagagaaagctcacatattgtggcgaccaagttactctgttcaccgaccaagcactgagccagattctgagtagtgaggaaggcaggatcaaggtgatgtag

SEQ ID NO: 275533 - DNA, 4638 bp, Artificial Sequence
  derived and/or modified sequence
atggaggagatgcgggacagctacctggaggaggacgtgtaccagctccaagagctacgcagagagctggaccgtgccaataaaaattgtagaattctccaatataggctgcgcaaggcggagcagaagtcgctgaaagtggcggaaactggacaagtggatggcgaactgattcgctccctggagcaggacctgaaagttgcgaaagatgtgtccgttagactgcaccacgaactgaaaactgtcgaggaaaaacgggctaaggcagaggacgagaatgagactctgcgccaacagatgattgaggtagagatttcaaagcaagccttgcaaaacgagttggagaggctgaaggagagtagtctcaagaggcggtcaacaagagagatgtataaagaaaagaagaccttcaaccaggatgacagcgccgacctacgctgtcagctgcagttcgctaaggaagaggcctttcttatgcggaagaagatggcgaagctcggaagagaaaaggacgagctggagcaggaacttcagaagtataaatccctgtacggcgacgtagattctccactccccaccggtgaggccgggggccctccctctactcgcgaagccgagttgaagctgcggctgaagctcgttgaggaggaagctaacatcctggggcgcaagattgttgaactggaggtcgaaaaccgaggcctcaaagcggaaatggaggacatgcgcggtcagcaggagcgtgaagggccagggcgcgaccatgcccccagtatccccaccagtcccttcggggattccctggaaagctcaacagagctgagacggcacctgcagtttgtggaagaggaggcagagctcctgcgtcggtcaatttcagaaattgaggaccacaacaggcagctcacacatgagctttcaaaattcaaatttgaaccacctcgcgagcctgggtggctcggagagggagcttcacccggcgccgggggcggggcgcctcttcaggaggagctgaagtccgcccggctgcaaatctctgagctgagcgggaaggtgctgaagctgcagcatgagaatcacgcattgttgagcaacatccagcgatgtgatctcgccgctcacctgggcctgagggcgccttctcctcgggattcggacgcagaatccgatgcgggaaagaaggagtctgacggggaggaaagccgcctcccacaaccaaagcgggaaggcccagtcgggggagagtccgacagcgaggagatgtttgagaagacttctgggttcgggagcggaaagccatctgaagcaagcgagccatgtccgacggaattgctgaaggctcgggaagattccgaatacctggtgacattaaagcacgaagcccagagactcgagcgtaccgtggagcgtctgataactgataccgacagttttctgcatgacgccggcttacgtggcggggctcccctgccaggccccgggcttcagggcgaagaagagcagggtgaaggcgatcaacaggagccccagctgctgggaaccatcaatgccaagatgaaagcattcaagaaagaactgcaggcatttctggaacaagtaaatcggatcggcgatggactgtctccactgccgcacttaaccgaatcttcctcatttctgagcaccgtaaccagcgtgtcaagagactccccaatcgggaatctgggaaaggagctcggacccgatttgcaatctcgactgaaagaacaactggaatggcagctgggcccagcaagaggagatgagcgggagtcattgcgacttagggccgcccgggaattacaccggagagcggacggcgatacagggtcacacgggcttgggggacagacttgtttcagtttggaaatggaagaggaacatctttatgcgctacggtggaaagaactggaaatgcactcactcgccctccaaaacactctacatgaacgaacttggtctgatgaaaagaaccttatgcagcaagagctgcggtctctcaaacagaatatcttcttattctacgtgaaactcagatggctgttgaagcattggcgacaaggaaaacagatggaagaagaaggcgaggagttcactgaaggagagcatcctgaaactttgagcagacttggcgagctgggggttcaagggggccatcaggctgacggaccggatcatgactccgaccgcgggtgcggttttcctgtgggggaacactctcctcactcacgagtccagattggagaccattccctccgcctgcaaacggcggaccggggtcagccccacaagcaggtggtggaaaaccagcaactctttagcgctttcaaagctcttctggaagatttccgcgcagagctgcgggaagacgagcgggcccgtctacggttgcaacagcagtatgcttcagataaggctgcttgggacgtggagtgggccgtgttgaaatgtaggttggaacagctggaggaaaaaactgaaaacaagctgggcgaacttggatcctccgcagaaagcaaaggtgcactcaagaaagaacgggaagtccaccagaagcttctcgctgatagtcatagtcttgtcatggacctgcggtggcaaattcatcacagtgagaagaattggaatagagagaaggttgaattactggatagacttgatcgggatcgacaggaatgggaacgccagaaaaaagaattcctgtggcgtattgaacaactgcagaaggaaaactcaccaaggcgcggtgggtcctttctctgcgatcagaaagatggcaatgtgcggccctttccccatcaggggagtctgagaatgccacgccctgtggctatgtggccatgcgctgacgccgactccatcccctttgaggacagaccacttagtaagttaaaggaatccgatcgctgtagtgcctctgagaatctatacctagatgctctttctttggacgatgagcccgaggagcctcccgcccatcgtcctgagagagaattccgcaataggttaccagaagaagaagaaaaccacaaagggaatttgcagcgggctgtaagcgtgagttctatgtccgaatttcaaaggctcatggatatctccccgtttttgcctgagaaagggctgccctctactagctcaaaggaggatgtgacaccacccctcagcccagacgacttgaaatacatcgaggagttcaacaaatcttgggactacactcctaatcggggtcataatgggggcgggcccgacctgtgggcagatagaaccgaagtagggagagcaggacacgaggactcaactgagccattccccgactctagctggtatttgacgacgtccgtgactatgaccaccgacactatgacttcacctgaacactgtcagaagcagccacttaggtctcacgttcttacggaacagagcgggctgcgcgtgctgcattctcctcccgctgtaagaagggttgattccatcacggccgcaggtggggaagggccattcccgacctctcgggcccgagggtcacctggagatacaaagggaggaccacctgaaccgatgttgtcacgctggccttgcacatcacctagacactctagggattacgtggagggagcccggaggcctctggattccccactctgtacctccctcggtttcgcctcccctttacattcactggagatgagcaaaaatctgtctgacgatatgaaagaagtagccttcagcgtccgtaatgcaatttgcagcgggcccggagaactccaagtcaaagatatggcctgccagactaatgggagtcgcactatggggacccagaccgtgcagacgatttcagtagggctgcagaccgaggccttgcgcggatcaggtgtgacgtcatccccacacaaatgtctcacacctaaagctggggggggggcgactccagtttcgtctccatcccggtccctgcgaagtcgacaggttgccccggcaatagagaaggttcaagccaagtttgagaggacatgttgtagtcccaaatacggaagcccaaagctgcaaaggaaaccgctccccaaggccgaccaacctaataaccgaacatcaccggggatggcacagaaaggatatagcgaatccgcctgggctcgaagtaccaccacccgggaaagccccgtccatactaccatcaacgacggcctcagcagcttgttcaatattattgaccactcccctgtggtccaggacccttttcaaaagggcctgcgtgctggaagccggtcgcggagcgcggagcccagaccggagctggggcctgggcaggaaactggcacaaactcacgaggcaggtccccgagtcccataggcgttgggagtgagatgtgccgagaggaggggggcgaggggacccctgttaagcaagatctaagcgccccacctggttacactctcacagaaaacgtcgcccgaattttgaacaaaaagctactcgagcatgctctaaaggaggagcgccgtcaggcagcccacggcccccctggtctgcatagtgactcgcatagcctgggggacacggcagagcccggccccatggagaaccagaccgttctgctcaccgccccctggggtctgtag

SEQ ID NO: 275534 - DNA, 4638 bp, Artificial Sequence
  derived and/or modified sequence
atggaggagatgcgtgactcctacctggaagaggatgtctaccaactccaggaactgcgcagagaacttgaccgggcaaataaaaattgcaggattctccagtaccgactgagaaaagccgaacaaaagtctctgaaggtggccgaaactggtcaggtggacggtgagctcatccggtcattggagcaagatttgaaagtggctaaggacgtgtccgtgcggctgcaccatgagctgaagaccgtcgaagagaagagagccaaggccgaagatgagaacgaaaccctgcgccagcagatgattgaagtggagatttcaaagcaggccctccagaatgagttggagcgcctgaaagagagctcgctcaaacgcaggagcaccagggaaatgtataaggagaaaaagacttttaaccaggacgactccgccgatcttaggtgccaactgcagtttgcaaaggaggaagctttcttgatgaggaagaagatggccaagttggggagagagaaggatgagctggagcaggagctgcagaagtataaaagtctttacggggatgtcgactcaccccttcccacaggagaggcaggcggaccgcctagcacacgggaagctgaattaaaactccggctgaagctcgttgaggaagaggcgaatattctgggaagaaagattgtggagctggaggtcgagaatcggggactgaaagcggagatggaagacatgagggggcaacaagaacgcgaaggaccaggtagggatcatgcccctagcatcccgacatcaccctttggagactctctggaatcatccactgagctgcgtcggcacctgcagtttgtggaggaggaagcagagctgctaagacgttcaatttccgagatcgaagaccataatcgtcagttgacccacgagctgagtaagttcaagtttgagcccccaagggagccaggctggttaggggagggggcttctccaggcgctggaggcggagcccctttgcaggaggaactcaagtccgcacggttgcagataagcgagctgagcggaaaggtcctaaaacttcaacatgaaaaccacgcactgctgtcaaacattcagaggtgtgacttggcagctcaccttggcctgagagccccatctccccgtgacagtgacgccgagtccgatgcgggaaaaaaggagagcgacggtgaagagtccaggctcccccagccaaagagggagggccctgtcggcggtgagtccgatagtgaggaaatgttcgagaaaacctcgggctttggatccggcaagccatcagaggcaagtgagccctgtccaacagaactgttgaaagccagggaggacagtgagtacctggtgactctgaagcacgaggcacagcggctagaacgcaccgttgagaggctgataacagataccgattcttttcttcatgacgccggtctccgcggtggcgctcccctccctggccctggtctgcagggcgaggaggagcaaggagagggcgaccagcaggagccccaactactaggcacaataaacgccaagatgaaggcctttaagaaggaactccaggcgtttttggagcaggtgaacaggataggcgacgggttaagtcctttgccccacttgaccgagtcgagcagtttcctatctaccgtgacttctgtcagccgggactctcctattggtaacctgggcaaagagctcggcccagacctgcaatctaggctgaaggagcaacttgagtggcagctagggccagcccgaggagatgagcgcgaatccctgagacttcgcgcagccagagaattgcacaggagggccgatggagataccggctctcatggacttgggggtcagacatgcttctcactggagatggaagaggagcatctgtacgcactcaggtggaaggagctggagatgcactccctggctttgcagaacactcttcacgaacgcacatggtcagacgagaagaatcttatgcagcaagaacttaggtccctgaagcagaatattttcttgttttacgtgaaactgcgatggctgttgaaacattggaggcagggcaagcagatggaggaggagggcgaggaatttaccgaaggtgagcatccggagacactgagtcggttaggggagctgggagtgcaaggtgggcatcaagctgatggccctgaccatgatagtgacaggggttgcggttttccggtgggcgaacactctccccatagccgggtacaaatcggcgatcatagccttaggttgcaaactgcagaccgcggtcagccccataagcaggtcgtggagaatcagcagctcttttctgcctttaaagcactgcttgaagatttccgtgctgaactacgggaagacgagcgagcacggctccggctgcagcagcagtatgccagtgataaggctgcgtgggacgtcgagtgggctgtgctgaaatgcagactagaacagcttgaggagaagacggaaaacaagttaggggagctcggaagcagtgctgagtcaaagggcgcacttaagaaggaacgggaagttcatcaaaagctactggcagactcacatagtctggtcatggatcttagatggcaaatccatcacagcgagaagaattggaaccgggaaaaggtagagcttctggatcgcctggacagggaccgacaggagtgggagagacagaagaaagagttcctatggcggatagagcagctccaaaaagagaactctcccagaaggggcggtagctttctgtgcgaccagaaggacggcaacgtaaggcccttcccgcaccagggctccctgcgtatgcctaggcccgtcgctatgtggccctgtgccgacgccgactctatccctttcgaggatcggcctctgtctaaactcaaggagtccgatcgatgcagcgcatctgagaacctgtatcttgatgccctcagcctagatgacgagcccgaagaacccccagcccaccgcccagagcgggagtttagaaaccgcctgcccgaagaagaagagaaccataaggggaacctccagagggctgttagtgtctcatccatgtcggagtttcagaggctcatggatatatcaccattcctaccggagaagggtctccctagtacaagctctaaggaggatgtcacacctccactctctccggacgatctaaagtacatagaggagttcaataaaagttgggactacaccccaaatcgtggtcacaacggcggaggacccgacctctgggccgacagaacggaagttggtagggctggccacgaagactccacggagcctttccccgacagctcatggtatcttaccaccagtgtcacgatgaccaccgatacaatgacaagccctgagcactgccaaaagcagcctttgcggtcccatgtgctcaccgaacaaagcggcctacgagtgcttcactccccacctgccgtgcggagagtcgactcaattactgcagctggtggcgagggaccttttcccacgtcgagagcaagggggtctccaggcgacaccaagggtggtcccccagagcccatgctcagccggtggccctgcactagccccaggcactcgcgcgactatgtggaaggggctagacgcccactggattcccctctctgtactagcctcggatttgcttctccactccacagcctggaaatgagcaagaatctaagcgacgatatgaaggaggtggccttttctgtaagaaatgctatatgcagcgggccaggggaactacaagtaaaagatatggcttgtcagactaatgggtctcggacaatgggcacacaaacagtgcagaccattagcgtcggactgcagaccgaagcactgcgcggaagtggagtgacttcctcaccacacaagtgtctcacacctaaggctgggggtggagcgacccccgtgagttccccttctcgttcactgaggtcacgccaggtcgcaccggcaatcgagaaggtgcaggccaaattcgaaaggacttgctgcagcccgaaatatggctctccaaagctgcagcgaaaaccattgccaaaagcagatcagccaaacaatcgcacctcacccggaatggcccagaagggatacagtgaatcagcatgggcaagaagtaccacgacaagagaatccccggtgcacactacaattaatgacggcctgagcagcttatttaatattatcgaccatagccccgttgttcaggacccttttcaaaaaggtctgagagcaggatctcgatcacgctccgctgagcctcggcctgagctaggaccagggcaggagacaggtacgaatagccgcggtcggtcgcctagtcccattggcgttggatctgaaatgtgtagggaggagggtggggaaggcactcctgtgaagcaggatctgagcgctccgccaggctacaccctgacggaaaacgtggcacgcattctcaacaagaagctattggagcacgctctgaaagaggaaagacgccaggctgctcacgggcctccaggtcttcactccgactcccatagtctgggagataccgcagagcctggtccaatggaaaaccagaccgtgctccttacagctccgtggggactgtag

SEQ ID NO: 275535 - DNA, 1862 bp, Artificial Sequence
  derived and/or modified sequence
agaaaaacgaaggtccttccagaagctggtggcaacttcactggggagatattgcaaataacagcgggaacatgaagccgccactcttggtgtttattgtgtgtctgctgtggttgaaagacagtcactgcgcacccacttggaaggacaaaactgctatcagtgaaaacctgaagagtttttctgaggtgggggagatagatgcagatgaagaggtgaagaaggctttgactggtattaagcaaatgaaaatcatgatggaaagaaaagagaaggaacacaccaatctaatgagcaccctgaagaaatgcagagaagaaaagcaggaggccctgaaacttctgaatgaagttcaagaacatctggaggaagaagaaaggctatgccgggagtctttggcagattcctggggtgaatgcaggtcttgcctggaaaataactgcatgagaatttatacaacctgccaacctagctggtcctctgtgaaaaataagattgaacggtttttcaggaagatatatcaatttctatttcctttccatgaagataatgaaaaagatctccccatcagtgaaaagctcattgaggaagatgcacaattgacccaaatggaggatgtgttcagccagttgactgtggatgtgaattctctctttaacaggagttttaacgtcttcagacagatgcagcaagagtttgaccagacttttcaatcacatttcatatcagatacagacctaactgagccttacttttttccagctttctctaaagagccgatgacaaaagcagatcttgagcaatgttgggacattcccaacttcttccagctgttttgtaatttcagtgtctctatttatgaaagtgtcagtgaaacaattactaagatgctgaaggcaatagaagatttaccaaaacaagacaaagctcctgaccacggaggcctgatttcaaagatgttacctgggcaggacagaggactgtgtggggaacttgaccagaatttgtcaagatgtttcaaatttcatgaaaaatgccaaaaatgtcaggctcacctatctgaagactgtcctgatgtacctgctctgcacacagaattagacgaggcgatcaggttggtcaatgtatccaatcagcagtatggccagattctccagatgacccggaagcacttggaggacaccgcctatctggtggagaagatgagagggcaatttggctgggtgtctgaactggcaaaccaggccccagaaacagagatcatctttaattcaatacaggtagttccaaggattcatgaaggaaatatttccaaacaagatgaaacaatgatgacagacttaagcattctgccttcctctaatttcacactcaagatccctcttgaagaaagtgctgagagttctaacttcattggctacgtagtggcaaaagctctacagcattttaaggaacattttaaaacctggtaagaagatctaatgcatcctatatccagtaagtagaattatctcttcatctgggacctggaaatcctgaaataaaaaaggataatgcaataaacacagttgcaggaaagtatgttagctatatactatgaagtactcttagtttacttatgttgaatggcttagctattaatactcaaattgagttaaaatgaaaattcctccttaaaaaatcaaacgtaatatgtattacatttcatggtacattagtagttctttgtatattgaataaatactaaatcacctaggtgtctatgttctatcacatctacaaacatgtcacttcctaattaacaaaatgttcttcctttagtttgcttttgcacttaaaatatatataattgacttttttgg

SEQ ID NO: 275536 - DNA, 642 bp, Artificial Sequence
  derived and/or modified sequence
atgcgccgttgtcagatcatcagggacatgattggccccgagaaaacactgatgatggacgctaatcaaaggtgggatgtgcccgaggctgtagagtggatgagcaaactcgcaaagtttaaacctctgtggatcgaggagcccacgtctcccgatgacattctcggccacgcgaccatttccaaagcgttggtgccgctagggattggcattgctaccggagagcagtgtcataatcgcgtcattttcaagcaactgctccaggctaaagctctccagtttctgcaaatcgattcgtgccgccttggttcggtcaatgaaaatttgagcgttctgttgatggccaagaaattcgagattccggtctgtccccatgctggaggagttggcctctgtgaattggtccagcacctgattatcttcgactacataagcgtgtctgcctctctggagaaccgtgtttgcgagtacgttgaccatcttcatgagcacttcaaatatcccgtaatgatccagagagcgagctacatgccccctaaggatcccgggtactccacagaaatgaaagaggagtctgtgaagaagcaccaataccccgatggtgaagtttggaagaaactgctgcccgcacaggagaactag

SEQ ID NO: 275537 - DNA, 642 bp, Artificial Sequence
  derived and/or modified sequence
atgaggcgctgccagatcatccgggacatgattggccctgagaagaccctgatgatggatgccaaccagcgctgggatgtgcctgaggccgtggagtggatgagcaagctggccaagttcaagcccctgtggattgaggagcccaccagcccagatgacatcctgggccacgccaccatcagcaaggccctggtgcccctgggcattggaattgccactggagagcagtgccacaacagagtcatcttcaagcagctgctgcaggccaaggccctgcagttcctgcagattgacagctgccgcctgggctctgtgaatgaaaacctgtctgtgctgctgatggccaagaagtttgagatccctgtgtgcccccacgccggcggcgtgggcctgtgtgagctggtgcagcacctgatcatctttgactacatctctgtgtctgccagcctggagaacagagtgtgtgaatatgtggaccacctgcacgagcacttcaagtaccctgtgatgatccagagggccagctacatgccacccaaggaccccggctacagcacagagatgaaggaggagagcgtgaagaagcaccagtacccagatggagaggtgtggaagaagctgctgcctgcccaggagaactag

SEQ ID NO: 275538 - DNA, 642 bp, Artificial Sequence
  derived and/or modified sequence
atgcggcggtgccagatcatccgggacatgatcggccccgagaagaccctcatgatggacgccaaccagcgttgggatgtacccgaagcggtggaatggatgtccaaactcgctaagtttaagcccctctggatcgaagagcccacatcaccggatgacattctgggccacgctacaatatctaaggctcttgttccgctcgggataggtatcgcaacaggggagcagtgtcataatagggtaatcttcaaacagctactccaggccaaggcactgcaattcctgcagatcgactcctgtaggctcggctcagtcaacgagaatttaagcgtactgttaatggccaaaaagtttgaaatccccgtgtgtccgcatgccggaggtgtcggcctctgtgagctggtccagcatttaatcatatttgactatatatcagtaagcgcttcacttgagaacagggtgtgcgaatatgtcgaccatttgcatgaacactttaaatacccggtgatgattcaaagagcttcttacatgccacctaaagacccagggtattccactgaaatgaaagaagagagcgtgaagaagcaccagtatccagacggggaagtctggaagaagttactcccagctcaagagaattag

SEQ ID NO: 275539 - DNA, 642 bp, Artificial Sequence
  derived and/or modified sequence
atgaggcgttgtcagatcatacgcgacatgataggcccagagaagactctgatgatggatgccaatcagagatgggacgtgcctgaggcagtggaatggatgtctaaactggctaagtttaagcccctgtggatcgaggaacccacgagccctgacgatatcctcggccatgctactatctctaaagccctcgtacccctcggaatcggtatagccactggcgaacagtgtcacaacagagttattttcaaacagctgctgcaggccaaggccctgcaatttttgcagattgattcttgtagactggggtcagtgaacgagaacctgtctgttctcctgatggcaaaaaaattcgagattccagtatgcccgcatgccggaggtgttgggctttgcgagctggtgcagcaccttattatctttgattacatctccgtgagtgcctcgctggagaaccgggtgtgtgagtacgtggatcacctgcacgagcactttaaatatcctgtgatgatccagagagcatcctatatgccacctaaagaccctgggtacagcaccgagatgaaagaagagtctgtgaaaaaacatcagtaccctgacggagaagtctggaaaaaactactgcccgcacaggagaactag

SEQ ID NO: 275540 - DNA, 642 bp, Artificial Sequence
  derived and/or modified sequence
atgagaagatgccagatcatcagagacatgatcggccccgagaagaccctgatgatggacgccaaccagagatgggacgtgcccgaggccgtggagtggatgagcaagctggccaagttcaagcccctgtggatcgaggagcccaccagccccgacgacatcctgggccacgccaccatcagcaaggccctggtgcccctgggcatcggcatcgccaccggcgagcagtgccacaacagagtgatcttcaagcagctgctgcaggccaaggccctgcagttcctgcagatcgacagctgcagactgggcagcgtgaacgagaacctgagcgtgctgctgatggccaagaagttcgagatccccgtgtgcccccacgccggcggcgtgggcctgtgcgagctggtgcagcacctgatcatcttcgactacatcagcgtgagcgccagcctggagaacagagtgtgcgagtacgtggaccacctgcacgagcacttcaagtaccccgtgatgatccagagagccagctacatgccccccaaggaccccggctacagcaccgagatgaaggaggagagcgtgaagaagcaccagtaccccgacggcgaggtgtggaagaagctgctgcccgcccaggagaactag

SEQ ID NO: 275541 - DNA, 2382 bp, Artificial Sequence
  derived and/or modified sequence
aatagagacagggtttcgctatgttgatcaggctggtcctgaactcctgacctcaggtgatccgcctgcctcagcctcccaaagtgctgggattataggcgtgagccactgcacccagccaggtgggtctttaatatcagcaaccctttgcttccatgtaatttccagccagaggtcccagttcccaagagccaggctgttcctcttccacttgagtgccctcctctccctccaggccacctcctttccacactgctcatctgcacttctcccttctgactctcgcctgtgcaggtaaagacctctggccatcctaagaccttctctggatgaacctcgatggttgatgaccctgcatcctgaaacagggcaggatgcagagggaccatcatctcttttgacccagtcactgtgtgtccctcagcacagctcacggtggcactttttgcctgtgacatgtcaccaggcttcctatctgacttgcagccactctggtctctgagcctcctgctactcagtgtgtcctgtggagcaggagctccagcatcacctgggagcttgtgagaaatgcagcctgggcctctccccagacccgctgcctgggaatctgcattggaacaagatcccctagtgattcctatgcgttcttaagttggagaggcactgaattcttgttaatgcctcagctaaataaaggcttgaggagtgagaacttgaaggaggcagcatgaagccgcggaaagaggtgttggcatctgatagaactgaaatcacatcttgccttttcccctcatccgctgcaagtacttgctgtgtgatcaattactcaacctctctgaacttcattttctctcagtagaaataatatgagctttggtcctcctccaagttgccatatctcagaaggaccagcacagggcaggattcagagcagctgctgtaagtgctgtttgccctccctctgcatacccgggggaggctgcagcagtgtatctggtgagtcagagaaggctgtggggagatttaaagggtctcttcccagcacaggaagcctggcacccagagcctaaggccagccaccctctctggagcatcacggatcatgtagttgaagcctccagctggtacagaagagaacagcaggtgcctgagaatgtgcggcactctgcaagctggggctctttgcaaagcagcagggggacctcagccaaggaggcgcacagggagggtttaaagtaaaggtgggtgctgatctccaggatgacatgcgaagatgccaaatcatccgagacatgattggaccggaaaagactttgatgatggatgccaaccagcgctgggatgtgcctgaggcggtggagtggatgtccaagctggccaagttcaagccattgtggattgaggagccaacctcccctgatgacattctggggcacgccaccatttccaaggcactggtcccattaggaattggcattgccacaggagaacagtgccacaatagagtgatatttaagcaactcctacaggcgaaggccctgcagttcctccagattgacagttgcagactgggcagtgtcaatgagaacctctcagtattgctgatggccaaaaagtttgaaattcctgtttgcccccatgctggtggagttggcctctgtgaactggtgcagcacctgattatatttgactacatatcagtttctgcaagccttgaaaatagggtgtgtgagtatgttgaccacctgcatgagcatttcaagtatcccgtgatgatccagcgggcttcctacatgcctcccaaggatcccggctactcaacagaaatgaaggaggaatctgtaaagaaacaccagtatccagatggtgaagtttggaagaaactccttcctgctcaagaaaattaagtgctcagccccaacaacttttttctttctgaagtgaaagggcttaaaatttcttggaaatagttttacaaaaatggatttaaaaaatcctaccgatcaagatgagttcagctagaagtcataccaccctcaggaatcagctaaagcaaaaagaacttttacctcggcatccagcccaacccctaaagactgacaatatccttcgagctcctttgaaagcaccctaaacagccatttccattttaatagttggatgcggattgtacccttcaatctgaaagtcttcagctttgaagtcatcaattttctcaacttttcgaagaatcctgagctttgggaaaggtctgggttctcgctgaagctaaaaacaaaataaggccattattttgccataattgtacgacctgttgtaattgctcctcatgtccgtgaaacaagtacacaggatgtgatcaacaaagttctattttacagg

SEQ ID NO: 275542 - DNA, 5415 bp, Artificial Sequence
  derived and/or modified sequence
acagaaggagaacttgaagcagaatggctgcaagatgtgggtttatcaactctgatctcaggtgatgaagaggaagatggcaaagccttgctctccacattgactcgaacccaagcagctgccgtgcaaaagagataccatacctatacccaaaccatgaggaaaaaggataagcaatctatcagggatgtcagagacatttttggagtcagtgaatctcctcctcgtgatacctgtggcaaccacactaatcagctggatggcaccaaggaagaaagagagcttccaagagttatcaagacaagtggttccatgccagatgatgcttctctcaacagtactaccctgtctgacgcatcccaggataaagaagggagttttgcggttcccaggagtgactctgtggctatacttgagaccattccagttctaccagttcattccaatggatcaccggagcctggacagccagttcagaatgcgataagtgatgatgattttctggaaaagaacattccaccagaggctgaagagctgtcatttgaagtgtcttattcagaaatggttacggaggctctaaaaagaaataaacttaagaaatcagagattaagaaagaagactatgttttaactaaatttaatgttcagaaaaccagatttggcttaactgaagcaggagatctgtctgctgaagacatgaagaaaatccgccatctctctctgattgaattgactgccttttttgatgcctttggaattcaactgaaaaggaacaaaacagagaaagtaaaaggacgagacaatgggatttttggagttccacttacagtcctcctggacggtgaccgaaagaaagaccctggagtgaaagttcccctggtattacaaaaattttttgagaaagttgaggaatcaggtctggaatctgaaggaatttttcgactttcaggatgtactgctaaagtcaagcaataccgtgaagaacttgatgccaagtttaatgctgataaatttaaatgggacaaaatgtgccatagagaagctgcagtaatgttgaaagcgtttttcagagaactacccacctctctcttccctgtggaatatatacctgccttcatcagtctaatggaaagagggcctcacgtcaaagtacagtttcaagccttacacctcatggtcatggcgctgcctgatgccaacagagatgcagctcaggccctcatgacattcttcaataaagtgattgccaatgaatcaaaaaaccgaatgagtctgtggaacatttctacagtgatggcaccaaaccttttcttcagtagaagcaaacactctgattatgaagaattactgttagcaaacactgcggcccacatcatccgcctaatgcttaagtaccagaagattttgtggaaggttccatctttcttaatcactcaagtaagaagaatgaatgaagccacgatgctattgaagaagcagctcccaagtgtcaggaagctgctcaggaggaagaccctcgagcgggagactgcaagccccaagacttcaaaggtactgcaaaaatcaccctcggcaagacgaatgtctgacgtgccggaaggagtcatacgggtccatgctccacttctctccaaggtgtccatggccattcaactcaacaatcaaaccaaagccaaagacatattggcaaaatttcaatatgaaaacagtcatggttcatcagaatgtattaagattcagaaccaaaggttatatgaaattggaggaaatataggagagcattgcttggatccagatgcttatatattggatgtatatcgtataaatcctcaagcagaatgggtgattaaaccccaacaaagttcttaaaatatcctcgagagagctgctatcatgtattatatgccaaaaagatcctacattttggtagggaaaaaacaacactgtgtttgacgtatttgttcctacagcattctcagtatttctggccctcagcagtgggcattgtaagcatgaactatggaagaggcgccggttcaccaattcaactgaagctttctcatgacttttttttttataaaagtaaaggaaagatgatgtggtccttccagaagaaagaccaatctagaatatggaactctaatcacttctagtatttcaacttcctagcagaaatgaacttggccctagacctagggataagcaatgttctttatgtagccaatgctacgaaacaaaagaggtgaaagagacccttttttatacttaatgtacatatattgactttttgagcaagaatgccagaaatagccttcatttctaccctgcaaaataatccagatctgctttctaaaatgaatcagtttctaaagtgaaacatgcaatatttatgctctgactgactcctgaattggaagaggaagaacttctgtttacagaaaactgtattgttatatatgtcaggctgtgtattgtgactatcagcattctggtgcaaatgaacttttctccatcatcgactgtggaaaattgatacttttaaagcatattcttctatgagcacaggtcctcctagtgaagcttagtttgacaaagggtgtcatatgctttcctaacctgatttgtagttaacattcacagagcctacattttctcattacggttatgatgctcagtatctttccaagtgccaggcacgggcttccttttctgatcaaacataccattttttatatttcacaactatagacagtcacttctgcagtcccaatttaaaaatgcagaactgctttatccaagaatgctgaaaaatactgttctatccaggtttcctaaactataaaagcagattttgcttttgtttgttaatcataggcatggccgagcattgtggattagcctgaggcttaaaatcagatgcatgtctggtaagatgaccactgtctcactatcaagagcctgcagagccattttccagacctgtgattgcccagaacacatagtccccacgtttctaatttggagcaaatctaaaaggtgctgagggattggacagctctgactttcctcgagactatggatatagtccttctcagattagctggaaatggggacagagttctcatttatcccagatatatacattggcttttttggaatctatagattgagattttgatgaatttatattggttttaatgagacccaaatgactctctcttaacaattcaagcagtagacaaagttgctcacaaatacagaaaacatctttttgtctacttcgcaagtctcaaaacgtgataatatttaagcccatttgtagaagaaatcttgtatatactattattacaccttgatatctatacaaaacatcacttgtattaaaatatatagataactttctggcatttagaattttgttccattcatttaatttgttcatctgagaatttttttttttgcctgaaaacccattaaaagaaaacgtgccttctgtataagtttatgtttattcctacattttattcatttttaatgtatgggtaattggtggcacatgactttacataatgactttctagactctgaaaaaaatgcttttatcatttttgcaattcagacaagggtaaacattttactttatgtaattgccacatcccaagatgtaaaacggcagtaatttatgaccacgtatggaagaaattcttcaaatagctaccttacatttctgcgtatatatgaaaactgaatgatatttctcagtgtatttccttgcatttgaatggttcaattctgttgtgtttatgtagaaaattcacaaatctgttcatttaattttttaatttgagaatttttatttcttttgactgaaaacacattagaacctatgagtaaattctgaaggttttaagatttacttcagcttgtcaccagtttcaaataaatccctaataggtaacaagtaaaatacaaattcttgtctactttcatgtggttttaaatggcagggacttcgctgagtcagtaagtataatcactctagtttattcaaggatgtgtggcaactttcaacttccatacgtatatatgtatgtatggaaggccatgtcaatactagtatcattggatataactttgattcttaatcagagggcaaattcattagagaagaatttttagtagatacacagactaatatttgtgtggaggttcttttgaccaattttattcctaagaataaacaaacccctacagttaaaatgcaaagatgcctgtcatctaagtattgaaagaatttttgccttatcaagagttgttttttaaaaatttaataaattcataaaaaagactcatatctttgcaaacaaaagaagggcagatactgggcttctacatgctatccttaagagcttctccccctcacccattcctagtgctcttggtatacacttgggaaaataatgtcctccaggagaaagtgttagagggaactaacattttaggaatgcttattcagaaaaaaatcctagagttgattcattgttttcctccatcctgcaaaagaagatccctttgttaagcagctcacttggaaatatgattcttggagtcaatgatctctaaacaaactggattatcaactatttacaacgtctatacagtataaactacctcacttgcctttcttgggaaaaaaaaaatgaatggactttaacaattgttgttacaaactgtgcctgaatcttattatttaaatcacttcagttagctttcagtgtatgtttaataatatacatttaatgatgaaaaatattttcagcaaagctttaaaaccagaaatactgtgtaactgtgatctatgtggtatactctgagagaattctgtgtcctgctcattgtcttgagtttctaaccatgtgcagatgcaagcgttcaggagtaggaattaatgtccatcttttctttcaggcattttcatctgctgtccacgtatttcacttgactgaaagctcatatgagttaaaatgtcccttcttcctagcgagcatatttcaactgttcttcataaatgtttatgtgccttaaaagactttatgttaaaggattaaatagtttctctgacaggcagtttttaactgttttccacaaataaaaataatatgtcatgggattaaaatgtttgttttcaagcatttttaacagttttacacacttacatacaccttaattaaaaatttttttctgtcagacatttaccaactattttctaaaactaatttgacaaatcatgacactagaaaacgccaatgttttatgtctttgcccatctcaaaagctaatattgattcttctgttccatcagctttcattgttaagtagaatatgtatgttgcattttatccataagaaataaag

SEQ ID NO: 275543 - DNA, 5492 bp, Artificial Sequence
  derived and/or modified sequence
aaagtaggccagtattgccagagaacaggagaggaggagagtatggtataagcatgtccagaaataaggagaacttgaagcagaatggctgcaagatgtgggtttatcaactctgatctcaggtgatgaagaggaagatggcaaagccttgctctccacattgactcgaacccaagcagctgccgtgcaaaagagataccatacctatacccaaaccatgaggaaaaaggataagcaatctatcagggatgtcagagacatttttggagtcagtgaatctcctcctcgtgatacctgtggcaaccacactaatcagctggatggcaccaaggaagaaagagagcttccaagagttatcaagacaagtggttccatgccagatgatgcttctctcaacagtactaccctgtctgacgcatcccaggataaagaagggagttttgcggttcccaggagtgactctgtggctatacttgagaccattccagttctaccagttcattccaatggatcaccggagcctggacagccagttcagaatgcgataagtgatgatgattttctggaaaagaacattccaccagaggctgaagagctgtcatttgaagtgtcttattcagaaatggttacggaggctctaaaaagaaataaacttaagaaatcagagattaagaaagaagactatgttttaactaaatttaatgttcagaaaaccagatttggcttaactgaagcaggagatctgtctgctgaagacatgaagaaaatccgccatctctctctgattgaattgactgccttttttgatgcctttggaattcaactgaaaaggaacaaaacagagaaagtaaaaggacgagacaatgggatttttggagttccacttacagtcctcctggacggtgaccgaaagaaagaccctggagtgaaagttcccctggtattacaaaaattttttgagaaagttgaggaatcaggtctggaatctgaaggaatttttcgactttcaggatgtactgctaaagtcaagcaataccgtgaagaacttgatgccaagtttaatgctgataaatttaaatgggacaaaatgtgccatagagaagctgcagtaatgttgaaagcgtttttcagagaactacccacctctctcttccctgtggaatatatacctgccttcatcagtctaatggaaagagggcctcacgtcaaagtacagtttcaagccttacacctcatggtcatggcgctgcctgatgccaacagagatgcagctcaggccctcatgacattcttcaataaagtgattgccaatgaatcaaaaaaccgaatgagtctgtggaacatttctacagtgatggcaccaaaccttttcttcagtagaagcaaacactctgattatgaagaattactgttagcaaacactgcggcccacatcatccgcctaatgcttaagtaccagaagattttgtggaaggttccatctttcttaatcactcaagtaagaagaatgaatgaagccacgatgctattgaagaagcagctcccaagtgtcaggaagctgctcaggaggaagaccctcgagcgggagactgcaagccccaagacttcaaaggtactgcaaaaatcaccctcggcaagacgaatgtctgacgtgccggaaggagtcatacgggtccatgctccacttctctccaaggtgtccatggccattcaactcaacaatcaaaccaaagccaaagacatattggcaaaatttcaatatgaaaacagtcatggttcatcagaatgtattaagattcagaaccaaaggttatatgaaattggaggaaatataggagagcattgcttggatccagatgcttatatattggatgtatatcgtataaatcctcaagcagaatgggtgattaaaccccaacaaagttcttaaaatatcctcgagagagctgctatcatgtattatatgccaaaaagatcctacattttggtagggaaaaaacaacactgtgtttgacgtatttgttcctacagcattctcagtatttctggccctcagcagtgggcattgtaagcatgaactatggaagaggcgccggttcaccaattcaactgaagctttctcatgacttttttttttataaaagtaaaggaaagatgatgtggtccttccagaagaaagaccaatctagaatatggaactctaatcacttctagtatttcaacttcctagcagaaatgaacttggccctagacctagggataagcaatgttctttatgtagccaatgctacgaaacaaaagaggtgaaagagacccttttttatacttaatgtacatatattgactttttgagcaagaatgccagaaatagccttcatttctaccctgcaaaataatccagatctgctttctaaaatgaatcagtttctaaagtgaaacatgcaatatttatgctctgactgactcctgaattggaagaggaagaacttctgtttacagaaaactgtattgttatatatgtcaggctgtgtattgtgactatcagcattctggtgcaaatgaacttttctccatcatcgactgtggaaaattgatacttttaaagcatattcttctatgagcacaggtcctcctagtgaagcttagtttgacaaagggtgtcatatgctttcctaacctgatttgtagttaacattcacagagcctacattttctcattacggttatgatgctcagtatctttccaagtgccaggcacgggcttccttttctgatcaaacataccattttttatatttcacaactatagacagtcacttctgcagtcccaatttaaaaatgcagaactgctttatccaagaatgctgaaaaatactgttctatccaggtttcctaaactataaaagcagattttgcttttgtttgttaatcataggcatggccgagcattgtggattagcctgaggcttaaaatcagatgcatgtctggtaagatgaccactgtctcactatcaagagcctgcagagccattttccagacctgtgattgcccagaacacatagtccccacgtttctaatttggagcaaatctaaaaggtgctgagggattggacagctctgactttcctcgagactatggatatagtccttctcagattagctggaaatggggacagagttctcatttatcccagatatatacattggcttttttggaatctatagattgagattttgatgaatttatattggttttaatgagacccaaatgactctctcttaacaattcaagcagtagacaaagttgctcacaaatacagaaaacatctttttgtctacttcgcaagtctcaaaacgtgataatatttaagcccatttgtagaagaaatcttgtatatactattattacaccttgatatctatacaaaacatcacttgtattaaaatatatagataactttctggcatttagaattttgttccattcatttaatttgttcatctgagaatttttttttttgcctgaaaacccattaaaagaaaacgtgccttctgtataagtttatgtttattcctacattttattcatttttaatgtatgggtaattggtggcacatgactttacataatgactttctagactctgaaaaaaatgcttttatcatttttgcaattcagacaagggtaaacattttactttatgtaattgccacatcccaagatgtaaaacggcagtaatttatgaccacgtatggaagaaattcttcaaatagctaccttacatttctgcgtatatatgaaaactgaatgatatttctcagtgtatttccttgcatttgaatggttcaattctgttgtgtttatgtagaaaattcacaaatctgttcatttaattttttaatttgagaatttttatttcttttgactgaaaacacattagaacctatgagtaaattctgaaggttttaagatttacttcagcttgtcaccagtttcaaataaatccctaataggtaacaagtaaaatacaaattcttgtctactttcatgtggttttaaatggcagggacttcgctgagtcagtaagtataatcactctagtttattcaaggatgtgtggcaactttcaacttccatacgtatatatgtatgtatggaaggccatgtcaatactagtatcattggatataactttgattcttaatcagagggcaaattcattagagaagaatttttagtagatacacagactaatatttgtgtggaggttcttttgaccaattttattcctaagaataaacaaacccctacagttaaaatgcaaagatgcctgtcatctaagtattgaaagaatttttgccttatcaagagttgttttttaaaaatttaataaattcataaaaaagactcatatctttgcaaacaaaagaagggcagatactgggcttctacatgctatccttaagagcttctccccctcacccattcctagtgctcttggtatacacttgggaaaataatgtcctccaggagaaagtgttagagggaactaacattttaggaatgcttattcagaaaaaaatcctagagttgattcattgttttcctccatcctgcaaaagaagatccctttgttaagcagctcacttggaaatatgattcttggagtcaatgatctctaaacaaactggattatcaactatttacaacgtctatacagtataaactacctcacttgcctttcttgggaaaaaaaaaatgaatggactttaacaattgttgttacaaactgtgcctgaatcttattatttaaatcacttcagttagctttcagtgtatgtttaataatatacatttaatgatgaaaaatattttcagcaaagctttaaaaccagaaatactgtgtaactgtgatctatgtggtatactctgagagaattctgtgtcctgctcattgtcttgagtttctaaccatgtgcagatgcaagcgttcaggagtaggaattaatgtccatcttttctttcaggcattttcatctgctgtccacgtatttcacttgactgaaagctcatatgagttaaaatgtcccttcttcctagcgagcatatttcaactgttcttcataaatgtttatgtgccttaaaagactttatgttaaaggattaaatagtttctctgacaggcagtttttaactgttttccacaaataaaaataatatgtcatgggattaaaatgtttgttttcaagcatttttaacagttttacacacttacatacaccttaattaaaaatttttttctgtcagacatttaccaactattttctaaaactaatttgacaaatcatgacactagaaaacgccaatgttttatgtctttgcccatctcaaaagctaatattgattcttctgttccatcagctttcattgttaagtagaatatgtatgttgcattttatccataagaaataaagagaaaaaaactaaaaa

SEQ ID NO: 275544 - protein, 670 aa, Artificial Sequence
  derived and/or modified sequence
MLSNESLHPPAFSRSNSEASVDSASMEDFWREIESIKDSSMGGQEEPPPAEVTPVDEGELEAEWLQDVGLSTLISGDEEEDGKALLSTLTRTQAAAVQKRYHTYTQTMRKKDKQSIRDVRDIFGVSESPPRDTCGNHTNQLDGTKEERELPRVIKTSGSMPDDASLNSTTLSDASQDKEGSFAVPRSDSVAILETIPVLPVHSNGSPEPGQPVQNAISDDDFLEKNIPPEAEELSFEVSYSEMVTEALKRNKLKKSEIKKEDYVLTKFNVQKTRFGLTEAGDLSAEDMKKIRHLSLIELTAFFDAFGIQLKRNKTEKVKGRDNGIFGVPLTVLLDGDRKKDPGVKVPLVLQKFFEKVEESGLESEGIFRLSGCTAKVKQYREELDAKFNADKFKWDKMCHREAAVMLKAFFRELPTSLFPVEYIPAFISLMERGPHVKVQFQALHLMVMALPDANRDAAQALMTFFNKVIANESKNRMSLWNISTVMAPNLFFSRSKHSDYEELLLANTAAHIIRLMLKYQKILWKVPSFLITQVRRMNEATMLLKKQLPSVRKLLRRKTLERETASPKTSKVLQKSPSARRMSDVPEGVIRVHAPLLSKVSMAIQLNNQTKAKDILAKFQYENRILHWQRAALSFLNGKWVKKEREESTETNRSPKHVFLFTIGLDIST

SEQ ID NO: 275545 - protein, 545 aa, Artificial Sequence
  derived and/or modified sequence
MNELPRDTCGNHTNQLDGTKEERELPRVIKTSGSMPDDASLNSTTLSDASQDKEGSFAVPRSDSVAILETIPVLPVHSNGSPEPGQPVQNAISDDDFLEKNIPPEAEELSFEVSYSEMVTEALKRNKLKKSEIKKEDYVLTKFNVQKTRFGLTEAGDLSAEDMKKIRHLSLIELTAFFDAFGIQLKRNKTEKVKGRDNGIFGVPLTVLLDGDRKKDPGVKVPLVLQKFFEKVEESGLESEGIFRLSGCTAKVKQYREELDAKFNADKFKWDKMCHREAAVMLKAFFRELPTSLFPVEYIPAFISLMERGPHVKVQFQALHLMVMALPDANRDAAQALMTFFNKVIANESKNRMSLWNISTVMAPNLFFSRSKHSDYEELLLANTAAHIIRLMLKYQKILWKVPSFLITQVRRMNEATMLLKKQLPSVRKLLRRKTLERETASPKTSKVLQKSPSARRMSDVPEGVIRVHAPLLSKVSMAIQLNNQTKAKDILAKFQYENRILHWQRAALSFLNGKWVKKEREESTETNRSPKHVFLFTIGLDIST

SEQ ID NO: 275546 - protein, 722 aa, Artificial Sequence
  derived and/or modified sequence
MEVEDSGGVVLTAYHSYARAQPPNAESRCAPRAAASHPLSRKSIPRCRRINRMLSNESLHPPAFSRSNSEASVDSASMEDFWREIESIKDSSMGGQEEPPPAEVTPVDEGELEAEWLQDVGLSTLISGDEEEDGKALLSTLTRTQAAAVQKRYHTYTQTMRKKDKQSIRDVRDIFGVSESPPRDTCGNHTNQLDGTKEERELPRVIKTSGSMPDDASLNSTTLSDASQDKEGSFAVPRSDSVAILETIPVLPVHSNGSPEPGQPVQNAISDDDFLEKNIPPEAEELSFEVSYSEMVTEALKRNKLKKSEIKKEDYVLTKFNVQKTRFGLTEAGDLSAEDMKKIRHLSLIELTAFFDAFGIQLKRNKTEKVKGRDNGIFGVPLTVLLDGDRKKDPGVKVPLVLQKFFEKVEESGLESEGIFRLSGCTAKVKQYREELDAKFNADKFKWDKMCHREAAVMLKAFFRELPTSLFPVEYIPAFISLMERGPHVKVQFQALHLMVMALPDANRDAAQALMTFFNKVIANESKNRMSLWNISTVMAPNLFFSRSKHSDYEELLLANTAAHIIRLMLKYQKILWKVPSFLITQVRRMNEATMLLKKQLPSVRKLLRRKTLERETASPKTSKVLQKSPSARRMSDVPEGVIRVHAPLLSKVSMAIQLNNQTKAKDILAKFQYENRILHWQRAALSFLNGKWVKKEREESTETNRSPKHVFLFTIGLDIST

SEQ ID NO: 275547 - protein, 563 aa, Artificial Sequence
  derived and/or modified sequence
MRKKDKQSIRDVRDIFGVSESPPRDTCGNHTNQLDGTKEERELPRVIKTSGSMPDDASLNSTTLSDASQDKEGSFAVPRSDSVAILETIPVLPVHSNGSPEPGQPVQNAISDDDFLEKNIPPEAEELSFEVSYSEMVTEALKRNKLKKSEIKKEDYVLTKFNVQKTRFGLTEAGDLSAEDMKKIRHLSLIELTAFFDAFGIQLKRNKTEKVKGRDNGIFGVPLTVLLDGDRKKDPGVKVPLVLQKFFEKVEESGLESEGIFRLSGCTAKVKQYREELDAKFNADKFKWDKMCHREAAVMLKAFFRELPTSLFPVEYIPAFISLMERGPHVKVQFQALHLMVMALPDANRDAAQALMTFFNKVIANESKNRMSLWNISTVMAPNLFFSRSKHSDYEELLLANTAAHIIRLMLKYQKILWKVPSFLITQVRRMNEATMLLKKQLPSVRKLLRRKTLERETASPKTSKVLQKSPSARRMSDVPEGVIRVHAPLLSKVSMAIQLNNQTKAKDILAKFQYENRILHWQRAALSFLNGKWVKKEREESTETNRSPKHVFLFTIGLDIST

SEQ ID NO: 275548 - protein, 117 aa, Artificial Sequence
  derived and/or modified sequence
MLSNESLHPPAFSRSNSEASVDSASMEDFWREIESIKDSSMGGQEEPPPAEVTPVDEGELEAEWLQDVGLSTLISGDEEEDGKALLSTLTRTQAAAVQKRYHTYTQTMRKKDKQSIR

SEQ ID NO: 275549 - protein, 554 aa, Artificial Sequence
  derived and/or modified sequence
MAFMRINVIMNELPRDTCGNHTNQLDGTKEERELPRVIKTSGSMPDDASLNSTTLSDASQDKEGSFAVPRSDSVAILETIPVLPVHSNGSPEPGQPVQNAISDDDFLEKNIPPEAEELSFEVSYSEMVTEALKRNKLKKSEIKKEDYVLTKFNVQKTRFGLTEAGDLSAEDMKKIRHLSLIELTAFFDAFGIQLKRNKTEKVKGRDNGIFGVPLTVLLDGDRKKDPGVKVPLVLQKFFEKVEESGLESEGIFRLSGCTAKVKQYREELDAKFNADKFKWDKMCHREAAVMLKAFFRELPTSLFPVEYIPAFISLMERGPHVKVQFQALHLMVMALPDANRDAAQALMTFFNKVIANESKNRMSLWNISTVMAPNLFFSRSKHSDYEELLLANTAAHIIRLMLKYQKILWKVPSFLITQVRRMNEATMLLKKQLPSVRKLLRRKTLERETASPKTSKVLQKSPSARRMSDVPEGVIRVHAPLLSKVSMAIQLNNQTKAKDILAKFQYENRILHWQRAALSFLNGKWVKKEREESTETNRSPKHVFLFTIGLDIST

SEQ ID NO: 275550 - DNA, 2013 bp, Artificial Sequence
  derived and/or modified sequence
atgctgtccaacgagagcctccatccacccgccttctcccgtagtaatagcgaggcctccgtcgactctgcctccatggaggacttttggcgggaaatcgagtcgattaaggattcttcaatgggtggccaagaggagccaccgccagcagaggtgactccagtagacgaaggcgaactggaggcagaatggctgcaggatgtaggcctgtccaccctgataagcggagacgaagaggaggacggcaaagctctcttaagtaccctaacacggacccaagccgctgccgtgcagaagaggtaccatacctacacccagactatgcggaaaaaggataagcagagcatacgcgatgtgagggatatattcggagtgagcgaatctccgccccgagacacctgcggaaatcacactaaccagctggacggcactaaagaggagcgcgaactgccacgggtcatcaagaccagcgggtcgatgcctgacgacgcgtctttgaacagcaccactctgagcgacgcgagccaggataaagagggatcatttgccgtgcccaggtccgactccgtggccattctggagacaatcccagtgctgcccgtgcactctaatggctctcccgagcctggacagcctgtccaaaatgccatctccgatgacgactttttggaaaaaaacataccccctgaggccgaggaactgtcattcgaggtgagttacagtgaaatggtaacagaagccctgaaacgcaacaaattaaaaaagagtgaaatcaagaaggaggactatgtcctcaccaagtttaatgttcagaagacccggttcgggctaaccgaggccggggacttgtctgctgaagacatgaagaaaatccgacacctgtcgctcattgagctgacagctttttttgatgccttcggcatacagctgaagcggaataaaactgagaaggtcaaagggcgcgataacggaatctttggggtacccctgaccgtgctactggatggggatagaaaaaaggatcctggtgtgaaggtgcctctcgttctgcaaaaattcttcgaaaaagtggaagagagcgggttagaatccgaaggaatatttcgcctatctggctgcaccgcaaaagttaagcaataccgggaagagcttgacgctaagttcaacgcagataaattcaagtgggataaaatgtgccaccgcgaggccgccgtaatgctcaaggccttcttcagggagctgccaactagcctgtttccagttgagtacatacccgcttttatctccctgatggagagggggccccacgtgaaagttcaattccaagcactccatctcatggtcatggcattgccagacgccaatcgcgatgcggcccaggcactgatgactttttttaacaaagtcattgccaacgagagcaagaaccgtatgtccctgtggaatataagcactgtcatggcccccaacctcttcttctctagatcaaagcactccgactacgaggagctcctcctggctaacacggccgcgcatataattcgattgatgctaaagtaccaaaagatactgtggaaggtgccgtcctttctaatcacccaggtgcggagaatgaatgaggcaacaatgcttctcaagaagcagctgcctagtgtaaggaagttattgcggcggaagacactggaacgcgaaaccgcctctcctaaaaccagcaaagtgttacagaagagtccgtcagcccgcagaatgagcgacgtgcccgagggcgtcatacgggtacacgcacccctgctgagtaaggtctccatggcaattcagctaaataatcagaccaaggccaaagacatactcgccaaattccagtacgagaacagaatcctgcattggcaaagggctgctttatcttttctaaacggcaagtgggtgaagaaggagagagaagagagcaccgagactaatcgttccccaaaacacgtgtttctgttcacaatcggactcgacataagcacctag

SEQ ID NO: 275551 - DNA, 1638 bp, Artificial Sequence
  derived and/or modified sequence
atgaacgaactgcctagggatacctgcgggaaccatacaaatcagcttgatggcacaaaagaagaaagagaactgccgagagtgatcaaaacaagcggttcgatgcctgacgacgcctcactgaatagcaccaccctgagtgatgcttcccaggataaggaaggatctttcgccgtgcccagatctgacagcgtggccatccttgaaacaattcctgtcttgccagtgcactcaaacggcagccccgaacccgggcagccagtgcagaacgcaatttcagatgatgacttcctggaaaagaacatacccccagaagccgaggagttgtctttcgaggtgtcttacagtgaaatggtcaccgaagcactcaaacgcaacaagctgaagaaaagcgagataaaaaaggaagactatgtgctgacaaagtttaacgtgcagaagactcgctttggtctcaccgaggcgggcgatctctctgcagaggacatgaagaagattcgacatctctccctcattgagctcaccgccttttttgatgccttcggcatccagcttaagcgcaataaaacggagaaggtcaagggaagggacaatggcatctttggtgtccccctgacagtgttactcgacggggacaggaaaaaagaccctggcgtgaaagtgccactggtactgcagaaatttttcgagaaggttgaggagagcggattggagtctgaggggatcttcagactgtcaggttgtacagcaaaagtaaagcagtatagagaggaactggacgcgaaatttaacgcagataagtttaagtgggataagatgtgccaccgagaagccgctgtcatgctcaaggcattctttcgtgaactgccgaccagtctatttcctgtcgaatatatccctgccttcatctccctcatggagcgaggcccacacgttaaggtccagtttcaggcacttcacctgatggtcatggcgttacccgacgcgaatcgcgatgctgcccaggctctgatgacattttttaacaaggttattgctaatgaaagtaaaaaccgaatgtccctctggaatattagtaccgtgatggccccaaatctcttttttagccggtcgaaacatagcgactatgaggagctgctgctcgctaacaccgctgcccacatcattaggctcatgctcaaatatcagaaaatcctctggaaggtcccatcattcttgatcacacaggtgaggaggatgaacgaagcaaccatgctgctgaagaaacagctaccctcagtacggaaactgttgcgacgcaagacactcgaaagggaaaccgcatcccctaaaacctcaaaggtactgcagaaaagtccaagcgcccgccgcatgtcggacgtcccggagggcgtgattagagttcatgcaccgctgctttctaaggtgagcatggccatccagcttaataatcagaccaaggccaaggacattttggccaagtttcagtatgagaatcgaatactccactggcagcgcgctgcccttagcttcctgaacgggaagtgggttaagaaagagagggaagagtccacagaaacaaatcgctcccccaagcacgtttttctttttactatcggattggacatatcaacctag

SEQ ID NO: 275552 - DNA, 2169 bp, Artificial Sequence
  derived and/or modified sequence
atggaggtcgaggattctggaggagttgtcttaaccgcctaccacagctacgcccgggctcagccaccgaatgccgagagtagatgtgcacctcgcgccgctgccagtcatccgctgagtcgcaaaagcatcccacgatgtcgacgaatcaatcgcatgctctctaatgaatccctgcatccaccagccttctctcgctccaactcagaggcttctgtggactcagccagtatggaggatttttggcgggagattgaaagcattaaggacagcagcatgggaggccaagaggagccccctcccgcagaggttacccctgttgatgagggagagctggaagcggagtggctccaggacgtcggtctttctaccttgattagcggagacgaagaagaggatggcaaagctctcctgagcaccctgacccgcacacaggccgctgctgtgcagaaacggtatcacacatacactcaaaccatgcggaaaaaagataaacagtccatccgcgacgtgcgcgacatcttcggggtgtcagaaagcccgcctcgggatacatgcggtaatcacaccaatcaattggatggtacaaaagaggagcgcgagctgcccagagtaatcaaaacttctggttctatgcctgatgacgcatctctcaattctaccacactgtctgatgctagccaggacaaagaaggctcttttgctgtccctcgcagtgattctgtggctatcctggagacgatcccagtgttacccgtccacagtaatggcagccctgaacccggacagcccgtccagaacgcgatctccgatgacgatttcctagagaagaacatacctcccgaagctgaggaacttagcttcgaagttagttactccgaaatggtgacagaagcgcttaaacgaaataaactaaaaaagtctgaaataaaaaaggaagattacgttctaaccaagtttaacgtgcagaaaacccgctttggtctcaccgaagctggcgacctttcggctgaagacatgaaaaaaatacggcacctgtccctgatcgagcttacggccttttttgacgcgttcgggatccagctcaagcgcaacaaaactgaaaaggttaaagggcgggataacggaattttcggtgtcccacttacagtgctcctggacggcgatcggaagaaggatcccggagttaaggtcccccttgtgttgcaaaagttttttgagaaagtggaagagagtggactcgaaagcgaggggatcttcagattatccggatgcacagctaaggtcaagcagtatcgggaagaattggacgccaagttcaacgctgacaagtttaaatgggacaagatgtgccacagagaggccgcagtgatgctaaaggcattcttcagggagctgcccacaagcctttttccagtggagtacatacctgcgtttatttccctgatggaacgcggtcctcatgtgaaagtacaatttcaggccctgcacctcatggttatggcgttgcccgatgcgaacagggacgccgctcaggccctgatgacatttttcaacaaagtcatcgctaatgagagcaaaaaccggatgtcactgtggaacatcagtactgttatggcgccaaatctattcttttcccggtctaaacatagtgattatgaagaactcctgctcgcgaatacggccgcccatatcattcgactgatgcttaagtatcagaaaatcctttggaaggtcccctcctttcttattacccaggtgcggcgtatgaacgaggccaccatgctgctgaaaaaacagcttccttctgttcgtaagctccttcgtcgcaagacccttgagagagaaactgcatctcccaagacctctaaggtgctgcaaaaatccccatccgcccggcgaatgtctgacgtccctgaaggtgttatcagagtccacgccccgttgcttagcaaggtgagtatggccattcagttaaacaatcagacgaaagcaaaggacatcctggcaaagttccagtacgaaaaccgaatactgcactggcaaagggctgcgctgagtttcctcaacggcaaatgggttaagaaggagcgcgaggaatcaactgaaacaaataggtctccaaagcacgtctttctgttcactataggactggacatctcaacttag

SEQ ID NO: 275553 - DNA, 1692 bp, Artificial Sequence
  derived and/or modified sequence
atgcggaagaaagacaagcagtccattcgcgatgtacgcgatatcttcggggtttctgaaagtcccccgagagatacgtgtggtaaccacacaaaccagctggacggaaccaaggaggaacgtgagctcccccgagtcatcaagaccagtggatccatgcctgatgacgcttctctgaactcaactacccttagcgacgcatctcaagataaggagggaagcttcgcggtgcctcgatcagattctgtagccattctagaaacgattcctgtcttgcctgtgcattccaatggatctccagaacccggacaaccagttcagaacgctattagcgacgatgacttcctcgaaaagaacatccctccagaagctgaggaactgtcctttgaagtgtcctacagcgaaatggtaacggaagctctcaaacgcaacaagttgaaaaaaagtgaaatcaaaaaagaagattacgttctgacaaagttcaatgtgcagaagacccgctttggtctgactgaagccggagacctgagtgccgaggatatgaaaaagatccggcacctatccctcatcgagctcactgcattttttgatgcattcggcattcagctaaagcgtaataaaacagagaaggttaagggccgggataatgggatctttggagtccccctcaccgtactcctcgatggggaccggaagaaggatcccggggttaaggttccgctggttctgcagaagtttttcgaaaaggtcgaggagtccggacttgaatccgaaggaatattcaggctaagcgggtgtacagccaaagtgaagcagtatcgggaagagctcgatgcaaaattcaatgcagataagttcaagtgggacaagatgtgccatcgggaggctgccgtaatgctgaaagcctttttcagagaacttcccaccagcctcttcccagtagagtacattcccgccttcattagcttgatggaacgaggaccacacgtcaaggttcagtttcaggcattgcatctgatggttatggcactgcccgacgcaaacagggacgccgcacaggcactgatgacctttttcaataaggtcattgccaacgagagcaagaacagaatgagcctgtggaatatttccacagtaatggctcccaatctgtttttttctaggtctaagcattcggactatgaggagctgcttcttgccaatacggccgcccatataattaggttgatgttgaaataccaaaagatcttgtggaaggtgcctagtttcctcatcacacaggtgaggcggatgaacgaagccaccatgttgttaaagaaacagctgccctctgtaagaaagctcttgaggcgcaaaactttggaaagggagactgcctctcccaagacatctaaggtgctgcaaaagagcccaagcgcgcgacggatgagcgacgtgcctgaaggcgtaattagagttcacgcccctttgctttccaaagtttccatggccatacagctgaacaaccaaactaaagccaaagatatcctggctaagtttcaatatgagaatcgaattctgcattggcaaagagctgctctgtcttttctgaatggaaaatgggtgaagaaagagagggaagagagcaccgagacaaataggagccccaagcatgtcttcctgttcacaataggactggatatcagcacgtag

SEQ ID NO: 275554 - DNA, 1665 bp, Artificial Sequence
  derived and/or modified sequence
atggctttcatgcgaattaacgttataatgaacgagctgcctagagatacctgcggtaatcatactaatcaactcgacggtacgaaggaagagagggaactgccccgtgtcatcaaaacatccggtagtatgcccgacgatgccagtcttaattccaccacactgtccgatgcttcccaggataaggagggatccttcgcagtgccgcgatctgatagcgtggctatcctggaaaccattcccgtgctaccagtccactctaacggttctcctgaaccaggccagcctgtccagaacgctatctccgacgatgatttcctggagaaaaatataccgcctgaagcagaagagctgtctttcgaggtttcttacagcgaaatggtgacagaggctcttaagcggaacaagctgaaaaaaagcgagattaaaaaggaggattacgtgctgaccaaatttaatgtccagaagacccgattcggtttgaccgaagcaggagacctgagcgctgaggacatgaagaagattcgtcacttaagcctgattgaattgaccgcattctttgatgctttcggaattcagctgaaacggaataagaccgagaaggtcaagggccgtgataatggaattttcggggtccccctgaccgttctcttggatggggatcgcaagaaggatccaggggtaaaagtacctttggttctccagaaattttttgagaaagtggaggaatctggtctggaaagcgaaggaattttcaggctctccgggtgcacagccaaggtaaaacagtaccgggaggagctggacgctaagtttaacgccgacaagtttaaatgggacaagatgtgccaccgcgaggcagccgtaatgttgaaagcctttttccgcgagttacctaccagtctgttcccagtggagtatattcccgcattcattagcctgatggagcgaggcccccacgtgaaggttcagtttcaggcccttcacctgatggtgatggctctaccagatgccaaccgtgacgccgcccaagcgctgatgacattcttcaacaaagtgattgctaatgagagtaaaaaccggatgtctttatggaacatcagcaccgtgatggcccctaatctgttcttttccaggagtaagcactcggactatgaggaattgctattggccaacactgctgctcacatcattagactgatgctgaaataccagaagattctatggaaagttccgagtttcctgattacacaggtcagacgaatgaacgaggctaccatgcttttgaagaagcagctcccatctgtgaggaagctccttcggagaaagacactggaacgggagacagcatcccccaagacctccaaagtgctacagaaaagcccgagtgccagaaggatgagcgatgtgccagaaggagtcatcagagtgcatgccccactcctcagcaaggttagtatggctatccagctcaataatcaaaccaaggccaaggatattctcgccaagttccaatatgaaaatcgcatcctgcactggcaacgcgctgccctgtcattcttgaacggaaagtgggtgaagaaagaacgtgaagagtctaccgagactaataggtcccctaagcacgtgtttctctttactattggtctcgatatatcgacttag

SEQ ID NO: 275555 - DNA, 2013 bp, Artificial Sequence
  derived and/or modified sequence
atgctgagcaatgaaagcctgcaccccccagccttcagccgcagcaacagcgaggcctctgtggacagcgcctccatggaggacttctggagagaaattgagagcatcaaggacagctccatgggcggccaggaggagcccccacctgctgaggtgacccctgtggatgaaggagagctggaggccgagtggctgcaggatgtgggcctgagcaccctcatctctggagatgaggaggaggatggcaaggccctgctgagcaccctgaccaggacccaggccgctgctgtgcagaagcgctaccacacctacacccagaccatgaggaagaaggacaagcagagcatcagagatgtgcgggacatctttggagtgtctgagagccccccccgggacacctgtggcaaccacaccaaccagctggatggcaccaaggaggagcgggagctgcccagggtcatcaagaccagcggctccatgccagatgatgccagcctgaacagcaccaccctgagtgatgccagccaggacaaggagggcagctttgctgtgcccaggagtgacagcgtggccatcctggagaccatccctgtgctgcctgtgcacagcaatggcagccctgagcccggccagcctgtgcagaatgccatcagtgatgatgacttcctggagaagaacatccccccagaggccgaggagctgagctttgaggtgtcctacagcgagatggtgacagaggccctgaagaggaacaagctgaagaagtctgagatcaagaaggaggactatgtgctgaccaagttcaacgtgcagaagaccaggtttggcctgacagaggccggggacctgtctgctgaggacatgaagaagatccgccacctgagcctgattgagctgacagccttctttgatgccttcggcatccagctgaagaggaacaagacagagaaggtgaagggccgggacaatggcatcttcggcgtgcccctgactgtgctgctggatggagacaggaagaaggaccccggggtgaaggtgcccctggtgctgcagaagttctttgagaaggtggaggagagcggcctggagagcgagggcatcttccggctgagcggctgcacagccaaggtgaagcagtaccgggaggagctggatgccaagttcaatgctgacaagttcaagtgggacaagatgtgccaccgggaggccgctgtgatgctgaaggccttcttccgggagctgcccaccagcctcttccctgtggagtacatcccagccttcatcagcctgatggagcggggcccccacgtgaaggtgcagttccaggccctgcacctgatggtgatggccctgcctgatgccaacagagatgctgcccaggccctgatgaccttcttcaacaaggtgattgccaatgaaagcaagaacaggatgagcctgtggaacatcagcacagtgatggcccccaacctcttcttcagccgcagcaagcacagcgactatgaggagctgctgctggccaacacagctgcccacatcatccggctgatgctgaagtaccagaagatcctgtggaaggtgcccagcttcctgatcacccaggtgcggaggatgaatgaggccaccatgctgctgaagaagcagctgcccagcgtgaggaagctgctgcggaggaagaccctggagcgggagacagccagccccaagaccagcaaggtgctgcagaagagccccagcgcccggaggatgtctgatgtgcctgagggcgtcatccgggtgcacgcccccctgctgagcaaggtgtccatggccatccagctgaacaaccagaccaaggccaaggacatcctggccaagttccagtatgaaaatcgcatcctgcactggcagagagctgccctgtccttcctgaatggcaagtgggtgaagaaggagcgggaggagagcacagagaccaacagaagccccaagcacgtgttcctgttcaccatcggcctggacatcagcacctag

SEQ ID NO: 275556 - DNA, 1638 bp, Artificial Sequence
  derived and/or modified sequence
atgaatgagctgccccgggacacctgtggcaaccacaccaaccagctggatggcaccaaggaggagcgggagctgcccagggtcatcaagaccagcggctccatgccagatgatgccagcctgaacagcaccaccctgagtgatgccagccaggacaaggagggcagctttgctgtgcccaggagtgacagcgtggccatcctggagaccatccctgtgctgcctgtgcacagcaatggcagccctgagcccggccagcctgtgcagaatgccatcagtgatgatgacttcctggagaagaacatccccccagaggccgaggagctgagctttgaggtgtcctacagcgagatggtgacagaggccctgaagaggaacaagctgaagaagtctgagatcaagaaggaggactatgtgctgaccaagttcaacgtgcagaagacccgcttcggcctgacagaagctggggacctgtctgctgaggacatgaagaagatccgccacctgagcctcatcgagctgacagccttctttgatgccttcggcatccagctgaagaggaacaagacagagaaggtgaagggccgggacaatggcatctttggagtgcccctgactgtgctgctggatggagacaggaagaaggaccccggggtgaaggtgcccctggtgctgcagaagttctttgagaaggtggaggagagcggcctggagagcgagggcatcttccggctgagcggctgcacagccaaggtgaagcagtaccgggaggagctggatgccaagttcaatgctgacaagttcaagtgggacaagatgtgccaccgggaggccgctgtgatgctgaaggccttcttccgggagctgcccaccagcctcttccctgtggagtacatcccagccttcatcagcctgatggagcggggcccccacgtgaaggtgcagttccaggccctgcacctgatggtgatggccctgcctgatgccaacagagatgctgcccaggccctgatgaccttcttcaacaaggtgattgccaatgaaagcaagaacaggatgagcctgtggaacatcagcacagtgatggcccccaacctcttcttcagccgcagcaagcacagcgactatgaggagctgctgctggccaacacagctgcccacatcatccggctgatgctgaagtaccagaagatcctgtggaaggtgcccagcttcctgatcacccaggtgcggaggatgaatgaggccaccatgctgctgaagaagcagctgcccagcgtgaggaagctgctgcggaggaagaccctggagcgggagacagccagccccaagaccagcaaggtgctgcagaagagccccagcgcccggaggatgtctgatgtgcctgagggcgtcatccgggtgcacgcccccctgctgagcaaggtgtccatggccatccagctgaacaaccagaccaaggccaaggacatcctggccaagttccagtatgagaaccgcatcctgcactggcagagagctgccctgtccttcctgaatggcaagtgggtgaagaaggagcgggaggagagcacagagaccaacagaagccccaagcacgtgttcctgttcaccatcggcctggacatcagcacctag

SEQ ID NO: 275557 - DNA, 2169 bp, Artificial Sequence
  derived and/or modified sequence
atggaggtggaggacagcggcggcgtggtgctgacagcctaccacagctatgcccgggcccagcccccaaatgctgagagccgctgtgcccccagggctgctgccagccaccccctgagcaggaagagcatcccccgctgccgccgcatcaacaggatgctgagcaatgaaagcctgcaccccccagccttcagccgcagcaacagcgaggcctctgtggacagcgcctccatggaggacttctggagagaaattgagagcatcaaggacagctccatgggcggccaggaggagcccccacctgctgaggtgacccctgtggatgaaggagagctggaggccgagtggctgcaggatgtgggcctgagcaccctcatctctggagatgaggaggaggatggcaaggccctgctgagcaccctgaccaggacccaggccgctgctgtgcagaagcgctaccacacctacacccagaccatgaggaagaaggacaagcagagcatcagagatgtgcgggacatctttggagtgtctgagagccccccccgggacacctgtggcaaccacaccaaccagctggatggcaccaaggaggagcgggagctgcccagggtcatcaagaccagcggctccatgccagatgatgccagcctgaacagcaccaccctgagtgatgccagccaggacaaggagggcagctttgctgtgcccaggagtgacagcgtggccatcctggagaccatccctgtgctgcctgtgcacagcaatggcagccctgagcccggccagcctgtgcagaatgccatcagtgatgatgacttcctggagaagaacatccccccagaggccgaggagctgagctttgaggtgtcctacagcgagatggtgacagaggccctgaagaggaacaagctgaagaagtctgagatcaagaaggaggactatgtgctgaccaagttcaacgtgcagaagaccaggtttggcctgacagaggccggggacctgtctgctgaggacatgaagaagatccgccacctgagcctgattgagctgacagccttctttgatgccttcggcatccagctgaagaggaacaagacagagaaggtgaagggccgggacaatggcatcttcggcgtgcccctgactgtgctgctggatggagacaggaagaaggaccccggggtgaaggtgcccctggtgctgcagaagttctttgagaaggtggaggagagcggcctggagagcgagggcatcttccggctgagcggctgcacagccaaggtgaagcagtaccgggaggagctggatgccaagttcaatgctgacaagttcaagtgggacaagatgtgccaccgggaggccgctgtgatgctgaaggccttcttccgggagctgcccaccagcctcttccctgtggagtacatcccagccttcatcagcctgatggagcggggcccccacgtgaaggtgcagttccaggccctgcacctgatggtgatggccctgcctgatgccaacagagatgctgcccaggccctgatgaccttcttcaacaaggtgattgccaatgaaagcaagaacaggatgagcctgtggaacatcagcacagtgatggcccccaacctcttcttcagccgcagcaagcacagcgactatgaggagctgctgctggccaacacagctgcccacatcatccggctgatgctgaagtaccagaagatcctgtggaaggtgcccagcttcctgatcacccaggtgcggaggatgaatgaggccaccatgctgctgaagaagcagctgcccagcgtgaggaagctgctgcggaggaagaccctggagcgggagacagccagccccaagaccagcaaggtgctgcagaagagccccagcgcccggaggatgtctgatgtgcctgagggcgtcatccgggtgcacgcccccctgctgagcaaggtgtccatggccatccagctgaacaaccagaccaaggccaaggacatcctggccaagttccagtatgaaaatcgcatcctgcactggcagagagctgccctgtccttcctgaatggcaagtgggtgaagaaggagcgggaggagagcacagagaccaacagaagccccaagcacgtgttcctgttcaccatcggcctggacatcagcacctag

SEQ ID NO: 275558 - DNA, 1692 bp, Artificial Sequence
  derived and/or modified sequence
atgaggaagaaggacaagcagagcatcagagatgtgcgggacatcttcggcgtgtctgagagccccccccgggacacctgtggcaaccacaccaaccagctggatggcaccaaggaggagcgggagctgcccagggtcatcaagaccagcggctccatgccagatgatgccagcctgaacagcaccaccctgagtgatgccagccaggacaaggagggcagctttgctgtgcccaggagtgacagcgtggccatcctggagaccatccctgtgctgcctgtgcacagcaatggcagccctgagcccggccagcctgtgcagaatgccatcagtgatgatgacttcctggagaagaacatccccccagaggccgaggagctgagctttgaggtgtcctacagcgagatggtgacagaggccctgaagaggaacaagctgaagaagtctgagatcaagaaggaggactatgtgctgaccaagttcaacgtgcagaagacccgcttcggcctgacagaagctggggacctgtctgctgaggacatgaagaagatccgccacctgagcctcatcgagctgacagccttctttgatgccttcggcatccagctgaagaggaacaagacagagaaggtgaagggccgggacaatggcatctttggagtgcccctgactgtgctgctggatggagacaggaagaaggaccccggggtgaaggtgcccctggtgctgcagaagttctttgagaaggtggaggagagcggcctggagagcgagggcatcttccggctgagcggctgcacagccaaggtgaagcagtaccgggaggagctggatgccaagttcaatgctgacaagttcaagtgggacaagatgtgccaccgggaggccgctgtgatgctgaaggccttcttccgggagctgcccaccagcctcttccctgtggagtacatcccagccttcatcagcctgatggagcggggcccccacgtgaaggtgcagttccaggccctgcacctgatggtgatggccctgcctgatgccaacagagatgctgcccaggccctgatgaccttcttcaacaaggtgattgccaatgaaagcaagaacaggatgagcctgtggaacatcagcacagtgatggcccccaacctcttcttcagccgcagcaagcacagcgactatgaggagctgctgctggccaacacagctgcccacatcatccggctgatgctgaagtaccagaagatcctgtggaaggtgcccagcttcctgatcacccaggtgcggaggatgaatgaggccaccatgctgctgaagaagcagctgcccagcgtgaggaagctgctgcggaggaagaccctggagcgggagacagccagccccaagaccagcaaggtgctgcagaagagccccagcgcccggaggatgtctgatgtgcctgagggcgtcatccgggtgcacgcccccctgctgagcaaggtgtccatggccatccagctgaacaaccagaccaaggccaaggacatcctggccaagttccagtatgagaaccgcatcctgcactggcagagagctgccctgtccttcctgaatggcaagtgggtgaagaaggagcgggaggagagcacagagaccaacagaagccccaagcacgtgttcctgttcaccatcggcctggacatcagcacctag

SEQ ID NO: 275559 - DNA, 1665 bp, Artificial Sequence
  derived and/or modified sequence
atggccttcatgaggatcaacgtcatcatgaatgagctgccccgggacacctgtggcaaccacaccaaccagctggatggcaccaaggaggagcgggagctgcccagggtcatcaagaccagcggctccatgccagatgatgccagcctgaacagcaccaccctgagtgatgccagccaggacaaggagggcagctttgctgtgcccaggagtgacagcgtggccatcctggagaccatccctgtgctgcctgtgcacagcaatggcagccctgagcccggccagcctgtgcagaatgccatcagtgatgatgacttcctggagaagaacatccccccagaggccgaggagctgagctttgaggtgtcctacagcgagatggtgacagaggccctgaagaggaacaagctgaagaagtctgagatcaagaaggaggactatgtgctgaccaagttcaacgtgcagaagaccaggtttggcctgacagaggccggggacctgtctgctgaggacatgaagaagatccgccacctgagcctgattgagctgacagccttctttgatgccttcggcatccagctgaagaggaacaagacagagaaggtgaagggccgggacaatggcatcttcggcgtgcccctgactgtgctgctggatggagacaggaagaaggaccccggggtgaaggtgcccctggtgctgcagaagttctttgagaaggtggaggagagcggcctggagagcgagggcatcttccggctgagcggctgcacagccaaggtgaagcagtaccgggaggagctggatgccaagttcaatgctgacaagttcaagtgggacaagatgtgccaccgggaggccgctgtgatgctgaaggccttcttccgggagctgcccaccagcctcttccctgtggagtacatcccagccttcatcagcctgatggagcggggcccccacgtgaaggtgcagttccaggccctgcacctgatggtgatggccctgcctgatgccaacagagatgctgcccaggccctgatgaccttcttcaacaaggtgattgccaatgaaagcaagaacaggatgagcctgtggaacatcagcacagtgatggcccccaacctcttcttcagccgcagcaagcacagcgactatgaggagctgctgctggccaacacagctgcccacatcatccggctgatgctgaagtaccagaagatcctgtggaaggtgcccagcttcctgatcacccaggtgcggaggatgaatgaggccaccatgctgctgaagaagcagctgcccagcgtgaggaagctgctgcggaggaagaccctggagcgggagacagccagccccaagaccagcaaggtgctgcagaagagccccagcgcccggaggatgtctgatgtgcctgagggcgtcatccgggtgcacgcccccctgctgagcaaggtgtccatggccatccagctgaacaaccagaccaaggccaaggacatcctggccaagttccagtatgaaaatcgcatcctgcactggcagagagctgccctgtccttcctgaatggcaagtgggtgaagaaggagcgggaggagagcacagagaccaacagaagccccaagcacgtgttcctgttcaccatcggcctggacatcagcacctag

SEQ ID NO: 275560 - DNA, 2013 bp, Artificial Sequence
  derived and/or modified sequence
atgctgagcaacgagagcctgcacccccccgccttcagccggagcaatagcgaggcttccgtggatagtgcatctatggaggatttctggagggaaattgaatctatcaaggactccagcatgggtggccaggaggagccaccccctgctgaggtgaccccagtcgatgaaggggagctggaggccgaatggctgcaagatgtgggcctctccactctcatctcgggtgatgaagaggaagacggaaaagcgctcttgtccacgctgacacggactcaggcagcggctgtacagaaaagatatcatacctacactcaaaccatgaggaagaaagataagcagtccatcagagacgtgcgagacatcttcggagtatctgaaagccctccacgagacacttgcggaaatcatactaatcagttagatggcaccaaggaagagcgggagttgcctcgtgtgatcaaaactagcggtagtatgccggacgatgcctcattgaactctactaccctgagtgatgccagccaggacaaggagggatcttttgccgtccctcgttctgattccgttgccattctagagacgatacctgtccttcctgtgcactcaaacgggagccccgagccaggacaaccggtgcagaacgccattagcgacgatgacttcctggaaaaaaacataccacctgaggccgaggaactctcctttgaggtcagttatagcgaaatggtcacagaagccctgaagcgcaataagttaaaaaaatctgagatcaaaaaggaggattatgtgctcaccaagtttaacgtgcaaaagacccgctttgggcttactgaggcaggagatctgtccgccgaggacatgaagaaaattcggcatctgtccctgatcgaactgactgcattttttgatgcttttggtattcagctcaagaggaacaaaacggaaaaagtcaagggaagagacaatgggattttcggggtaccacttaccgtcctgttagacggcgacaggaaaaaggaccccggcgttaaagtgcctttagtgctacagaaattctttgagaaggtcgaggaaagcgggctagagagcgaagggatcttcaggctgagcggatgcactgcaaaggttaagcagtatagggaagaactggatgctaaattcaatgcggacaagttcaaatgggacaaaatgtgtcatagagaggccgcagtcatgctcaaagcgttcttccgcgagctccccacatccttatttccagttgagtatatccctgcattcatcagtctgatggagagaggtccccacgtgaaagtccagtttcaggcccttcacctaatggtgatggccctgcccgacgcaaaccgcgacgccgctcaggccctcatgacattctttaataaagtgatcgcgaacgagagtaaaaaccgcatgtctttgtggaacatctcaacggttatggcaccgaatctcttctttagcaggtcaaaacattcggattatgaggagctgttactggccaacaccgcggcccatatcatccgcttgatgctcaagtaccagaagatcctgtggaaagtgccaagcttcctgatcacacaggtgaggcggatgaacgaggcaacaatgttgttgaagaagcaactgccaagcgtcagaaaactgctcagacgaaaaaccctggaacgagaaacagcctcgcctaaaaccagcaaggtccttcagaagtcccctagtgcccggcggatgagcgacgtgccggagggcgtgattagagtgcatgccccactgctatccaaagtttctatggccatccagctgaataatcagacgaaagccaaagacattctggccaagttccaatacgaaaatagaatccttcattggcaacgcgccgccctttcattcttgaacgggaagtgggtgaaaaaggagcgagaggaatctaccgagaccaaccggagcccgaagcacgtgttcctgttcaccattggtctggatatttcaacctag

SEQ ID NO: 275561 - DNA, 1638 bp, Artificial Sequence
  derived and/or modified sequence
atgaacgagctgccccgggacacctgcggcaaccacaccaaccagttggatggtactaaggaggagcgcgaactgccgcgtgtcattaagactagcggaagtatgcctgacgacgcctcgcttaactcaacgactctgtcggacgcatcgcaggataaagagggtagttttgccgtaccgcgatcagattccgttgcaattctggaaaccattccagtgctccccgtacattcaaacggtagtccggagccgggccagcccgtgcaaaatgcaatcagtgatgatgacttcctcgagaagaacataccccctgaggcagaggaactctcctttgaggtgtcctactccgaaatggtaactgaagccctgaagcggaacaagttgaagaaatcggagattaaaaaggaagattatgtcctcaccaagtttaacgtgcagaaaaccagatttggactcactgaggctggggatctttcggccgaagatatgaagaaaattcggcatctaagtcttattgaattaacagcgttttttgacgcttttgggattcagctcaagcgcaacaagaccgagaaagtcaaaggtagggacaatgggatttttggcgtgcccctaactgtacttctggacggcgatcgcaaaaaggacccaggggtgaaagtgcccctggtgctgcagaaattctttgagaaggtggaggaaagcggcctggaatcggagggcatttttagactgtccggatgcacggctaaagtgaagcaatatcgcgaggagctggatgccaaatttaacgcagataagttcaagtgggacaaaatgtgccatcgcgaggccgccgtaatgctcaaggccttcttcagagagctccccacgagtctctttcctgtggagtacatccccgccttcatcagcctgatggagagaggacctcatgtgaaagtacaattccaagccctgcacctcatggtcatggctctgcctgacgcaaatagggatgctgcccaagcgttgatgacgttcttcaacaaagtcatcgctaacgaatccaagaaccggatgtctctctggaatataagcacagtaatggccccaaatttgtttttcagtaggtctaaacatagcgactatgaggaactgctcctagcgaataccgccgcccatataattcgccttatgcttaagtaccagaaaatcttgtggaaagtgccttccttccttattactcaagtgcgcagaatgaacgaagcaaccatgctgttaaagaagcagttgccaagcgttaggaagctgctccgacggaaaacactcgagagagaaacggcctcacccaagacttccaaagtcctgcaaaaaagccccagcgcacgacgaatgtcagacgttcctgagggcgttattcgcgtgcatgctccacttctgtcaaaagttagcatggccattcagctgaataatcagactaaggcaaaggatatcctagctaagtttcaatacgaaaatcgaatccttcattggcagagggcggctctgtccttcttgaacggtaagtgggtaaagaaggagagagaggagagcacagaaacaaatcggagtcctaagcacgtgtttttgtttactattggcctagacatctctacttag

SEQ ID NO: 275562 - DNA, 2169 bp, Artificial Sequence
  derived and/or modified sequence
atggaggtggaggacagcggcggcgtggtgctgaccgcctaccacagttatgcccgcgcgcaaccccctaacgcggagtctcgttgtgcacccagagcagcggcgtcccacccactcagccggaaatctattcctagatgcaggagaatcaatcggatgttaagcaatgagtctctccatcctcctgcttttagtcgctcaaattcagaggccagcgtggattctgcctctatggaagacttttggcgcgagattgagtcgattaaagactctagcatgggaggccaggaagagcctcctcctgccgaggtaacccctgtcgatgaaggggagcttgaggccgagtggctgcaagatgtggggctgagcaccctcatcagcggcgatgaagaagaagatggaaaggcgctgctgtccactctgacccgaacacaggccgcagctgtccagaaacggtatcatacctatactcagaccatgcggaaaaaggacaaacaaagcatccgagacgtgagggacatctttggggtgagcgagtccccgcctagagatacttgcggcaaccataccaaccagctcgacggcacaaaggaggaacgagaactgccccgcgtgatcaagacatctggcagcatgcctgacgacgctagcttgaattccactacactgagcgacgctagccaggacaaggaggggtcgttcgccgttcccagaagtgacagtgttgccattctggagacaatcccagtcttgcccgtccattctaatgggtcccccgagccaggacagcccgtccagaacgccatatcagacgacgacttcttggagaagaacattcctccagaagccgaagaactgtcctttgaggtgtcttatagtgagatggtgacagaggccctgaagcgaaataagcttaaaaagtccgagattaagaaagaggattacgtgctcactaaattcaacgtgcagaagacacggttcggtcttactgaggccggagacttgagcgcggaagatatgaagaagattagacatctgtctcttattgagctgactgccttctttgacgctttcggaattcaactgaagcggaacaagactgagaaggtgaaaggcagggacaacggcatctttggagttccactgaccgtcctgcttgatggcgacaggaagaaggaccccggagttaaggtgcctcttgttttgcagaaattcttcgagaaagtggaagagagcggtctggaaagcgagggtatcttccgcttgagtggttgtactgctaaggtgaaacagtaccgggaggagcttgacgccaaattcaacgcagataaatttaagtgggataaaatgtgtcacagagaagccgcagtgatgttgaaagcctttttcagagagctgcccaccagcctgtttcctgtcgagtacataccagcttttatcagcttgatggagagaggtccacacgttaaggtccaattccaggctttgcacttgatggtaatggcactcccggacgctaatcgcgacgcagcccaggccttgatgaccttctttaataaggttattgcaaacgaatccaagaaccggatgagcttatggaatatctccacggtgatggctccaaacctcttcttcagtcgatctaagcacagtgactatgaggagcttctgctggccaacacagctgctcatatcattagactgatgctgaaataccagaagatcctgtggaaagtgccctcttttctgattacacaggtgcgcaggatgaatgaggccacaatgctactaaagaagcagttaccctcagtgagaaaacttcttagacgcaaaactttggagcgcgagacagcatcacctaagacttctaaagtgctccaaaagtctccttctgcccgacgcatgagtgatgttcctgaaggcgttatccgcgtccatgcaccgttactgagcaaggtgtccatggctatccaactgaacaatcagacaaaggctaaggatattttagcaaagtttcagtacgaaaaccgcatacttcattggcagcgcgccgctctgagctttctcaatggcaaatgggtgaagaaagaaagagaggagtctaccgaaacaaatcgctcaccaaagcacgttttcctgtttaccatcggactcgatatatcaacttag

SEQ ID NO: 275563 - DNA, 1692 bp, Artificial Sequence
  derived and/or modified sequence
atgcggaagaaggacaagcagagcatccgggacgtgcgggacatctttggcgttagcgagtctcctccacgggacacgtgcggaaatcacaccaaccagctcgacgggacaaaagaggaacgcgaacttccccgcgtgatcaaaacaagcgggtctatgcccgatgatgcttcactgaacagtaccactctctctgacgcctcacaagacaaggagggaagctttgccgttccgcgttccgactctgtagcaatattggaaacaatcccagtgctcccagtgcatagcaacgggagtccagagcctggtcagcccgttcagaatgctatcagtgacgatgatttcttggagaagaacataccccccgaggctgaggaactgtcatttgaagtgtcatacagtgaaatggtcacagaggccttgaagcggaataagttgaagaagagcgaaatcaagaaagaggattacgttttgacaaagttcaacgtgcaaaagacacgcttcggattgaccgaggctggtgacctttctgccgaggacatgaaaaagatccggcacctttcacttatagagctgaccgcattttttgacgcatttggcatccagttgaaaagaaataaaactgagaaggtgaagggccgggataatggaatattcggagtgcccctcacagtgctgcttgacggcgaccgcaaaaaggaccccggtgtcaaagtgcccctggtgttacaaaaattcttcgaaaaagtcgaagagtctggccttgaaagcgagggaatctttaggctaagcggctgtacagcgaaagttaaacagtaccgggaggaactcgacgctaaatttaacgctgacaagtttaagtgggacaaaatgtgccacagagaggccgctgtgatgttaaaagccttttttcgtgaactccctacctcactgttcccggtcgaatacatccccgcgttcatcagtctgatggagagagggccacatgttaaggtccagtttcaggccctgcatctgatggtcatggctttgccagatgccaatcgggacgccgcacaagctctaatgacatttttcaacaaagtcatcgctaacgagagcaagaatcgcatgtctctctggaatatctccaccgtcatggctcctaatctgttcttctcccggagcaaacatagtgattatgaggaactgctcctggccaacactgccgcgcatatcattcgactaatgcttaaataccagaaaattctgtggaaggtaccctccttcctgatcacacaggtcagaagaatgaacgaagctactatgttgctgaagaaacagctgccctcggtgaggaaactcctgaggaggaagacactcgaacgcgaaactgctagccccaaaacttctaaggtactgcagaaaagcccatctgctaggcgaatgtcggatgttcctgaaggggtgatccgagtacacgctccgctattaagtaaggtcagcatggccattcagctgaacaatcagacgaaggccaaagacatcctggccaaatttcagtatgagaaccgtatactccactggcagagagccgctctgagctttcttaacgggaaatgggtgaagaaggaacgggaggagtctactgaaacaaacaggagccccaagcacgtattcctgtttaccattggactggacatctctacatag

SEQ ID NO: 275564 - DNA, 1665 bp, Artificial Sequence
  derived and/or modified sequence
atggccttcatgcggatcaacgtgatcatgaacgagctgccccgggatacatgtggcaatcacacgaatcaactggacggcaccaaggaagagagggagctcccacgtgttattaagacatccgggtccatgcctgatgatgccagcctgaactcgactaccctgagcgatgcatcccaagataaggaggggtcttttgctgtgccccgctctgatagcgttgcaatcctggagaccattcctgttctgcctgtgcattcaaacggcagtccagaacccggccagcctgtacaaaacgccattagcgacgacgacttcctcgagaaaaacattccacccgaggctgaagaattgtccttcgaggtttcatatagcgagatggttacagaagctttgaagcgcaataagttaaagaagtcagaaataaaaaaggaagactacgtccttacgaaatttaacgttcagaagacccggtttggcctgactgaagccggagatctgtcagcagaagatatgaaaaaaattcgtcatctgtcactgatcgaactcaccgcattttttgatgcttttgggatacaacttaagcggaataaaactgaaaaagtcaaggggagggacaacgggatcttcggagttccattaacagtactcctcgatggggaccggaaaaaagatcccggggtgaaggtgccactggtgttacagaaattctttgagaaagtggaagagagcgggctggagtctgaaggcatattccgcttatcaggatgtacagcaaaagtgaagcagtaccgggaggaactcgatgcaaagttcaacgccgacaagttcaagtgggacaagatgtgtcacagagaggcagctgtgatgctaaaggccttttttagggaactgcccacttccctgtttcccgttgagtacattcccgcatttattagcctcatggagagaggcccacacgtgaaggtgcagtttcaggcgctgcatctgatggtgatggcccttcccgatgcaaaccgggacgcagcacaggccctgatgaccttttttaataaagtcatagcaaatgaatccaagaatcggatgtcactatggaacatctccacagttatggcaccaaacctgttctttagcaggagcaaacacagcgactacgaagagctgttactcgctaacactgcggcccacataatccggcttatgctgaaataccaaaagatcctctggaaggtgccctcttttctgattacacaggtccgacggatgaacgaagcgacaatgctcctgaagaagcagctcccatcggtccggaaacttctaaggcgcaagacactggagagggaaacagcctcgccaaaaacgagcaaggtcctccagaaaagccccagcgcaagacggatgtccgacgtgcctgagggagttatcagggtgcacgctccccttctcagcaaagtgagcatggcaatccaacttaacaaccagacaaaagcaaaagacattctggccaagttccagtacgagaatcgcattctgcattggcaacgcgctgccctcagctttctcaatgggaaatgggtgaagaaggagcgcgaagagagtacggaaaccaataggtctccaaaacatgtgttcctttttacaattggcttggacatctcaacatag

SEQ ID NO: 275565 - DNA, 2013 bp, Artificial Sequence
  derived and/or modified sequence
atgttgtccaacgagagcctgcaccctcctgcctttagccgtagcaattctgaggcctccgttgacagtgccagcatggaagatttttggcgcgagatcgagagtatcaaggactcgtctatgggaggccaggaggagccgcctccagccgaagtcacaccggtggatgagggtgaactcgaggctgagtggttacaggatgtgggcctgtcgacgttgatcagtggagacgaggaggaagacggcaaggctctcctgtcgaccctaactcgaactcaggcagctgctgttcagaagcgctatcacacctatacccagaccatgcgcaaaaaggataaacagtcaatccgcgatgtccgtgacatctttggagtgtcagagtccccaccccgagacacttgtggcaatcacacgaatcagttagacgggaccaaagaggaaagagagttacccagagtcataaaaaccagtggatcaatgcccgatgacgcaagcctcaacagtacaactttatcagacgccagccaggataaggaaggctccttcgccgtcccacgcagcgattccgtcgccatcttggaaacaattccggtgctaccggtgcacagcaatggcagccctgagcctgggcagccagtacagaacgctatttcagatgatgatttcctggagaagaacattccaccagaggctgaggaactttcgttcgaagtctcttattcagagatggtgacggaggcactcaagcgcaataagctgaaaaagagcgaaatcaaaaaggaagactacgtgctgacaaaattcaacgtgcaaaaaaccagattcggtctaaccgaggctggcgatctctccgccgaagacatgaagaagattagacacctctcattaattgagttgacggctttcttcgatgctttcggaattcagctcaaacgaaacaaaactgaaaaggtcaaagggagggacaacggaatattcggagtgcccttgaccgtgctcttagacggtgatcggaaaaaagacccgggagtaaaggtaccgctagttcttcagaaatttttcgaaaaggtggaggagtcaggtctcgagtctgaggggatcttcaggctctccggctgtacagctaaggtgaaacagtatcgggaggaactggacgcaaagttcaacgctgacaaattcaagtgggacaagatgtgccaccgggaagcggcagtaatgctaaaggcctttttcagggaactgccaacgtccctatttcccgtggaatacatccccgcattcatcagtctgatggagcgcggaccgcatgtgaaagtgcaattccaggccctacacctaatggtgatggccctacccgatgcaaaccgggatgctgctcaggccttgatgacttttttcaataaggtcatcgctaatgagagtaaaaatcgaatgtcactctggaacatctcaacggtgatggcaccgaacctgttcttttcccgctccaaacattcagactatgaggaattgctgctggccaacaccgccgctcacattattagattaatgctgaaataccaaaagatattgtggaaagttcccagcttcctgatcactcaggtcaggagaatgaatgaggctacaatgctcctgaaaaaacaacttccctcggttcgcaaactactgagaagaaagaccctggaaagagagaccgccagtcctaaaactagcaaagtgctgcagaaaagtccctcagccaggcgcatgagcgatgtacccgagggcgttatacgcgtccacgcccctttgctatccaaagtctctatggcaattcagctcaacaaccaaactaaggcaaaagatatcctggcaaaattccagtatgagaatcgcatcctgcactggcagagagctgccctgagctttctgaacggcaaatgggtaaagaaagaacgggaagaaagcacagaaaccaaccgctctcccaagcacgtatttctctttaccatcggtctggacatttcgacttag

SEQ ID NO: 275566 - DNA, 1638 bp, Artificial Sequence
  derived and/or modified sequence
atgaacgagctgccgagggatacatgcggcaatcacacgaatcaactcgatggcactaaagaagaacgggaactacccagggtgatcaagactagcgggtctatgcccgatgacgcttctctgaactcaactacactttcagatgcaagtcaagataaggaaggcagttttgccgtgcccaggtccgattccgtcgctattctagaaaccattccggtgttacctgttcactcaaatggcagcccagagcccggtcaaccggtccagaacgccatctccgacgatgactttctagaaaaaaacattccacccgaagcagaagagctgagtttcgaggtatcatatagtgagatggtgacagaggcactcaagcgaaacaagctgaagaaatccgagatcaagaaagaggattacgtgcttacaaaatttaatgttcagaaaacgcggttcggactcacagaggctggggacctgagcgcagaggatatgaaaaaaatcagacatctctctttaattgagctgaccgcctttttcgacgcctttgggatacagttgaagagaaacaaaacagagaaggtgaaaggcagggacaatgggatttttggtgtgccgctgaccgtactgctagacggcgataggaaaaaggatccaggcgtaaaagtgccactcgtgttgcagaagttcttcgagaaagtggaggagtctggcctcgaatctgagggcatttttaggctttcaggttgtactgcaaaagttaagcagtaccgcgaggagctcgacgcgaagttcaacgccgacaagttcaaatgggacaagatgtgccacagggaggctgcagtaatgctgaaggcgtttttccgggagcttcccacctcactgtttcccgttgagtatatccccgcatttatctctcttatggagagaggccctcatgtgaaggtacagttccaggccctacacctcatggttatggccctgccagacgctaaccgggatgctgcacaagcattgatgacgttctttaataaagtgattgcaaacgaaagtaagaataggatgagcttgtggaacatcagcactgtgatggctcctaacctcttcttcagcaggagcaaacacagcgattacgaggagctgttgctggcaaacaccgccgcacatataattcggcttatgctgaagtatcagaaaatactctggaaagtgcccagcttcctgatcacccaggtgcgacgcatgaacgaggcgacaatgctgctgaagaagcagctgccctctgtgcgcaagctgctcaggcgcaaaaccctggaaagggaaacagcttcccctaaaacctctaaggtgcttcagaagtccccttccgctaggcgtatgagtgacgtgcctgagggcgtgattcgagtccacgccccattactgtccaaagttagtatggccatccagttaaacaaccagaccaaagcaaaagacatactcgcgaagtttcagtacgagaacaggatcctacattggcagcgcgctgccctttccttcctaaacggcaaatgggtaaagaaagaaagggaagaaagtacggagacaaaccggagccctaagcacgtctttctgtttacaatcggcctggatatttccacatag

SEQ ID NO: 275567 - DNA, 2169 bp, Artificial Sequence
  derived and/or modified sequence
atggaggtggaggattctggcggagttgtgttgaccgcatatcacagttacgcccgagcacaaccgcctaacgcagagtcccgctgcgcgcctagggcagcggcttctcacccattgtctagaaaaagcatcccacgatgtagaaggattaaccggatgctaagcaatgagagcctgcacccccctgcgttcagcagaagcaattcagaagcctccgtagacagcgcctcaatggaggatttctggcgggagatcgagagcattaaggattccagcatgggcggacaagaggaaccacccccagcagaggttactcccgtggacgagggcgaactagaagccgagtggttacaggacgtagggctgtccactttaattagtggcgacgaggaagaagatggcaaggccctgttgagcactctgacccgcactcaggcagcggcagtacagaagagataccatacctatacacaaacgatgcggaagaaggacaaacaatccatccgggatgtacgtgatatctttggggtgtcagagtcccccccacgggatacctgtggaaatcacaccaaccagttagacggcacgaaggaagagagagagctacctcgggttatcaagacatccggtagcatgcctgacgatgcatctctgaactcaaccacgctttctgatgcaagccaggacaaagaagggagttttgctgtgcccagatctgacagcgttgctatcctggaaaccattccggtgctgcccgtccactctaatggttcccccgagccaggacaaccggtgcaaaacgctatatccgacgatgacttcctggagaagaatataccacctgaagccgaagagttaagcttcgaggtgagctactcagaaatggtaacggaggccttgaagcgtaataagctcaagaaaagtgaaatcaagaaagaagactatgtgctgaccaaattcaacgtccagaagacacggtttgggttgaccgaggccggagatttgagcgccgaagacatgaaaaagattcgccacttgagtctgatcgaactcactgctttcttcgatgcattcggaatccagctgaagagaaacaaaaccgagaaagtgaaaggaagagataacggcatcttcggagtgccactgaccgtgcttcttgatggagaccgtaaaaaagatcccggagtaaaagttccactggtgctgcagaagttcttcgagaaggttgaagaaagcggcctcgagtctgaggggatctttagactaagcggatgtacggccaaggttaagcagtaccgagaagagctggacgctaaattcaatgctgataagttcaaatgggacaagatgtgccacagagaagcagccgtgatgctgaaagcctttttccgcgaactgccaacgagcctattccccgttgaatatattcctgccttcatctccctcatggagcgaggccctcacgtcaaggttcagttccaggcccttcacctcatggtgatggcactgccagatgctaatcgcgatgctgctcaagctctgatgacgttcttcaataaggtgatcgcaaacgagtccaaaaatcgtatgtccctgtggaacatctcaaccgtgatggcacccaacctctttttcagtcgcagtaagcactctgattatgaggagctgcttctcgcaaatacagcagcccatattatcagacttatgctgaaataccagaaaattctatggaaggttccgagcttcttgatcacacaggtccggagaatgaatgaagctactatgctgttgaaaaagcagttgccctcggtgaggaagctgctgcggcgaaagactctggaacgagagacagccagcccaaagacctccaaggtgcttcagaagtccccctccgctaggaggatgtcagatgttcctgaaggcgtcatcagagtgcacgcacccctgctcagcaaggtgtcaatggctattcagctgaataaccagaccaaagcaaaagatattctggcaaagttccagtacgagaataggatcctgcattggcagagagccgctctgagcttcctgaatggtaagtgggtgaaaaaggaacgtgaggagagcactgaaaccaaccgcagtcctaaacatgtattcctcttcacaataggcttagacatttctacctag

SEQ ID NO: 275568 - DNA, 1692 bp, Artificial Sequence
  derived and/or modified sequence
atgcggaagaaagataagcaatccatccgtgatgtacgcgatatttttggagttagtgaatctccacctcgagatacatgtgggaatcacacaaaccagctggacggcaccaaagaggagcgggagctccctcgcgtcatcaaaacttcagggtctatgccagatgatgcttccctgaacagtactaccctgtccgacgccagccaggataaagaaggatcattcgcagttcccagaagcgattcagtggccattctggagaccatcccggtactccctgtccactctaacggaagccccgaacctggccagcccgtgcagaacgccatctcagatgatgatttcctcgaaaagaacatccctcctgaggcagaagagctgtctttcgaggtttcctacagtgaaatggtaacagaggccctgaaacgaaataagcttaagaaatctgaaatcaaaaaggaggattatgtgctgacgaagttcaatgtgcagaagactagattcggcctaacagaggctggggatttgagtgctgaagacatgaaaaagattcgccatctgtcattaatagaactgacagcattttttgacgcatttggcattcagcttaagcggaataagacagagaaagttaaagggagagacaatgggatatttggggtgcctctgacagtactgttagatggagaccgcaagaaggatcccggagtcaaggtgccgctcgtcttacagaagtttttcgaaaaggtcgaggaaagtggcctagaatcggaagggatcttcagattgagtgggtgcactgcgaaggttaaacaatatagggaggagctggacgcaaaatttaatgcagataaatttaaatgggacaaaatgtgtcaccgtgaagcagcagttatgctgaaagcatttttccgcgaattgcccacgagcctgtttccagtggagtacatccctgcattcataagcctcatggaaaggggaccacatgttaaggtccagttccaggctctccatctgatggtgatggctctgcctgacgctaatcgagacgccgcacaggcactgatgacatttttcaacaaagttatagcgaacgaatctaaaaatcgaatgtccctctggaacatatccactgtaatggcacctaatctgttcttttcgagatctaagcactcagattacgaagaactattgctcgccaatacagctgcgcacatcatccggctgatgcttaagtaccaaaagatattgtggaaggtgcctagcttcctgatcactcaagtaaggcgcatgaatgaggctaccatgctcctgaaaaagcagttgccatccgtccggaaattactgcgacgaaaaacattagagcgcgagaccgcatcacccaagacgagtaaggtgctgcaaaaatcaccctctgccagaaggatgtcagacgtccccgagggagtcataagggtgcatgcgccactgctatcaaaagtcagtatggcaatacagctgaacaaccagactaaggctaaggacatactggccaagtttcaatatgagaaccgaattttacactggcagagagcagcactgagctttcttaacgggaagtgggtgaaaaaagaacgggaggaaagtacagagaccaaccggtctcccaagcacgttttcctcttcaccatagggctagatatatctacatag

SEQ ID NO: 275569 - DNA, 1665 bp, Artificial Sequence
  derived and/or modified sequence
atggcgttcatgaggatcaatgtaatcatgaatgagttaccaagggacacctgtggaaatcacaccaaccagctcgatggaactaaggaagaacgggagctcccccgagtcattaagacctctggcagcatgcccgacgatgcctccttgaatagcaccaccctgtctgacgcctcacaagacaaggaggggtcttttgcagtgcctcgctctgactctgtagccatccttgaaacaattccagtgcttccggtccactccaacggttcacctgagccaggacagcctgtgcagaatgctataagcgacgacgacttcctggaaaagaacattcctcccgaagccgaggagttgtcattcgaagtctcatattcggagatggtcaccgaggcactgaaaaggaacaaattgaagaaatctgagattaagaaagaagattacgttcttaccaagttcaacgttcagaaaactcgctttggcctgactgaagcaggcgacctctccgccgaagacatgaagaagattagacatttatcattgattgaacttaccgctttttttgacgcctttggaattcagctgaaaagaaacaagacagagaaagttaagggcagggataacggtatcttcggagtgccacttactgtgcttctcgacggagaccgcaagaaggatcccggtgtaaaagtgcccttagtgctgcagaaattttttgaaaaggttgaagagagcggactggagtctgaagggatcttccggctgtctggttgtaccgccaaggtgaagcagtacagggaggagttagacgcaaaattcaacgccgataagttcaagtgggacaaaatgtgccacagggaggctgcagtaatgctgaaagctttttttcgcgagcttcctacatcactttttcctgttgaatacatcccagctttcatcagtttgatggagcggggaccccatgtcaaagtgcagtttcaggcattgcatctgatggtcatggcccttccagacgctaatcgggatgctgctcaggctttgatgaccttctttaacaaggtgatagctaacgaaagcaaaaatcggatgtccctctggaacatttcgacggtgatggctcccaatctgttcttttcccgctccaagcacagcgactatgaagagctcttgctggccaacaccgcagcccacattatcagacttatgttgaagtaccagaagatcctgtggaaggtcccgtccttcctgattacccaggtgcgacgcatgaatgaagccaccatgctcctcaagaagcagctcccaagcgtcagaaagctgctcaggcgcaaaaccctggaacgggagaccgccagtcctaaaaccagtaaggtgttacagaagtcgcccagtgctcgaagaatgtccgatgtccctgaaggcgttatccgggtacacgcccctctgctgtctaaagtctctatggccattcagttgaataatcagaccaaggcaaaagatattctcgctaaatttcaatatgaaaatagaattctgcactggcagcgagctgctctctccttcctcaacggtaagtgggtcaagaaagagagggaggagagcacagaaacaaaccgttcaccaaaacacgtctttttattcacaatcggccttgacatctctacgtag

SEQ ID NO: 275570 - DNA, 5369 bp, Artificial Sequence
  derived and/or modified sequence
ctctgtcgcccaggctggagtgcagtagagtgatctcggctcactgcaagctccacctcctgggttcacgccattctcctgcctcagccttccgagtagcttggactacaggcacccaccaccacacccagctaatttttttgtattttttttagtagagacggggttttaccatgttggccaggatggtcttgatctcctgacctcatgatccacctgcctcggcctcacaaagtgctgggattacaggtatgagccaccacgcccggccaggcatttctttatagcaatgccaggatggtgtgccagactgtatcagagacaagtgatacaaagatgaccaagatacagtacttgcccaggaagaagaattcctgtggccacctctgtcttatatcaagagataagtgtgaaacagagtatccacaacagtgtttgggaagacagtgtgagtggctcccaactctaccaacaaaggcttcaaaggagtaatgacatttgaattgagtcttaaaggataaatgtattacttggcctgacaacacagaagaaaaggtcatttttgtcaaagaaatcaaccttgaaaaaatgccgcagttcatgacttgtaccagtgaaggtagcaaggtctgtgtgttggtgatgaatttgcaggggatcaggctgaagaaacaagacttgggagagaggatgtgagacctttttatgacatgcatagagttggcacctcagcctttgcatggtagggagctagctgaaggctacctccatgacagatgtacactttgaaaagacaggccgggtgcggtggctcacgtctgtaatcccagcattttgggaggctgaggtgggcaaatcacttgaagtcaggagttagagatcagcctggccaacacagtgaaacctggtctctactaaaaaaaataaaataattagccaggcatggtggcgcacacctgtaatcccaactattcgggaggctgaggcagaagaattgcttgaacacgggaggcggaagttgcagtgagctgagatggcaccaccgcactccagcctgggcgacagatcaagactccatctcaaaataaaggaagatacagctaatctatatttctttcaccagagatcaccaccactaacaattcatactggtcgtttttccctgaatgttttacctatgtaggaaaattttacatcccaatttttaatttaacactatgaaaagcatttctttttataataaagacactctattagtatacttttgatggcttcaaaactacttttgtatagatgcaaaattaaaatatcaaattgtttcttttgtttgtttgtttttttgttttttttttgagacagagtctcactctgtcgcccaggctaaagcacagtggcatgatctcggctcactgcaagcttttcctcccaggttaaagtgattctcatgccgcagcctcccgagaagctgggactacaggtgtgcaccaccacccccggctaattttttgtatttttacaaaacacaaagagagacggggtttcaccatgttgggcaggctggtctcaaactcctgacctcaggtgatccgcctgcctcagcctcccaaagtgctgggattgcaggcgtgggccaccgtgccctgcctcaaattgtttctttaatggttgttcccaaattttcataaataactttttacgtaacatttttgggcataaagttgtctaaaattattttcataggctagataccttaagtacacttaatgatttaaatcatacttaacattaagactttaatgttgctatattgatatttagtaaaagtacaaaacttgtgctttagagtttagacatattcaggatataagatagttttgttggatttggcgaacacttgccctaggagaataaaaaatgatgaattagtccaaaatgttccagttttctaatttgtcagactcggtaaatggtatcatcaccaaccaagaaaaacagaagatacagggagagtagattttgcagaaaagataaggagttctgtttgggacttgctgcctttgatatactgcactgggagaaaatccaagtcgaacagagtggacaagtgagaatgtgctgtggaatcaacaagaggggtggggagtctacctacctagatttgagagcagtttggcaaataattgttagtaaatgtcatagaaattcgtgggagagagaagttgataagaacagaggggtaaaggatgaaacagaggaaacactgccgcttctcagggttgggtacaagagaagccagggaaatagactaagaaagagtgatcagggaaaccgggagacagtgttgtcacggaagcctggagtgtgagattttccagaaaagaaggaatgaaagaatgaatggtctgtagatccattactcagcactatcagacacattgtccccttttgatatcccataatgaaatttatagataatataatctacttgtgcacaaaattttagaaattaatataatgccccaactataatataaagtgtattagtcagggttctctagagggacagaactaataggatatatatatataaaggggagtttataaagtattaacttacactattacaaggtcccacaataggctgtctgcaagcttgaggagcagagagccaggctgagtctcaacactgaagaacttggagtccgatgttcgagggcaggaaaaatccagcacaggagaaagacgcaggctgggaggctaggccagtctctcctttccatgttcctctgcctgctttatattcactggcagctgattggattgtgcccaccagattaagggtggatctgccttccccagcccactgactcaagtattaatctcttttgacaacaccctcacagacacacccaggatcaatatttgtatccttcaatccaattaagctgacactcagaattaaccatcacataaaggaagaagtaaaaggaaagtatattttatataataagtatttaaatatgtaaacattgggacatgactaaaactgactgaacacattgaaggagtcacttggttggtctgatgtgcagaattaccatgcatgctacaaatggagaggggtctacatgagctgtattgcttgtggtgccgcagatgacttgaatttccagaatgaaaatccattcctcgctgccgaagaattaacaggatgctctccaatgaatccctccatcctcctgccttcagccgttccaactcagaagcctccgtagacagcgcctccatggaggatttctggcgggaaatagaaagtattaaagacagcagcatgggagggcaagaagagccaccgccagctgaggtcacacctgtggatgaaggagaacttgaagcagaatggctgcaagatgtgggtttatcaactctgatctcaggtgatgaagaggaagatggcaaagccttgctctccacattgactcgaacccaagcagctgccgtgcaaaagagataccatacctatacccaaaccatgaggaaaaaggataagcaatctatcagggatgtcagagacatttttggagtcagtgaatctcctcctcgtgatacctgtggcaaccacactaatcagctggatggcaccaaggaagaaagagagcttccaagagttatcaagacaagtggttccatgccagatgatgcttctctcaacagtactaccctgtctgacgcatcccaggataaagaagggagttttgcggttcccaggagtgactctgtggctatacttgagaccattccagttctaccagttcattccaatggatcaccggagcctggacagccagttcagaatgcgataagtgatgatgattttctggaaaagaacattccaccagaggctgaagagctgtcatttgaagtgtcttattcagaaatggttacggaggctctaaaaagaaataaacttaagaaatcagagattaagaaagaagactatgttttaactaaatttaatgttcagaaaaccagatttggcttaactgaagcaggagatctgtctgctgaagacatgaagaaaatccgccatctctctctgattgaattgactgccttttttgatgcctttggaattcaactgaaaaggaacaaaacagagaaagtaaaaggacgagacaatgggatttttggagttccacttacagtcctcctggacggtgaccgaaagaaagaccctggagtgaaagttcccctggtattacaaaaattttttgagaaagttgaggaatcaggtctggaatctgaaggaatttttcgactttcaggatgtactgctaaagtcaagcaataccgtgaagaacttgatgccaagtttaatgctgataaatttaaatgggacaaaatgtgccatagagaagctgcagtaatgttgaaagcgtttttcagagaactacccacctctctcttccctgtggaatatatacctgccttcatcagtctaatggaaagagggcctcacgtcaaagtacagtttcaagccttacacctcatggtcatggcgctgcctgatgccaacagagatgcagctcaggccctcatgacattcttcaataaagtgattgccaatgaatcaaaaaaccgaatgagtctgtggaacatttctacagtgatggcaccaaaccttttcttcagtagaagcaaacactctgattatgaagaattactgttagcaaacactgcggcccacatcatccgcctaatgcttaagtaccagaagattttgtggaaggttccatctttcttaatcactcaagtaagaagaatgaatgaagccacgatgctattgaagaagcagctcccaagtgtcaggaagctgctcaggaggaagaccctcgagcgggagactgcaagccccaagacttcaaaggtactgcaaaaatcaccctcggcaagacgaatgtctgacgtgccggaaggagtcatacgggtccatgctccacttctctccaaggtgtccatggccattcaactcaacaatcaaaccaaagccaaagacatattggcaaaatttcaatatgaaaacagaatactgcactggcagcgagctgcactttccttcctaaatggaaaatgggttaaaaaagaaagagaagagtcgacagagaccaacaggagccccaaacatgtattcctcttcactattggcctggacatctccacataggcagtcatatagagacttgaaatatcattcaagggatttgggtatccagtagacttttagttacatatactacaaaactgactttgtactctcaagtagacctttcgtagaaagaaaatgtttctaataaaaatgtattagaact

SEQ ID NO: 275571 - DNA, 1857 bp, Artificial Sequence
  derived and/or modified sequence
caggaagctagcagagtttgcttctgagacgaattctgttacagtacatggcatttatgaggatcaatgtaattatgaatgaattgcctcgtgatacctgtggcaaccacactaatcagctggatggcaccaaggaagaaagagagcttccaagagttatcaagacaagtggttccatgccagatgatgcttctctcaacagtactaccctgtctgacgcatcccaggataaagaagggagttttgcggttcccaggagtgactctgtggctatacttgagaccattccagttctaccagttcattccaatggatcaccggagcctggacagccagttcagaatgcgataagtgatgatgattttctggaaaagaacattccaccagaggctgaagagctgtcatttgaagtgtcttattcagaaatggttacggaggctctaaaaagaaataaacttaagaaatcagagattaagaaagaagactatgttttaactaaatttaatgttcagaaaaccagatttggcttaactgaagcaggagatctgtctgctgaagacatgaagaaaatccgccatctctctctgattgaattgactgccttttttgatgcctttggaattcaactgaaaaggaacaaaacagagaaagtaaaaggacgagacaatgggatttttggagttccacttacagtcctcctggacggtgaccgaaagaaagaccctggagtgaaagttcccctggtattacaaaaattttttgagaaagttgaggaatcaggtctggaatctgaaggaatttttcgactttcaggatgtactgctaaagtcaagcaataccgtgaagaacttgatgccaagtttaatgctgataaatttaaatgggacaaaatgtgccatagagaagctgcagtaatgttgaaagcgtttttcagagaactacccacctctctcttccctgtggaatatatacctgccttcatcagtctaatggaaagagggcctcacgtcaaagtacagtttcaagccttacacctcatggtcatggcgctgcctgatgccaacagagatgcagctcaggccctcatgacattcttcaataaagtgattgccaatgaatcaaaaaaccgaatgagtctgtggaacatttctacagtgatggcaccaaaccttttcttcagtagaagcaaacactctgattatgaagaattactgttagcaaacactgcggcccacatcatccgcctaatgcttaagtaccagaagattttgtggaaggttccatctttcttaatcactcaagtaagaagaatgaatgaagccacgatgctattgaagaagcagctcccaagtgtcaggaagctgctcaggaggaagaccctcgagcgggagactgcaagccccaagacttcaaaggtactgcaaaaatcaccctcggcaagacgaatgtctgacgtgccggaaggagtcatacgggtccatgctccacttctctccaaggtgtccatggccattcaactcaacaatcaaaccaaagccaaagacatattggcaaaatttcaatatgaaaacagaatactgcactggcagcgagctgcactttccttcctaaatggaaaatgggttaaaaaagaaagagaagagtcgacagagaccaacaggagccccaaacatgtattcctcttcactattggcctggacatctccacataggcagtcatatagagacttgaaatatcattcaagggatttgggtatccagtagacttttagttacatatactacaaaactgactttgtactctcaagtagacctttcgtagaaagaaaatgtttctaataaaaatgtattagaact

SEQ ID NO: 275572 - DNA, 2314 bp, Artificial Sequence
  derived and/or modified sequence
atggaggtggaggactcgggcggcgtggtgctgaccgcctaccactcgtacgcgcgcgcccagccccccaacgccgagtcgcgctgcgcgccccgcgccgcagccagccacccgctcagcagaaaatccattcctcgctgccgaagaattaacaggatgctctccaatgaatccctccatcctcctgccttcagccgttccaactcagaagcctccgtagacagcgcctccatggaggatttctggcgggaaatagaaagtattaaagacagcagcatgggagggcaagaagagccaccgccagctgaggtcacacctgtggatgaaggagaacttgaagcagaatggctgcaagatgtgggtttatcaactctgatctcaggtgatgaagaggaagatggcaaagccttgctctccacattgactcgaacccaagcagctgccgtgcaaaagagataccatacctatacccaaaccatgaggaaaaaggataagcaatctatcagggatgtcagagacatttttggagtcagtgaatctcctcctcgtgatacctgtggcaaccacactaatcagctggatggcaccaaggaagaaagagagcttccaagagttatcaagacaagtggttccatgccagatgatgcttctctcaacagtactaccctgtctgacgcatcccaggataaagaagggagttttgcggttcccaggagtgactctgtggctatacttgagaccattccagttctaccagttcattccaatggatcaccggagcctggacagccagttcagaatgcgataagtgatgatgattttctggaaaagaacattccaccagaggctgaagagctgtcatttgaagtgtcttattcagaaatggttacggaggctctaaaaagaaataaacttaagaaatcagagattaagaaagaagactatgttttaactaaatttaatgttcagaaaaccagatttggcttaactgaagcaggagatctgtctgctgaagacatgaagaaaatccgccatctctctctgattgaattgactgccttttttgatgcctttggaattcaactgaaaaggaacaaaacagagaaagtaaaaggacgagacaatgggatttttggagttccacttacagtcctcctggacggtgaccgaaagaaagaccctggagtgaaagttcccctggtattacaaaaattttttgagaaagttgaggaatcaggtctggaatctgaaggaatttttcgactttcaggatgtactgctaaagtcaagcaataccgtgaagaacttgatgccaagtttaatgctgataaatttaaatgggacaaaatgtgccatagagaagctgcagtaatgttgaaagcgtttttcagagaactacccacctctctcttccctgtggaatatatacctgccttcatcagtctaatggaaagagggcctcacgtcaaagtacagtttcaagccttacacctcatggtcatggcgctgcctgatgccaacagagatgcagctcaggccctcatgacattcttcaataaagtgattgccaatgaatcaaaaaaccgaatgagtctgtggaacatttctacagtgatggcaccaaaccttttcttcagtagaagcaaacactctgattatgaagaattactgttagcaaacactgcggcccacatcatccgcctaatgcttaagtaccagaagattttgtggaaggttccatctttcttaatcactcaagtaagaagaatgaatgaagccacgatgctattgaagaagcagctcccaagtgtcaggaagctgctcaggaggaagaccctcgagcgggagactgcaagccccaagacttcaaaggtactgcaaaaatcaccctcggcaagacgaatgtctgacgtgccggaaggagtcatacgggtccatgctccacttctctccaaggtgtccatggccattcaactcaacaatcaaaccaaagccaaagacatattggcaaaatttcaatatgaaaacagaatactgcactggcagcgagctgcactttccttcctaaatggaaaatgggttaaaaaagaaagagaagagtcgacagagaccaacaggagccccaaacatgtattcctcttcactattggcctggacatctccacataggcagtcatatagagacttgaaatatcattcaagggatttgggtatccagtagacttttagttacatatactacaaaactgactttgtactctcaagtagacctttcgtagaaagaaaatgtttctaataaaaatgtattagaact

SEQ ID NO: 275573 - DNA, 1848 bp, Artificial Sequence
  derived and/or modified sequence
acagaaggagaacttgaagcagaatggctgcaagatgtgggtttatcaactctgatctcaggtgatgaagaggaagatggcaaagccttgctctccacattgactcgaacccaagcagctgccgtgcaaaagagataccatacctatacccaaaccatgaggaaaaaggataagcaatctatcagggatgtcagagacatttttggagtcagtgaatctcctcctcgtgatacctgtggcaaccacactaatcagctggatggcaccaaggaagaaagagagcttccaagagttatcaagacaagtggttccatgccagatgatgcttctctcaacagtactaccctgtctgacgcatcccaggataaagaagggagttttgcggttcccaggagtgactctgtggctatacttgagaccattccagttctaccagttcattccaatggatcaccggagcctggacagccagttcagaatgcgataagtgatgatgattttctggaaaagaacattccaccagaggctgaagagctgtcatttgaagtgtcttattcagaaatggttacggaggctctaaaaagaaataaacttaagaaatcagagattaagaaagaagactatgttttaactaaatttaatgttcagaaaaccagatttggcttaactgaagcaggagatctgtctgctgaagacatgaagaaaatccgccatctctctctgattgaattgactgccttttttgatgcctttggaattcaactgaaaaggaacaaaacagagaaagtaaaaggacgagacaatgggatttttggagttccacttacagtcctcctggacggtgaccgaaagaaagaccctggagtgaaagttcccctggtattacaaaaattttttgagaaagttgaggaatcaggtctggaatctgaaggaatttttcgactttcaggatgtactgctaaagtcaagcaataccgtgaagaacttgatgccaagtttaatgctgataaatttaaatgggacaaaatgtgccatagagaagctgcagtaatgttgaaagcgtttttcagagaactacccacctctctcttccctgtggaatatatacctgccttcatcagtctaatggaaagagggcctcacgtcaaagtacagtttcaagccttacacctcatggtcatggcgctgcctgatgccaacagagatgcagctcaggccctcatgacattcttcaataaagtgattgccaatgaatcaaaaaaccgaatgagtctgtggaacatttctacagtgatggcaccaaaccttttcttcagtagaagcaaacactctgattatgaagaattactgttagcaaacactgcggcccacatcatccgcctaatgcttaagtaccagaagattttgtggaaggttccatctttcttaatcactcaagtaagaagaatgaatgaagccacgatgctattgaagaagcagctcccaagtgtcaggaagctgctcaggaggaagaccctcgagcgggagactgcaagccccaagacttcaaaggtactgcaaaaatcaccctcggcaagacgaatgtctgacgtgccggaaggagtcatacgggtccatgctccacttctctccaaggtgtccatggccattcaactcaacaatcaaaccaaagccaaagacatattggcaaaatttcaatatgaaaacagaatactgcactggcagcgagctgcactttccttcctaaatggaaaatgggttaaaaaagaaagagaagagtcgacagagaccaacaggagccccaaacatgtattcctcttcactattggcctggacatctccacatag

SEQ ID NO: 275574 - DNA, 1859 bp, Artificial Sequence
  derived and/or modified sequence
caggaagctagcagagtttgcttctgagacgaattctgttacagtacatggcatttatgaggatcaatgtaattatgaatgaattgcctcgtgatacctgtggcaaccacactaatcagctggatggcaccaaggaagaaagagagcttccaagagttatcaagacaagtggttccatgccagatgatgcttctctcaacagtactaccctgtctgacgcatcccaggataaagaagggagttttgcggttcccaggagtgactctgtggctatacttgagaccattccagttctaccagttcattccaatggatcaccggagcctggacagccagttcagaatgcgataagtgatgatgattttctggaaaagaacattccaccagaggctgaagagctgtcatttgaagtgtcttattcagaaatggttacggaggctctaaaaagaaataaacttaagaaatcagagattaagaaagaagactatgttttaactaaatttaatgttcagaaaaccagatttggcttaactgaagcaggagatctgtctgctgaagacatgaagaaaatccgccatctctctctgattgaattgactgccttttttgatgcctttggaattcaactgaaaaggaacaaaacagagaaagtaaaaggacgagacaatgggatttttggagttccacttacagtcctcctggacggtgaccgaaagaaagaccctggagtgaaagttcccctggtattacaaaaattttttgagaaagttgaggaatcaggtctggaatctgaaggaatttttcgactttcaggatgtactgctaaagtcaagcaataccgtgaagaacttgatgccaagtttaatgctgataaatttaaatgggacaaaatgtgccatagagaagctgcagtaatgttgaaagcgtttttcagagaactacccacctctctcttccctgtggaatatatacctgccttcatcagtctaatggaaagagggcctcacgtcaaagtacagtttcaagccttacacctcatggtcatggcgctgcctgatgccaacagagatgcagctcaggccctcatgacattcttcaataaagtgattgccaatgaatcaaaaaaccgaatgagtctgtggaacatttctacagtgatggcaccaaaccttttcttcagtagaagcaaacactctgattatgaagaattactgttagcaaacactgcggcccacatcatccgcctaatgcttaagtaccagaagattttgtggaaggttccatctttcttaatcactcaagtaagaagaatgaatgaagccacgatgctattgaagaagcagctcccaagtgtcaggaagctgctcaggaggaagaccctcgagcgggagactgcaagccccaagacttcaaaggtactgcaaaaatcaccctcggcaagacgaatgtctgacgtgccggaaggagtcatacgggtccatgctccacttctctccaaggtgtccatggccattcaactcaacaatcaaaccaaagccaaagacatattggcaaaatttcaatatgaaaacagaatactgcactggcagcgagctgcactttccttcctaaatggaaaatgggttaaaaaagaaagagaagagtcgacagagaccaacaggagccccaaacatgtattcctcttcactattggcctggacatctccacataggcagtcatatagagacttgaaatatcattcaagggatttgggtatccagtagacttttagttacatatactacaaaactgactttgtactctcaagtagacctttcgtagaaagaaaatgtttctaataaaaatgtattagaactaa

SEQ ID NO: 275575 - DNA, 2013 bp, Artificial Sequence
  derived and/or modified sequence
atgctgagcaacgagagcctgcacccccccgccttcagcagaagcaacagcgaggccagcgtggacagcgccagcatggaggacttctggagagagatcgagagcatcaaggacagcagcatgggcggccaggaggagcccccccccgccgaggtgacccccgtggacgagggcgagctggaggccgagtggctgcaggacgtgggcctgagcaccctgatcagcggcgacgaggaggaggacggcaaggccctgctgagcaccctgaccagaacccaggccgccgccgtgcagaagagataccacacctacacccagaccatgagaaagaaggacaagcagagcatcagagacgtgagagacatcttcggcgtgagcgagagcccccccagagacacctgcggcaaccacaccaaccagctggacggcaccaaggaggagagagagctgcccagagtgatcaagaccagcggcagcatgcccgacgacgccagcctgaacagcaccaccctgagcgacgccagccaggacaaggagggcagcttcgccgtgcccagaagcgacagcgtggccatcctggagaccatccccgtgctgcccgtgcacagcaacggcagccccgagcccggccagcccgtgcagaacgccatcagcgacgacgacttcctggagaagaacatcccccccgaggccgaggagctgagcttcgaggtgagctacagcgagatggtgaccgaggccctgaagagaaacaagctgaagaagagcgagatcaagaaggaggactacgtgctgaccaagttcaacgtgcagaagaccagattcggcctgaccgaggccggcgacctgagcgccgaggacatgaagaagatcagacacctgagcctgatcgagctgaccgccttcttcgacgccttcggcatccagctgaagagaaacaagaccgagaaggtgaagggcagagacaacggcatcttcggcgtgcccctgaccgtgctgctggacggcgacagaaagaaggaccccggcgtgaaggtgcccctggtgctgcagaagttcttcgagaaggtggaggagagcggcctggagagcgagggcatcttcagactgagcggctgcaccgccaaggtgaagcagtacagagaggagctggacgccaagttcaacgccgacaagttcaagtgggacaagatgtgccacagagaggccgccgtgatgctgaaggccttcttcagagagctgcccaccagcctgttccccgtggagtacatccccgccttcatcagcctgatggagagaggcccccacgtgaaggtgcagttccaggccctgcacctgatggtgatggccctgcccgacgccaacagagacgccgcccaggccctgatgaccttcttcaacaaggtgatcgccaacgagagcaagaacagaatgagcctgtggaacatcagcaccgtgatggcccccaacctgttcttcagcagaagcaagcacagcgactacgaggagctgctgctggccaacaccgccgcccacatcatcagactgatgctgaagtaccagaagatcctgtggaaggtgcccagcttcctgatcacccaggtgagaagaatgaacgaggccaccatgctgctgaagaagcagctgcccagcgtgagaaagctgctgagaagaaagaccctggagagagagaccgccagccccaagaccagcaaggtgctgcagaagagccccagcgccagaagaatgagcgacgtgcccgagggcgtgatcagagtgcacgcccccctgctgagcaaggtgagcatggccatccagctgaacaaccagaccaaggccaaggacatcctggccaagttccagtacgagaacagaatcctgcactggcagagagccgccctgagcttcctgaacggcaagtgggtgaagaaggagagagaggagagcaccgagaccaacagaagccccaagcacgtgttcctgttcaccatcggcctggacatcagcacctag

SEQ ID NO: 275576 - DNA, 1638 bp, Artificial Sequence
  derived and/or modified sequence
atgaacgagctgcccagagacacctgcggcaaccacaccaaccagctggacggcaccaaggaggagagagagctgcccagagtgatcaagaccagcggcagcatgcccgacgacgccagcctgaacagcaccaccctgagcgacgccagccaggacaaggagggcagcttcgccgtgcccagaagcgacagcgtggccatcctggagaccatccccgtgctgcccgtgcacagcaacggcagccccgagcccggccagcccgtgcagaacgccatcagcgacgacgacttcctggagaagaacatcccccccgaggccgaggagctgagcttcgaggtgagctacagcgagatggtgaccgaggccctgaagagaaacaagctgaagaagagcgagatcaagaaggaggactacgtgctgaccaagttcaacgtgcagaagaccagattcggcctgaccgaggccggcgacctgagcgccgaggacatgaagaagatcagacacctgagcctgatcgagctgaccgccttcttcgacgccttcggcatccagctgaagagaaacaagaccgagaaggtgaagggcagagacaacggcatcttcggcgtgcccctgaccgtgctgctggacggcgacagaaagaaggaccccggcgtgaaggtgcccctggtgctgcagaagttcttcgagaaggtggaggagagcggcctggagagcgagggcatcttcagactgagcggctgcaccgccaaggtgaagcagtacagagaggagctggacgccaagttcaacgccgacaagttcaagtgggacaagatgtgccacagagaggccgccgtgatgctgaaggccttcttcagagagctgcccaccagcctgttccccgtggagtacatccccgccttcatcagcctgatggagagaggcccccacgtgaaggtgcagttccaggccctgcacctgatggtgatggccctgcccgacgccaacagagacgccgcccaggccctgatgaccttcttcaacaaggtgatcgccaacgagagcaagaacagaatgagcctgtggaacatcagcaccgtgatggcccccaacctgttcttcagcagaagcaagcacagcgactacgaggagctgctgctggccaacaccgccgcccacatcatcagactgatgctgaagtaccagaagatcctgtggaaggtgcccagcttcctgatcacccaggtgagaagaatgaacgaggccaccatgctgctgaagaagcagctgcccagcgtgagaaagctgctgagaagaaagaccctggagagagagaccgccagccccaagaccagcaaggtgctgcagaagagccccagcgccagaagaatgagcgacgtgcccgagggcgtgatcagagtgcacgcccccctgctgagcaaggtgagcatggccatccagctgaacaaccagaccaaggccaaggacatcctggccaagttccagtacgagaacagaatcctgcactggcagagagccgccctgagcttcctgaacggcaagtgggtgaagaaggagagagaggagagcaccgagaccaacagaagccccaagcacgtgttcctgttcaccatcggcctggacatcagcacctag

SEQ ID NO: 275577 - DNA, 2169 bp, Artificial Sequence
  derived and/or modified sequence
atggaggtggaggacagcggcggcgtggtgctgaccgcctaccacagctacgccagagcccagccccccaacgccgagagcagatgcgcccccagagccgccgccagccaccccctgagcagaaagagcatccccagatgcagaagaatcaacagaatgctgagcaacgagagcctgcacccccccgccttcagcagaagcaacagcgaggccagcgtggacagcgccagcatggaggacttctggagagagatcgagagcatcaaggacagcagcatgggcggccaggaggagcccccccccgccgaggtgacccccgtggacgagggcgagctggaggccgagtggctgcaggacgtgggcctgagcaccctgatcagcggcgacgaggaggaggacggcaaggccctgctgagcaccctgaccagaacccaggccgccgccgtgcagaagagataccacacctacacccagaccatgagaaagaaggacaagcagagcatcagagacgtgagagacatcttcggcgtgagcgagagcccccccagagacacctgcggcaaccacaccaaccagctggacggcaccaaggaggagagagagctgcccagagtgatcaagaccagcggcagcatgcccgacgacgccagcctgaacagcaccaccctgagcgacgccagccaggacaaggagggcagcttcgccgtgcccagaagcgacagcgtggccatcctggagaccatccccgtgctgcccgtgcacagcaacggcagccccgagcccggccagcccgtgcagaacgccatcagcgacgacgacttcctggagaagaacatcccccccgaggccgaggagctgagcttcgaggtgagctacagcgagatggtgaccgaggccctgaagagaaacaagctgaagaagagcgagatcaagaaggaggactacgtgctgaccaagttcaacgtgcagaagaccagattcggcctgaccgaggccggcgacctgagcgccgaggacatgaagaagatcagacacctgagcctgatcgagctgaccgccttcttcgacgccttcggcatccagctgaagagaaacaagaccgagaaggtgaagggcagagacaacggcatcttcggcgtgcccctgaccgtgctgctggacggcgacagaaagaaggaccccggcgtgaaggtgcccctggtgctgcagaagttcttcgagaaggtggaggagagcggcctggagagcgagggcatcttcagactgagcggctgcaccgccaaggtgaagcagtacagagaggagctggacgccaagttcaacgccgacaagttcaagtgggacaagatgtgccacagagaggccgccgtgatgctgaaggccttcttcagagagctgcccaccagcctgttccccgtggagtacatccccgccttcatcagcctgatggagagaggcccccacgtgaaggtgcagttccaggccctgcacctgatggtgatggccctgcccgacgccaacagagacgccgcccaggccctgatgaccttcttcaacaaggtgatcgccaacgagagcaagaacagaatgagcctgtggaacatcagcaccgtgatggcccccaacctgttcttcagcagaagcaagcacagcgactacgaggagctgctgctggccaacaccgccgcccacatcatcagactgatgctgaagtaccagaagatcctgtggaaggtgcccagcttcctgatcacccaggtgagaagaatgaacgaggccaccatgctgctgaagaagcagctgcccagcgtgagaaagctgctgagaagaaagaccctggagagagagaccgccagccccaagaccagcaaggtgctgcagaagagccccagcgccagaagaatgagcgacgtgcccgagggcgtgatcagagtgcacgcccccctgctgagcaaggtgagcatggccatccagctgaacaaccagaccaaggccaaggacatcctggccaagttccagtacgagaacagaatcctgcactggcagagagccgccctgagcttcctgaacggcaagtgggtgaagaaggagagagaggagagcaccgagaccaacagaagccccaagcacgtgttcctgttcaccatcggcctggacatcagcacctag

SEQ ID NO: 275578 - DNA, 1692 bp, Artificial Sequence
  derived and/or modified sequence
atgagaaagaaggacaagcagagcatcagagacgtgagagacatcttcggcgtgagcgagagcccccccagagacacctgcggcaaccacaccaaccagctggacggcaccaaggaggagagagagctgcccagagtgatcaagaccagcggcagcatgcccgacgacgccagcctgaacagcaccaccctgagcgacgccagccaggacaaggagggcagcttcgccgtgcccagaagcgacagcgtggccatcctggagaccatccccgtgctgcccgtgcacagcaacggcagccccgagcccggccagcccgtgcagaacgccatcagcgacgacgacttcctggagaagaacatcccccccgaggccgaggagctgagcttcgaggtgagctacagcgagatggtgaccgaggccctgaagagaaacaagctgaagaagagcgagatcaagaaggaggactacgtgctgaccaagttcaacgtgcagaagaccagattcggcctgaccgaggccggcgacctgagcgccgaggacatgaagaagatcagacacctgagcctgatcgagctgaccgccttcttcgacgccttcggcatccagctgaagagaaacaagaccgagaaggtgaagggcagagacaacggcatcttcggcgtgcccctgaccgtgctgctggacggcgacagaaagaaggaccccggcgtgaaggtgcccctggtgctgcagaagttcttcgagaaggtggaggagagcggcctggagagcgagggcatcttcagactgagcggctgcaccgccaaggtgaagcagtacagagaggagctggacgccaagttcaacgccgacaagttcaagtgggacaagatgtgccacagagaggccgccgtgatgctgaaggccttcttcagagagctgcccaccagcctgttccccgtggagtacatccccgccttcatcagcctgatggagagaggcccccacgtgaaggtgcagttccaggccctgcacctgatggtgatggccctgcccgacgccaacagagacgccgcccaggccctgatgaccttcttcaacaaggtgatcgccaacgagagcaagaacagaatgagcctgtggaacatcagcaccgtgatggcccccaacctgttcttcagcagaagcaagcacagcgactacgaggagctgctgctggccaacaccgccgcccacatcatcagactgatgctgaagtaccagaagatcctgtggaaggtgcccagcttcctgatcacccaggtgagaagaatgaacgaggccaccatgctgctgaagaagcagctgcccagcgtgagaaagctgctgagaagaaagaccctggagagagagaccgccagccccaagaccagcaaggtgctgcagaagagccccagcgccagaagaatgagcgacgtgcccgagggcgtgatcagagtgcacgcccccctgctgagcaaggtgagcatggccatccagctgaacaaccagaccaaggccaaggacatcctggccaagttccagtacgagaacagaatcctgcactggcagagagccgccctgagcttcctgaacggcaagtgggtgaagaaggagagagaggagagcaccgagaccaacagaagccccaagcacgtgttcctgttcaccatcggcctggacatcagcacctag

SEQ ID NO: 275579 - DNA, 1665 bp, Artificial Sequence
  derived and/or modified sequence
atggccttcatgagaatcaacgtgatcatgaacgagctgcccagagacacctgcggcaaccacaccaaccagctggacggcaccaaggaggagagagagctgcccagagtgatcaagaccagcggcagcatgcccgacgacgccagcctgaacagcaccaccctgagcgacgccagccaggacaaggagggcagcttcgccgtgcccagaagcgacagcgtggccatcctggagaccatccccgtgctgcccgtgcacagcaacggcagccccgagcccggccagcccgtgcagaacgccatcagcgacgacgacttcctggagaagaacatcccccccgaggccgaggagctgagcttcgaggtgagctacagcgagatggtgaccgaggccctgaagagaaacaagctgaagaagagcgagatcaagaaggaggactacgtgctgaccaagttcaacgtgcagaagaccagattcggcctgaccgaggccggcgacctgagcgccgaggacatgaagaagatcagacacctgagcctgatcgagctgaccgccttcttcgacgccttcggcatccagctgaagagaaacaagaccgagaaggtgaagggcagagacaacggcatcttcggcgtgcccctgaccgtgctgctggacggcgacagaaagaaggaccccggcgtgaaggtgcccctggtgctgcagaagttcttcgagaaggtggaggagagcggcctggagagcgagggcatcttcagactgagcggctgcaccgccaaggtgaagcagtacagagaggagctggacgccaagttcaacgccgacaagttcaagtgggacaagatgtgccacagagaggccgccgtgatgctgaaggccttcttcagagagctgcccaccagcctgttccccgtggagtacatccccgccttcatcagcctgatggagagaggcccccacgtgaaggtgcagttccaggccctgcacctgatggtgatggccctgcccgacgccaacagagacgccgcccaggccctgatgaccttcttcaacaaggtgatcgccaacgagagcaagaacagaatgagcctgtggaacatcagcaccgtgatggcccccaacctgttcttcagcagaagcaagcacagcgactacgaggagctgctgctggccaacaccgccgcccacatcatcagactgatgctgaagtaccagaagatcctgtggaaggtgcccagcttcctgatcacccaggtgagaagaatgaacgaggccaccatgctgctgaagaagcagctgcccagcgtgagaaagctgctgagaagaaagaccctggagagagagaccgccagccccaagaccagcaaggtgctgcagaagagccccagcgccagaagaatgagcgacgtgcccgagggcgtgatcagagtgcacgcccccctgctgagcaaggtgagcatggccatccagctgaacaaccagaccaaggccaaggacatcctggccaagttccagtacgagaacagaatcctgcactggcagagagccgccctgagcttcctgaacggcaagtgggtgaagaaggagagagaggagagcaccgagaccaacagaagccccaagcacgtgttcctgttcaccatcggcctggacatcagcacctag

SEQ ID NO: 275580 - DNA, 354 bp, Artificial Sequence
  derived and/or modified sequence
atgctttcgaacgaaagtctccatccacctgcatttagccgttctaatagcgaggcctctgtcgattcggcctctatggaggacttctggcgggagatagagagcataaaggattcatctatgggaggacaagaagagcccccccccgctgaggtgacccctgtcgacgaaggagagctcgaggctgagtggctgcaggatgtgggcctgtctactctgatatctggagacgaggaggaagatggcaaagctctcctttctacacttaccaggacacaggcggcagcagtgcaaaagcggtatcacacctacacacagaccatgaggaagaaggacaagcaaagcattaggtag

SEQ ID NO: 275581 - DNA, 354 bp, Artificial Sequence
  derived and/or modified sequence
atgctgagcaatgaaagcctgcaccccccagccttcagccgcagcaacagcgaggcctctgtggacagcgcctccatggaggacttctggagagaaattgagagcatcaaggacagctccatgggcggccaggaggagcccccacctgctgaggtgacccctgtggatgaaggagagctggaggccgagtggctgcaggatgtgggcctgagcaccctcatctctggagatgaggaggaggatggcaaggccctgctgagcaccctgaccaggacccaggccgctgctgtgcagaagcgctaccacacctacacccagaccatgaggaagaaggacaagcagagcatcagatag

SEQ ID NO: 275582 - DNA, 354 bp, Artificial Sequence
  derived and/or modified sequence
atgctgagcaacgagagcctgcacccccccgccttcagccggagcaactccgaagcctccgtggattctgcttctatggaagacttctggagggaaattgagtctatcaaagatagcagcatggggggtcaggaagagcccccaccagctgaagtgacccctgttgacgagggagaactggaggcagagtggttacaggatgtcggactaagtactttaattagcggcgacgaagaggaagacggaaaagctttactttcaacactgacacgaacacaggcagctgctgtacagaagcgatatcacacatatactcagaccatgcgcaagaaggataagcagtcaatccggtag

SEQ ID NO: 275583 - DNA, 354 bp, Artificial Sequence
  derived and/or modified sequence
atgctctcgaacgaaagcctgcaccctcctgccttttcccggagcaacagtgaagccagcgtggactctgcatcaatggaagatttctggcgtgagatcgagagcatcaaggacagcagtatgggcggtcaggaagaaccaccgcctgccgaggtcacacccgttgatgagggcgaattggaggcggagtggctccaggatgtggggctgagcaccctaatcagcggtgatgaagaagaggatggtaaggccctactttcaactctcactaggacgcaagccgcagctgttcagaagagataccacacatacactcagaccatgcggaaaaaggataaacagtccattcggtag

SEQ ID NO: 275584 - DNA, 709 bp, Artificial Sequence
  derived and/or modified sequence
attagttcttcacttagagaagaaactccattgccctttgtttctggccctgtgcggctggaggcggccagcactgtcctgtcctggttgaagcaattttaatgtgtgtggggtgctgaatgtgggctggggatggcttccctgcctttgggtcatggggagacacacttgcagaggggttttgtgggtcttcctcaagaatatcatccctgaaatttttaacctgctaaaagaatcaccacttcacatctgtaagcagagcgctggctaactctgtggcttaagcagaggtcagaacatctgaagtgatctgcagatatcctgaaaatccattcctcgctgccgaagaattaacaggatgctctccaatgaatccctccatcctcctgccttcagccgttccaactcagaagcctccgtagacagcgcctccatggaggatttctggcgggaaatagaaagtattaaagacagcagcatgggagggcaagaagagccaccgccagctgaggtcacacctgtggatgaaggagaacttgaagcagaatggctgcaagatgtgggtttatcaactctgatctcaggtgatgaagaggaagatggcaaagccttgctctccacattgactcgaacccaagcagctgccgtgcaaaagagataccatacctatacccaaaccatgaggaaaaaggataagcaatctatcagg

SEQ ID NO: 275585 - DNA, 354 bp, Artificial Sequence
  derived and/or modified sequence
atgctgagcaacgagagcctgcacccccccgccttcagcagaagcaacagcgaggccagcgtggacagcgccagcatggaggacttctggagagagatcgagagcatcaaggacagcagcatgggcggccaggaggagcccccccccgccgaggtgacccccgtggacgagggcgagctggaggccgagtggctgcaggacgtgggcctgagcaccctgatcagcggcgacgaggaggaggacggcaaggccctgctgagcaccctgaccagaacccaggccgccgccgtgcagaagagataccacacctacacccagaccatgagaaagaaggacaagcagagcatcagatag

SEQ ID NO: 275586 - protein, 427 aa, Artificial Sequence
  derived and/or modified sequence
MSKEFQVGMKLEAVDRKNPSLVCVATIADIVEDRLLVHFDNWDDSYDYWCDVNSPYVQPVGWCQENGRTLIAPQGYPNPENFSWTEYLEATQTNAVPAKVFKMRLPHGFLPNMKLEVVDKRNPRLIRVATIVDVDDQRVKVHFDGWDHKYDYWVEADSPDIHPIGWCDVTGHPLEVPQRTNDLKILPGQAVCPTPGCRGIGHIRGPRYSGHHSAFGCPYSDMNLKKEATLHDRLREQTQANLESDSSHSKSKSLCSLNFNGKHEKVNSQPRLVQQAKCLKIKGKEDIDLDNLFREYSVEQAQQVLHQSVSMSTVSAHPFRDLPLGREQHCKLLPGVADIRASQVARWTVDEVAEFVQSLLGCEEHAKCFKKEQIDGKAFLLLTQTDIVKVMKIKLGPALKIYNSILMFRHSQELPEEDIASGQEVRG

SEQ ID NO: 275587 - DNA, 2841 bp, Artificial Sequence
  derived and/or modified sequence
ttgcaaaatgctccaaagaaattattcagaaacagaagtcctaatgggccaatgtctaaagaatttcaggttggaatgaagctggaggccgtggacaggaagaacccttccttggtgtgtgtggcgaccatagcagatattgttgaagatcgcttactagtgcattttgacaactgggatgatagttacgattactggtgcgatgttaatagcccttatgtccagccagttggttggtgtcaggagaatggaagaactctgatagcaccccaaggttatcccaatccagaaaatttttcctggacagaatacctggaagctactcaaaccaatgcagttcctgccaaagtttttaaaatgaggttgcctcatggttttctgccaaatatgaaacttgaagttgtggataaacggaaccccaggttaattcgtgttgctacgattgtagatgttgatgaccaaagagtaaaggttcattttgatggttgggaccataagtatgactactgggtggaggcagacagccctgatatccacccgatcggatggtgtgatgtcacagggcatccactggaagtgccacagcgaacgaatgacctgaagatccttccaggtcaagctgtctgtcctactcccgggtgccgaggaataggccatatccgtggtccacgttattcgggacatcacagtgcttttggctgcccgtattcagacatgaacttgaaaaaggaggcaacacttcacgatcgtttgagagaacaaacacaggcaaatttggaatcagactcttcacattcaaaatcaaaaagcctctgtagtttgaacttcaatggaaaacatgaaaaggtgaacagtcagcccagacttgtacagcaggcaaagtgtttgaaaatcaaaggaaaagaagatattgacttggataatctcttcagagaatactcggtggagcaggcgcagcaggtgcttcaccagtcagtgtccatgtccacggtgtcagcccacccttttcgggaccttcccctcggcagggagcaacactgcaagttgcttccaggcgtggctgacatccgggccagccaagtggcacgttggactgtggatgaggtggctgagtttgtacagtctcttctgggctgtgaagagcatgccaagtgctttaagaaagagcagatcgatggcaaagccttcctgcttctgacacagacggacattgtcaaagtgatgaagatcaaactgggcccagcactgaagatttacaactctatcctgatgttcaggcattcccaggaactccctgaagaagatattgcctcaggccaagaagtcaggggatgaatgggctccctgaacttcctctggcaccaagacctgcgctctttcagcaataaaagtggagcacattaatttgatgtgaatgtccccatggccgtatccacactgaatctggactttttaaagtgtctgtgatttgtttacatgtttagaggattttgatgactggtccagtgccaatgactcagaggcttaggcccatctgtgggtttggtttacgaacattgttatctttggtgggatccgctcagctctgatttgtttgcaagacagaccaaagaagcccacacatccacctttattcttctccgtcaccagaaaagaaaccattttccatcttacaagcataacactctcaagtggtgaaatattagaaaagcagtgttcatgaatacatcgttaatgtttttaccagagcaacatcgagcttggctcagatctgccatggagcacagctagtctaagagctagaggcctggtgctttcaaaagacttcatgtgagatttttgtgtactttactcaggaaagtgtgaatctctaaaaaataataataataagcacatgttttcatgattcattaattctcctttttgttccattaaccatttcttggttgtgctcccaagctttcctggagcctccacaaaggagagtagccaggagtaatgagaggacggtcaggtgggcacttccaaaagctggagagacccttctgaggaccctccaccatcagcggggcctcaggggaccctgtcctaacactggtgtggctgctgggccagacgctcacctgcacagaactcctccctgctcccactctgaagggcgtttcagaattgactcatttccactgcagtctgccagaacccctgtaataaggagctgtgttatattacatctggggctgtgtgcatctttacaaatggagacacactattcaaagggaagatctctaaagtagggagcgtggtacttattctttgtttgaaacattccgatttgttgtcaggccttatttgttttttgtaagtgattgtatcggaggcttaagttgtgtggaatcagtcccacagtgttgaaagacaagtacctcttttctgacacttcttactacttttacaggtagtaacagctacaaatactctcccagaagtggagggacaccatttgtgggtggggagaaagagggagaggttctatgtccacttgcttcattaagaatgttaaggtttaagaaagttgattctgcttggagaatttctcaagctttacatttttttttcactgaagaaaataaacaaactctaagaggtgtgcatatataacatttctttagatctttacctaaaaggaattttaatatattattggttgatgtaaattttgtttctgtggagttttgtttgttttgctttttgtagactgccatgtgcaagtaaaattcctgcttctgccatgttaaaattttaatatattttaaatgataataaacagagaaaacaaaattt

SEQ ID NO: 275588 - DNA, 1284 bp, Artificial Sequence
  derived and/or modified sequence
atgagcaaggagttccaggttggtatgaaactggaggccgtcgatcgcaagaatcctagcctcgtgtgtgtcgcgaccatagccgacatcgtcgaggacaggttgctggtgcattttgacaactgggatgattcctacgactattggtgtgacgtgaatagcccttacgttcagccagttggatggtgtcaagaaaacggaaggaccttaatagccccacagggctatccaaacccagagaattttagctggactgaatacctggaagcaacgcaaactaatgcggtcccagctaaagtgttcaagatgcgcctgccacacggtttcctcccaaatatgaaactggaggtggtggataagaggaacccccggctcattagggtcgccactatcgtggatgtagacgaccagcgtgtgaaggtgcactttgatggctgggatcataagtacgactactgggtcgaggccgactcaccagatattcacccgatcggatggtgtgacgttactggtcacccccttgaggttccccagcggacaaatgatctgaaaatactgccagggcaagccgtctgccctacacctggttgcagaggcatagggcatattcgtggcccgcggtactctggtcaccatagcgctttcggctgtccttactccgacatgaatctgaagaaggaagcgaccctccatgaccgtctgagagagcagacccaggccaaccttgagtccgatagcagccacagcaaatcaaagtcactatgcagtctgaactttaatggaaagcacgagaaagttaactcccagcccaggctcgtgcaacaggcaaaatgtctgaagatcaaaggaaaagaggacattgatctcgataatctattcagggaatattcggtggagcaagctcagcaggtcctgcaccagtctgtgagtatgtcaactgtgagcgcacaccctttccgagatttaccacttggtagagagcagcactgtaaactactcccaggtgttgccgacatacgggcaagtcaggtcgctaggtggacggtcgatgaggtggcagaattcgttcaaagtcttctgggatgcgaggagcatgccaagtgtttcaagaaggaacagatcgacggaaaggctttcctgctgctaacacagaccgatatagtgaaagtcatgaagatcaaactgggccctgccctgaagatttacaattccattctgatgttccgtcattcccaggaacttcctgaggaggacatcgcatctggccaggaggtacgcggatag

SEQ ID NO: 275589 - DNA, 1284 bp, Artificial Sequence
  derived and/or modified sequence
atgagcaaggagttccaggtgggcatgaagctggaggccgtggacaggaagaaccccagcctggtgtgtgtggccaccatcgctgacatcgtggaggaccggctgctggtgcactttgacaactgggatgacagctatgactactggtgtgatgtgaacagcccctacgtgcagcctgtgggctggtgccaggagaatggccgcaccctgattgccccccagggctaccccaaccctgagaacttctcctggacagagtacctggaggccacccagaccaatgctgtgcctgccaaggtgttcaagatgaggctgccccacggcttcctgcccaacatgaagctggaggtggtggacaagaggaaccccaggctcatccgggtggccaccatcgtggatgtggatgaccagagggtgaaggtgcactttgatggctgggaccacaagtatgactactgggtggaggccgacagcccagacatccaccccatcggctggtgtgatgtgacaggccaccccctggaggtgccccagaggaccaatgacctgaagatcctgcccggccaggccgtgtgccccaccccaggctgccggggcatcggccacatccggggcccccgctacagcggccaccacagcgccttcggctgcccctacagcgacatgaacctgaagaaggaggccaccctgcatgaccggctgcgggagcagacccaggccaacctggagagtgacagcagccacagcaagagcaagagcctgtgcagcctgaacttcaacgggaagcatgagaaggtgaacagccagccccggctggtgcagcaggccaagtgcctgaagatcaagggcaaggaggacatcgacctggacaacctcttccgggagtacagcgtggagcaggcccagcaggtgctgcaccagagcgtgtccatgagcacagtgtctgcccaccccttccgggacctgcccctgggccgggagcagcactgcaagctgctgcccggggtggccgacatccgggccagccaggtggcccgctggacagtggatgaggtggccgagtttgtgcagagcctgctgggctgtgaggagcacgccaagtgcttcaagaaggagcagattgatggcaaggccttcctgctgctgacccagacagacatcgtgaaggtgatgaagatcaagctgggccctgccctgaagatctacaacagcatcctgatgttccgccacagccaggagctgcctgaagaagatattgccagcggccaggaggtgcggggctag

SEQ ID NO: 275590 - DNA, 1284 bp, Artificial Sequence
  derived and/or modified sequence
atgagcaaggagttccaggtgggcatgaagctggaggccgtggaccgaaagaatccatctctggtgtgcgtggccactatcgcagacatcgtcgaggataggctcctggtgcattttgacaattgggacgatagctacgactactggtgcgacgttaactccccgtacgtccagcccgtaggctggtgccaggagaacggacgcactctcatcgctccacagggttaccctaatcccgagaacttctcgtggacagagtacttggaagccacccagacaaacgcggtgccagccaaggtgttcaagatgcgactcccgcacggttttcttcccaacatgaaactggaggtggtcgataagcggaacccaagactaatccgtgtcgccacaatcgtcgatgtcgacgaccaaagggtgaaggtccatttcgatggctgggatcacaagtacgactactgggtggaggccgatagcccagatatacatcctattggctggtgtgacgtcaccggacaccccctggaggtgccacagcggaccaatgatctgaagatcttaccgggacaggcagtatgtcctacaccaggctgccggggcatcggccatattagaggccctcgttattctggccaccattccgcattcggctgtccctatagcgacatgaatctgaaaaaagaggccacactgcacgatcggcttcgagaacagacacaggctaacctggaatcggacagttcccattcaaagagcaaatccctgtgttctttgaattttaacgggaaacacgagaaagtcaactcgcagcccaggttagtgcagcaagcaaagtgcctgaaaatcaaagggaaggaggacatcgatctggataacctcttccgggagtatagcgtcgaacaggcccagcaggtgctccatcaatcggtctcaatgtctaccgtttctgcccatccgttcagagatctcccactggggcgtgaacagcattgtaagctgttacccggggttgccgacattagggcatcccaggtcgcccggtggacggtggacgaagtggctgaattcgtgcagtccttgctggggtgtgaagagcacgccaaatgctttaagaaagagcagattgatggcaaagcctttctgctcctgactcagaccgatattgttaaagtgatgaaaataaagctcggaccggccttgaagatttataactcgatactgatgttccgacacagccaggaactaccagaagaagatattgcctctgggcaggaggtccggggatag

SEQ ID NO: 275591 - DNA, 1284 bp, Artificial Sequence
  derived and/or modified sequence
atgtccaaggagtttcaggtgggcatgaagctcgaggcggtggacagaaagaaccctagcttagtttgcgtggcgaccatcgcggacatcgtcgaggaccgcttactcgtccacttcgataattgggatgactcctacgattactggtgtgacgtgaattctccatacgtgcagcccgtgggctggtgccaagagaacggacgaacactcatagccccacagggctatcccaacccggagaatttttcctggaccgagtatttggaggccacgcagacaaacgcagttccagcaaaagtgttcaagatgcgtttgccacatggatttctgccaaacatgaagctcgaagtcgtagacaagcggaatccccgtttgatcagggtggctaccattgtggatgtggatgatcagcgggtcaaagttcatttcgacggctgggaccataaatacgactactgggtcgaggcagattcaccggacatacacccgattggctggtgcgatgtcaccggtcatccccttgaggtgccccaaagaactaacgacctaaagatcctgccgggacaggcagtctgcccaaccccaggatgtagaggaattggacacatccggggacctaggtatagcgggcatcactcagccttcggctgcccctatagcgatatgaacctgaaaaaagaggccacgcttcacgatcggctgcgggaacagacccaggctaacctcgagtccgactcatctcactccaaatccaagtctctctgctccttgaatttcaatggcaaacatgaaaaggtcaattcccagccaagactcgttcagcaggccaagtgtttgaaaatcaagggtaaggaggacatcgacctggacaatctgttcagggagtattctgtcgaacaggcacagcaggttctgcatcaaagtgtttctatgtccaccgtgtccgcacatcctttccgggacctgcctctggggagggagcaacactgcaaactgttaccaggagtcgcagacataagagcttcgcaggtcgccaggtggactgtagatgaagttgccgaattcgtgcagtcgcttctgggctgcgaggagcatgcaaagtgctttaagaaggaacagattgatgggaaagcgtttctgttgctgacccaaaccgatatcgtaaaggtgatgaaaatcaagctcggtcctgctttgaagatttacaattccatcctgatgtttcgacactcgcaggaacttccagaggaggacatagcgagcggacaggaagtcagagggtag

SEQ ID NO: 275592 - DNA, 1284 bp, Artificial Sequence
  derived and/or modified sequence
atgagcaaggagttccaggtgggcatgaagctggaggccgtggacagaaagaaccccagcctggtgtgcgtggccaccatcgccgacatcgtggaggacagactgctggtgcacttcgacaactgggacgacagctacgactactggtgcgacgtgaacagcccctacgtgcagcccgtgggctggtgccaggagaacggcagaaccctgatcgccccccagggctaccccaaccccgagaacttcagctggaccgagtacctggaggccacccagaccaacgccgtgcccgccaaggtgttcaagatgagactgccccacggcttcctgcccaacatgaagctggaggtggtggacaagagaaaccccagactgatcagagtggccaccatcgtggacgtggacgaccagagagtgaaggtgcacttcgacggctgggaccacaagtacgactactgggtggaggccgacagccccgacatccaccccatcggctggtgcgacgtgaccggccaccccctggaggtgccccagagaaccaacgacctgaagatcctgcccggccaggccgtgtgccccacccccggctgcagaggcatcggccacatcagaggccccagatacagcggccaccacagcgccttcggctgcccctacagcgacatgaacctgaagaaggaggccaccctgcacgacagactgagagagcagacccaggccaacctggagagcgacagcagccacagcaagagcaagagcctgtgcagcctgaacttcaacggcaagcacgagaaggtgaacagccagcccagactggtgcagcaggccaagtgcctgaagatcaagggcaaggaggacatcgacctggacaacctgttcagagagtacagcgtggagcaggcccagcaggtgctgcaccagagcgtgagcatgagcaccgtgagcgcccaccccttcagagacctgcccctgggcagagagcagcactgcaagctgctgcccggcgtggccgacatcagagccagccaggtggccagatggaccgtggacgaggtggccgagttcgtgcagagcctgctgggctgcgaggagcacgccaagtgcttcaagaaggagcagatcgacggcaaggccttcctgctgctgacccagaccgacatcgtgaaggtgatgaagatcaagctgggccccgccctgaagatctacaacagcatcctgatgttcagacacagccaggagctgcccgaggaggacatcgccagcggccaggaggtgagaggctag

SEQ ID NO: 275593 - DNA, 6229 bp, Artificial Sequence
  derived and/or modified sequence
gagaagaagtggcaggtgatgctgaagcgggggagaagcggcagagccggccacacagtgcaggggatggagacaggtgctgggctggtcctcctgcagcatcctcagttgttggagggcagtcatcctcaggccgtacccagccagagaagaaaaagaacagtgtgaagccacgtgtgatagccgtccaacatcggctcttccctccaattacattgtagttgattgtgtctcaaaccatgaattatgtgggacagctggctgggcaggtgattgtcactgtgaaggaactctacaagggcattaaccaggccaccctctctgggtgcattgatgtcatcgtggtacagcagcaggatggcagctatcagtgttcaccttttcacgttcggtttggaaagctgggagtcctgagatccaaagagaaagtgattgatatagaaatcaacggcagtgcagtggatcttcacatgaagttgggtgataacggagaagctttctttgttgaggagactgaagaagaatatgaaaagcttcctgcttaccttgccacctcaccaattcctactgaagatcagttctttaaagatattgacacccctttggtgaaatcgggtggagatgaaacaccatctcagagttcagacatctcacacgtcttggaaacagagacaatttttactccaagttctgtgaaaaagaaaaaacgaaggagaaagaaatacaaacaggacagtaagaaggaagagcaggccgcatctgctgctgcagaagacacatgtgatgtaggcgtgagctccgatgatgacaagggggcccaggcagcacgaggatcttcaaatgcttccttgaaagaagaagaatgtaaagagcctttgctcttccattctggggatcattaccccttatctgatggagattggtcccctttagagaccacctatccccagacagcgtgtcctaagagtgattcagagctggaggtgaaacctgcggagagcctgctcagatcagagtctcacatggagtggacgtggggcggattcccagagtccaccaaggtcagcaaaagagaacgatctgaccatcatcctaggacagctacaattacaccatcagaaaatactcattttcgggtaattcccagtgaggacaacctcatcagtgaagttgagaaggatgcttccatggaagacactgtctgtaccatagtgaagcccaaacccagagccctgggtacacagatgagcgacccaacatctgtggcagagcttctcgaacctcctcttgagagtactcagatttcatctatgttagatgctgaccaccttcccaacgcagccttagcggaggcgccctcagaatccaaaccggcagctaaagtagactcgccgtcaaagaagaaaggtgttcacaaaagaagccaacaccagggacctgatgatatttaccttgatgacttaaagggtctagaacctgaagttgcagctctttatttccctaaaagtgaatcggagcccggttccaggcagtggcccgagtctgacacactctctggctcccagtccccacagtccgtgggaagcgcagctgcagatagcggcaccgagtgcctctcagattctgccatggacttgcctgacgttaccctctccctttgcgggggcctcagtgaaaatggagaaatttcaaaagaaaaattcatggagcatatcattacttatcacgaatttgcagaaaaccctggacttatagacaatcctaaccttgtaataaggatatataatcgttactataactgggctttggcagctcccatgatccttagcttgcaagtattccagaagagcttgcctaaggccacagttgagtcctgggtgaaagacaagatgccaaagaaatctggtcgctggtggttttggcgaaagagagaaagcatgaccaaacagctgccagaatccaaggagggaaaatctgaggcaccgccagccagtgacctgccatccagctccaaggagccggccggtgccaggccggccgagaatgactcctcgagtgacgagggatcacaggagctcgaagaatccatcacagtggaccccatccccacagagcccctgagccacggcagcacaacttcatataagaagtctctccgcctctcctcagaccagatcgcaaaactgaagctccacgatggcccaaatgatgttgtgtttagtattacaacccagtatcaaggcacctgtcgctgtgcagggaccatttacctgtggaactggaatgacaagatcatcatttctgatattgatgggacaataaccaagtcggatgctttgggacagattctcccacagctgggcaaagactggacccaccagggtatagcaaagctctaccattccatcaatgagaatggctacaagtttctgtactgctcggctcgtgccatcggcatggccgacatgacccgtggctacctgcactgggtcaatgacaagggcacaatcttgccccggggccccctgatgctgtcccccagcagcttgttctccgccttccacagagaagtgatagaaaagaaaccagagaagttcaaaattgagtgtctaaatgatatcaagaatctgtttgccccgtctaagcagcccttctatgctgcctttggaaaccgtccaaatgatgtctatgcctacacacaagttggagttccagactgtagaatattcaccgtgaaccccaagggtgaattaatacaagaaagaaccaaaggaaacaagtcatcgtatcacaggctgagtgagctcgtggagcatgtgttcccccttctcagtaaggagcagaattccgcttttccctgcccggagttcagctccttctgctactggcgagacccgatccctgaagtggacctggatgacctgtcttgaggcggcacctcagtgggtgggcagggcttggtccccctccccacagcaagggaaggcagctggctcttctgctgacctcagataccagccttccccagcggggacgggtgcttctggagctggtcccgccatcctcctttgccttcccaggccagctgctcaggctcggcaggtctgcagctcagctcctggaaggagaagggaggaactgggcctggggctggaggcctgggatccctcctttgtgggtcgcacacatgtttcctgctgtgagctggggcctccttccattgcatcattttaaaggaagaaaaaagcagctaaaaaagagtggaccaaaacactgcacacagtgaagtgttccagtttccactgggcagttgaggtggcttctgtaaccagggctgtcttcagatgtcagggtccctgaactgctgcgggcccagtcagtgatgctggctgaagctgcctgtgcacgtttcttctctggtcgcctcatttcctgctacactgaaggggtcagctgctccagtgggccaagttgggcaggacccccgcccctgcagggcccatgcaccagagccactgagcccagtcccataaacctggccctctttggggaaagatccccacagagcatcctcctctcatctgtgacaactccacgagcccttaatttcttagtcctcaccagaagaacaggtctcacaagtatatatttgatgtctgtaataaaagtgggaaggtgggtcttaaaacagaccaaaccccgccccgcccccaacaactctgcttttagggaggcctccgaaatgcagataggcggttgagtggggtcctgggaagagcgctgaatccctctgcttgctgcctggtgtgggcctttggaaagcatcttgccttgggacaggatttctaaaattctgtgattcagatttgtcagggaagcacagtgaagcttgcttaaaggcactggccagcagtgtgtgactttggcttttgggatcacaccctgtaatcgggcccgtggaagcagcgtcaaagaggggtcttggagctcctatggagcagactgccccccgagcagtgtccccagcctagccctgtgagaccccatggggacacgggtgcctatgtattttcactaaaatatacatggtagctccatttactgatgcggttgtaatgagctcacatcgtgtctgaagagatggcaccagggaaaggtgtgccataagctgctccagagcttttggtatgctgagtgttgacagagctgcactcttaacatcaagagaactgtcaggagcccagaaccaaccccaggtcttggtctccattggcgagaacacaggacgtggtggttcctgagcagagagggatctgcagatacaggcttggcgctcggggtggtctcgtggccaactcttcatgcccctgccgttgtagtggaacctctacatgttttagtttgcttcacctaaaataatgctgatctagagatagagaaataggggtggttatttttccagattggagagttgaaagtccctgactgatttcagccattttcctagtgcttgtcggatgcagagacaatgttgaaatcccctaaacacagttctcagtggcaaaacctaggaaggctcatgttcccagagaagggaccacatgagccttctcccatgcaaagcttcccccagcttaaatagttgataaggactaattgtttaatgagtttatttatctacagtaggttagggatcctgggttctgtttatatgaagttcttcccagtttgtgaattctagtacagcagccatgcagccaccttatttcatagatgccatctgtgtgtcctcttgactaccttctatttagaggaagaatgagagctttgtgtgtttaactgagcttatagtaggacttctttgcatatgtatggtactgaaaaatcttaatatacatctttaatcctttttaggttgtcctttaaagagtttttgactagtttctttttcttgacagctcttctctttggacacatgggccttcttagagggttcagtctaggacccggctctcctggccctgtgttgagggtagctggtccctctgtccctgtgtctgctagcactagactttgttgctgcagattgatccagtgggtacataggctaattaatgtgagtctttttccttgtttaaaggagtccctcttgctgaaagtagatgattactattgctgtagtgttaggaaagtattaagtttgtgctgaaaatccattgccatttggtacaaatgacatttgttctttctgtgaaagagatgccctcgagtgtgtttgtacacaaacccttaggatggtgagttgaagcatcaccctcgcgctatcttcagtgacgggtgacggctcagggagatggcaggcagattgggctctaagtcattattctctcagttactccattggtgaaatggccctttccctctttgcagttcagtctaagtctcgtatttgctttgctgtctgtgtgctgaagctcgtcccgtgtgagttgctgtctgccccttgtcaggctgtgaggtgctcgtgtagacctggagcatgcaggctgcctccgtttttgggtactgtgttgtgttttgctctgtctaaaaacatctgcatagttttcaactggaaaaagaaaaaacttaaaaatgggatgtcctaaaatgaaagctgctcaaagtcacagaacaaccgagggacaaaggagattggatgactgggaagcgctggcccggaacagcccctgcaactgtggggcctgcacacagcccttccacagttggcactgcaggtgcaggccaaccctttaaagaataaacaaggaagtcagctctttcactttttacaagttggcaaaaacagacttccggggaatttcgatgttttcccgtgttgtagagcttccagggtttaataaaactggttaaaaattgagtctttccctgaagtaagtgctctttccagatgaaaactactcttttggttttgtttgaaagtaagaaagggaggggaaactttgctcttttaataattatgttcagcctatgatgaagtatttgattattagacagcaatgtcactaataagttttaagttgtccaaagttaattgtaaacatcatcagtacagtactcttagttacagtaaagcaattgttgcaagatgaatggctaatattttggtgcagtgtttgatgttcaaaacaaaatgttacaacaataaacgaacataacataaactgaa

SEQ ID NO: 275594 - DNA, 936 bp, Artificial Sequence
  derived and/or modified sequence
agctgccggctcggccgccgcagccgcggcgtcccattcatgagggccgcccgactcagctgcggcccaggcggcttccaaggcagcggcggctgcgggcgctccgaccccgcgcgcgcccccgaccggccccgccccctcggcttccctccccggcgggtcctagccgtcgcagtccagccgccgcctgccctcagccgcccgctggccgggagcggagcccctgtggtctcaaaccatgaattatgtgggacagctggctgggcaggtgattgtcactgtgaaggaactctacaagggcattaaccaggccaccctctctgggtgcattgatgtcatcgtggtacagcagcaggatggcagctatcagtgttcaccttttcacgttcggtttggaaagctgggagtcctgagatccaaagagaaagtgattgatatagaaatcaacggcagtgcagtggatcttcacatgaagttgggtgataacggagaagctttctttgttgaggagactgaagaagaatatgaaaagcttcctgcttaccttgccacctcaccaattcctactgaagatcagttctttaaagatattgacacccctttggtgaaatcgggtggagatgaaacaccatctcagagttcagacatctcacacgtcttggaaacagagacaatttttactccaagttctgtgaaaaagaaaaaacgaaggagaaagaaatacaaacaggacagtaagaaggaagagcaggccgcatctgctgctgcagaagacacatgtgatgtaggcgtgagctccgatgatgacaagggggcccaggcagcacgaggatcttcaaatgcttccttgaaagaagaagaatgtaaagagcctttgctcttccattctggggatcattaccccttatctgatggagattggtcccctttagagac

SEQ ID NO: 275595 - DNA, 2004 bp, Artificial Sequence
  derived and/or modified sequence
atgaagatgatcaccacccagttcctgcagaagaagctgatcctgctgcagttcctgaagatcgccgagtggggcaccaccgtgggccaggtgtgcgccaccgacaaggacgagcccgacaccatgcacaccagactgaagtacagcatcatcggccaggtgccccccagccccaccctgttcagcatgcaccccaccaccggcgtgatcaccaccaccagcagccagctggacagagagctgatcgacaagtaccagctgaagatcaaggtgcaggacatggacggccagtacttcggcctgcagaccaccagcacctgcatcatcaacatcgacgacgtgaacgaccacctgcccaccttcaccagaaccagctacgtgaccagcgtggaggagaacaccgtggacgtggagatcctgagagtgaccgtggaggacaaggacctggtgaacaccgccaactggagagccaactacaccatcctgaagggcaacgagaacggcaacttcaagatcgtgaccgacgccaagaccaacgagggcgtgctgtgcgtggtgaagcccctgaactacgaggagaagcagcagatgatcctgcagatcggcgtggtgaacgaggcccccttcagcagagaggccagccccagaagcgccatgagcaccgccaccgtgaccgtgaacgtggaggaccaggacgagggccccgagtgcaacccccccatccagaccgtgagaatgaaggagaacgccgaggtgggcaccaccagcaacggctacaaggcctacgaccccgagaccagaagcagcagcggcatcagatacaagaagctgaccgaccccaccggctgggtgaccatcgacgagaacaccggcagcatcaaggtgttcagaagcctggacagagaggccgagaccatcaagaacggcatctacaacatcaccgtgctggccagcgaccagggcggcagaacctgcaccggcaccctgggcatcatcctgcaggacgtgaacgacaacagccccttcatccccaagaagaccgtgatcatctgcaagcccaccatgagcagcgccgagatcgtggccgtggaccccgacgagcccatccacggcccccccttcgacttcagcctggagagcagcaccagcgaggtgcagagaatgtggagactgaaggccatcaacgacaccgccgccagactgagctaccagaacgacccccccttcggcagctacgtggtgcccatcaccgtgagagacagactgggcatgagcagcgtgaccagcctggacgtgaccctgtgcgactgcatcaccgagaacgactgcacccacagagtggaccccagaatcggcggcggcggcgtgcagctgggcaagtgggccatcctggccatcctgctgggcatcgccctgctgttctgcatcctgttcaccctggtgtgcggcgccagcggcaccagcaagcagcccaaggtgatccccgacgacctggcccagcagaacctgatcgtgagcaacaccgaggcccccggcgacgacaaggtgtacagcgccaacggcttcaccacccagaccgtgggcgccagcgcccagggcgtgtgcggcaccgtgggcagcggcatcaagaacggcggccaggagaccatcgagatggtgaagggcggccaccagaccagcgagagctgcagaggcgccggccaccaccacaccctggacagctgcagaggcggccacaccgaggtggacaactgcagatacacctacagcgagtggcacagcttcacccagcccagactgggcgagaaggtgtacctgtgcaaccaggacgagaaccacaagcacgcccaggactacgtgctgacctacaactacgagggcagaggcagcgtggccggcagcgtgggctgctgcagcgagagacaggaggaggacggcctggagttcctggacaacctggagcccaagttcagaaccctggccgaggcctgcatgaagagatag

SEQ ID NO: 275596 - DNA, 3999 bp, Artificial Sequence
  derived and/or modified sequence
gcctcgggaacgtgcggctccctgtgcctcgggaacgtgcggctccctgtgcctcagcgcctgcccaggccacggaaaggggaaccgctgggcggccgggacggagagcgagtgtccttgggtgaaaaagggaactgctcgcctttctgggaattgtttactctgagagaagggcggggggaagtggcgggtgggggaggggatcttgaccctttgctcctgaggactgtcgaccggcgagccctagatcttaatatttgccagtgatgcctgcaaaaatgtgacattacatgttccctccaaactagatgccgagaaacttgttggtagagttaacctgaaagagtgctttacagctgcaaatctaattcattcaagtgatcctgacttccaaattttggaggatggttcagtctatacaacaaatactattctattgtcctcggagaagagaagttttaccatattactttccaacactgagaaccaagaaaagaagaaaatatttgtctttttggagcatcaaacaaaggtcctaaagaaaagacatactaaagaaaaagttctaaggcgcgccaagagaagatgggctccaattccttgttcgatgctagaaaactccttgggtccttttccacttttccttcaacaggttcaatctgacacggcccaaaactataccatatactattccataagaggtcctggagttgaccaagaacctcggaatttattttatgtggagagagacactggaaacttgtattgtactcgtcctgtagatcgtgagcagtatgaatcttttgagataattgcctttgcaacaactccagatgggtatactccagaacttccactgcccctaataatcaaaatagaggatgaaaatgataactacccaatttttacagaagaaacttatacttttacaatttttgaaaattgcagagtggggcactactgtgggacaagtgtgtgctactgacaaagatgagcctgacacgatgcacacacgcctgaagtactccatcattgggcaggtgccaccatcacccaccctattttctatgcatccaactacaggcgtgatcaccacaacatcatctcagctagacagagagttaattgacaagtaccagttgaaaataaaagtacaagacatggatggtcagtattttggtctacagacaacttcaacttgtatcattaacattgatgatgtaaatgaccacttgccaacatttactcgtacttcttatgtgacatcagtggaagaaaatacagttgatgtggaaatcttacgagttactgttgaggataaggacttagtgaatactgctaactggagagctaattataccattttaaagggcaatgaaaatggcaattttaaaattgtaacagatgccaaaaccaatgaaggagttctttgtgtagttaagcctttgaattatgaagaaaagcaacagatgatcttgcaaattggtgtagttaatgaagctccattttccagagaggctagtccaagatcagccatgagcacagcaacagttactgttaatgtagaagatcaggatgagggccctgagtgtaaccctccaatacagactgttcgcatgaaagaaaatgcagaagtgggaacaacaagcaatggatataaagcatatgacccagaaacaagaagtagcagtggcataaggtataagaaattaactgatccaacagggtgggtcaccattgatgaaaatacaggatcaatcaaagttttcagaagcctggatagagaggcagagaccatcaaaaatggcatatataatattacagtccttgcatcagaccaaggagggagaacatgtacggggacactgggcattatacttcaagacgtgaatgataacagcccattcatacctaaaaagacagtgatcatctgcaaacccaccatgtcatctgcggagattgttgcggttgatcctgatgagcctatccatggcccaccctttgactttagtctggagagttctacttcagaagtacagagaatgtggagactgaaagcaattaatgatacagcagcacgtctttcctatcagaatgatcctccatttggctcatatgtagtacctataacagtgagagatagacttggcatgtctagtgtcacttcattggatgttacactgtgtgactgcattaccgaaaatgactgcacacatcgtgtagatccaaggattggcggtggaggagtacaacttggaaagtgggccatccttgcaatattgttgggcatagcattgctcttttgcatcctgtttacgctggtctgtggggcttctgggacgtctaaacaaccaaaagtaattcctgatgatttagcccagcagaacctaattgtatcaaacacagaagctcctggagatgacaaagtgtattctgcgaatggcttcacaacccaaactgtgggcgcttctgctcagggagtttgtggcaccgtgggatcaggaatcaaaaacggaggtcaggagaccatcgaaatggtgaaaggaggacaccagacctcggaatcctgccggggggctggccaccatcacaccctggactcctgcaggggaggacacacggaggtggacaactgcagatacacttactcggagtggcacagttttactcagccccgtcttggtgaaaaagtgtatctgtgtaatcaagatgaaaatcacaagcatgcccaagactatgtcctgacatataactatgaaggaagaggatcggtggctgggtctgtaggttgttgcagtgaacgacaagaagaagatgggcttgaatttttggataatttggagcccaaatttaggacactagcagaagcatgcatgaagagatgagtgtgttctaataagtctctgaaagccagtggctttatgacttttaaaaaaaattacaaaccaagaattttttaaagcagaagatgctatttgtgggggtttttctctcattatttggatggaatctctttggtcaaatgcacatttacagagagacactataaacaagtacacaaatttttcaatttttacatatttttaaattacttatcttctatccaaggaggtctacagagaaattaaagtctgccttatttgttacatttgggtataatgacaacagccaatttatagtgcaataaaatgtaattaattcaagtccttattatagactatttgaagcacaacctaatggaaaattgtagagaccttgctttaacattatctccagttaattaagtgttcatgtggtgcttggaaactgttgttttcctgaacatctaaagtgtgtagactgcattcttgctattattttattcttgtaatgtgaccttttcactgtgcaaagggagatttctagccaggcattgactattacaatttcattttggtggagtttagttttaggttttattgtatataaaatcctgcactgaatctgtgtctcctctgttacctacttttgccagtgaaatttaagttttaaaatactttcagaatgtatttttactactgcaagtttttggtctttaaaatgtcaagtagcatctctctctttctctctgtctctttctgtttctctctccagttttttttttttttttaatttccatatgggctaaagaatccaaatattttaaaaatctgtctctcttttcttctctcataaagtgaattattccttttttttgttttatgtaagtgtatatattcttagtttttcttgaaatcattgtaatgttaactttgttgtttcaaatatcttggtgattgcttcattatctcttcaacaaaaaaaacctttaattttgccattgaaactgtagaactatgccatgcttttattagaagcagtgctctgtgttaacaacaagaatggtgtaattagaattgggatgtggatatttactgtatgacaacacatttacagttctgtaatgcaaggatgcagttt

SEQ ID NO: 275597 - DNA, 2004 bp, Artificial Sequence
  derived and/or modified sequence
atgaagatgatcacaacccagttcctgcagaaaaaactaatattgctccagttcctgaagatcgccgagtggggcaccacagtcggacaggtgtgcgccaccgacaaggatgagcccgatactatgcacacaaggctaaaatacagcattattggacaagttcctccgtcccctaccttatttagtatgcatccgactactggtgtcatcactactacttcttcacagctcgacagagagcttatcgataaataccagctaaagataaaagtccaggatatggacggacagtactttgggctgcagacaacaagcacttgcatcatcaacattgacgacgtgaacgatcatttgcctactttcacaagaacaagctacgtgacatccgtggaggagaatacagtggacgtagaaatattacgagtgactgttgaagataaggatcttgtgaatactgctaattggcgggccaattatacgatccttaagggcaatgagaacggaaattttaaaatagtaaccgatgcgaaaaccaacgagggcgtcctttgcgtggtcaaacccctcaattatgaggagaagcagcagatgatactccagataggtgtggtgaacgaggctccctttagccgggaggcttcgccgcggagtgccatgagtactgccaccgtcacagtgaatgtcgaggaccaggacgagggcccagagtgcaaccctcctattcagaccgttcggatgaaggaaaacgcagaagttggcacaaccagtaacgggtataaggcctacgatcccgagacacgtagttcgagcgggattagatataaaaagctgaccgaccccaccggatgggtaacaatagacgaaaacaccggatccatcaaagtttttcgctccttagacagagaggcagaaactattaagaatggtatctacaacataaccgtgctggcatccgatcagggagggaggacctgtacaggcacacttggcataattctgcaggacgttaatgacaacagtccatttatccccaagaagactgtaatcatctgcaagcccacaatgagcagcgccgaaatcgtggctgtcgaccccgacgaacccatccacgggcccccttttgatttttcactcgagtcttccacaagtgaggtccagaggatgtggcgactgaaagctattaacgacaccgctgctcgcctctcctaccagaacgaccccccctttgggtcatatgtcgttcctataactgtgagggatagattgggcatgtctagtgtgacttcactggatgtcaccctttgcgactgcattactgagaacgattgcacccacagggtcgacccccggatcgggggtggaggagtgcagctagggaagtgggccattctggccatcctgctgggaatcgcgctgttattttgtatccttttcacactggtttgtggcgcctcaggcaccagcaagcagcccaaggtaatacctgacgacctggctcagcaaaacctcatagtttccaatacagaggcaccaggagacgataaggtctattcggccaatgggttcacgacccagaccgtcggcgcctccgcccagggggtatgtggaactgtaggaagtggtattaagaatggtgggcaagagaccatcgaaatggtcaaagggggccaccagaccagtgagtcttgtcgaggcgcggggcaccatcacacactagattcatgtaggggtgggcacacagaggtggataactgccggtacacttatagtgaatggcatagcttcactcagccccgactcggagaaaaagtctatctgtgtaaccaagacgaaaaccacaagcacgcccaggactacgtgctgacctacaattatgaggggcggggctcagtcgcaggatctgttggatgctgttcagaacgccaagaggaggatgggctcgagtttttagataatctggaaccaaaatttaggacattggccgaggcttgtatgaagcggtag

SEQ ID NO: 275598 - DNA, 2004 bp, Artificial Sequence
  derived and/or modified sequence
atgaagatgatcaccacccagttcctgcagaagaagctgatcctgctgcagttcctgaagattgctgagtggggcaccaccgtgggccaggtgtgtgccacagacaaggatgagccagacaccatgcacacccggctgaagtacagcatcatcggccaggtgccccccagccccaccctcttctccatgcaccccaccactggagtcatcaccaccaccagcagccagctggaccgggagctgattgacaagtaccagctgaagatcaaggtgcaggacatggatggccagtacttcggcctgcagaccaccagcacctgcatcatcaacattgatgatgtgaatgaccacctgcccaccttcaccaggaccagctatgtgacctctgtggaggagaacacagtggatgtggagatcctgcgggtgacagtggaggacaaggacctggtgaacacagccaactggagggccaactacaccatcctgaagggaaatgaaaatggaaacttcaagatcgtgacagatgccaagaccaatgaaggagtgctgtgtgtggtgaagcccctgaactatgaggagaagcagcagatgatcctgcagattggagtggtgaatgaggcccccttcagccgggaggccagccccaggtctgccatgagcacagccaccgtgacagtgaatgtggaggaccaggatgagggccctgagtgcaacccccccatccagacagtgaggatgaaggaaaatgctgaggtgggcaccaccagcaatggctacaaggcctatgaccctgagaccaggagcagcagcggcatccgctacaagaagctgacagaccccaccggctgggtgaccattgatgagaacacaggcagcatcaaggtgttccgcagcctggaccgggaggccgagaccatcaagaatggcatctacaacatcaccgtgctggccagtgaccagggcggccgcacctgcaccggcaccctgggcatcatcctgcaggatgtgaatgacaacagccccttcatccccaagaagacagtcatcatctgcaagcccaccatgagcagcgctgagatcgtggccgtggaccctgatgagcccatccacggccccccatttgacttcagcctggagagcagcaccagcgaggtgcagaggatgtggaggctgaaggccatcaatgacacagctgcccggctgagctaccagaatgaccccccatttggcagctatgtggtgcccatcaccgtgcgggaccggctgggcatgagctctgtgaccagcctggatgtgaccctgtgtgactgcatcacagaaaatgactgcacccaccgggtggaccccagaattggaggcggcggcgtgcagctgggcaagtgggccatcctggccatcctgctgggcatcgccctgctcttctgcatcctcttcaccctggtgtgtggggccagcggcaccagcaagcagcccaaggtgatcccagatgacctggcccagcagaacctgattgtgagcaacacagaggcccctggagatgacaaggtgtacagcgccaacggcttcaccacccagacagtgggcgccagcgcccagggcgtgtgtggcaccgtgggcagcggcatcaagaatggaggccaggagaccatcgagatggtgaagggcggccaccagaccagcgagagctgccgcggggccggccaccaccacaccctggacagctgccggggcggccacacagaggtggacaactgccgctacacctacagcgagtggcacagcttcacccagccccggctgggggagaaggtgtacctgtgcaaccaggatgagaaccacaagcacgcccaggactatgtgctgacctacaactatgagggccggggctctgtggccggctctgtgggctgctgcagcgagcggcaggaggaggatggcctggagttcctggacaacctggagcccaagttccgcaccctggccgaggcctgcatgaagaggtag

SEQ ID NO: 275599 - DNA, 2004 bp, Artificial Sequence
  derived and/or modified sequence
atgaagatgatcaccacccagttcctgcagaagaagctgatcctgctccagtttctaaagattgcagaatgggggaccaccgtcggacaagtctgcgccactgacaaggatgaacctgacactatgcatactagacttaagtactctattataggtcaggtgcctccatcaccaactctgttttctatgcacccgaccacgggggttattaccacgacatcgagtcagttggacagggagctgatcgacaaataccagctgaaaattaaggtacaagatatggatgggcaatattttggattacaaactacttctacctgtatcatcaacatcgacgacgttaatgatcatcttcccacctttacacgtacatcctacgtaacgtcagtggaggagaatacagtggacgtggagattctgcgcgttacggtggaagacaaggacctggttaacaccgcgaattggagagccaattataccatcttgaaaggaaatgaaaatgggaacttcaagattgtgaccgacgcaaagactaacgagggagttctctgcgtagtaaagcctttaaactacgaagaaaagcagcagatgatcctgcaaattggggtggttaatgaggccccattctcccgcgaagctagccctaggtctgcaatgtctactgcaacggtcacagtgaatgttgaggatcaagacgagggcccagaatgcaatccaccgattcagaccgtacggatgaaggagaatgctgaggttggaactacatcaaacggatataaagcatacgatcctgaaacccggagctcaagcggtataagatacaagaaacttactgaccccactgggtgggtgaccatcgacgaaaacactggctctatcaaagtgttccgctcactggatagagaagcagaaactattaagaatggcatctacaacattactgtgttggcatcagaccagggtggtcggacctgtactggtaccctcggaatcatccttcaggatgttaacgataacagtcccttcatccctaagaagaccgtcatcatctgtaaaccaacgatgtccagcgccgaaatcgttgccgtggaccccgacgaaccaattcacgggccaccatttgatttcagcttggaaagttctacgtctgaggtgcagagaatgtggaggctaaaggccataaacgacacagcagcccgtctgagctatcaaaacgatcccccctttggcagttacgtggtgcctatcactgtacgcgatcgactggggatgagttcagtcacgtcacttgacgttacactctgcgactgtatcaccgagaacgactgtacgcacagagtggatcccaggatcggtggaggaggggtccagctgggtaaatgggcaatattggccatactgctgggcatcgcccttttgttctgtattctcttcaccctggtctgcggagcatcgggaaccagcaaacagcctaaagtgattcccgacgatttggcgcaacaaaacctcattgtgtctaacacagaggcccccggagacgacaaagtatactctgctaatggtttcacaacgcagaccgtgggcgcaagcgcccagggagtgtgcggaaccgttgggtcaggcataaaaaatggggggcaggaaactatcgaaatggttaagggcggccaccagacgagcgagagttgtcgcggcgcgggccatcatcatactttggattcgtgtcgcggtggtcacaccgaggtcgataattgtcgctatacttattcagaatggcattcattcactcagcctaggctgggagagaaggtctacctgtgcaaccaagatgagaaccacaaacatgcccaggactatgtcctgacgtataattatgaaggcaggggcagcgtcgccgggtctgtgggctgctgttccgagcggcaggaagaagacggcctagagttcctggacaacctggagcccaaatttcgaacgcttgcagaggcctgtatgaaaagatag

SEQ ID NO: 275600 - DNA, 2004 bp, Artificial Sequence
  derived and/or modified sequence
atgaagatgatcactacccagtttctccaaaagaagctaattctgctgcaatttctgaagattgccgagtgggggacgacagttggccaggtgtgcgccacagataaagatgaacccgacacaatgcataccagattgaagtattccatcatcggacaggtacccccatctcccacccttttctcaatgcacccaacaacaggagtcataacaactacctcttcccagctcgaccgtgagctgatcgacaagtaccagttgaaaatcaaggtccaggacatggacggccagtacttcggcctacagaccacatccacctgcatcatcaatatcgatgacgttaatgaccatctgcccacctttacacgcacatcatacgtgacgtcggttgaggagaatactgttgacgtcgagattctgcgggtaactgtggaagacaaagatctagtaaacacagccaactggcgcgcaaattatacaatcctgaagggaaatgaaaatggtaattttaaaattgtcaccgatgctaagacgaatgaaggggtactgtgcgtggtgaagccgctaaactatgaagagaaacagcagatgattttgcaaatcggcgtcgtaaatgaggcacccttctctcgggaggcctcacccagaagtgcaatgagtacagctactgtgaccgttaacgttgaagaccaagacgaggggcctgagtgtaacccgccaatccagacggtccgcatgaaggagaacgcagaggtggggaccacatcaaatggatataaagcctacgaccctgagacacgctcaagctctggcatccgatataaaaaattaaccgacccaacgggctgggtgaccatagacgagaataccggttccattaaggtgttccgatctttggacagggaagccgagactatcaagaacgggatttataacatcacagtcctcgcctccgaccaggggggacggacatgcactgggacgttgggaatcattctacaggacgtgaacgacaactctccattcatccccaaaaagactgtgatcatctgtaagccgaccatgtcctccgctgagattgtcgctgtagatcctgatgaacccatccacgggccaccattcgatttttctctggagagcagtaccagtgaagtgcaaagaatgtggaggcttaaggccattaatgacacggctgctaggctgagctaccaaaatgaccccccatttggctcttatgttgtgccaattaccgtgcgagataggttagggatgagctcggtcacctctctggatgtcaccctctgtgattgcatcacagagaacgactgtacgcatagggtggaccccagaattgggggaggaggagtgcagctgggtaagtgggcaattttagcgatactgctgggcatcgcacttctcttttgtatactattcacactcgtgtgtggcgctagtggaacctccaagcagcctaaggtcattcccgatgatctggcccagcagaaccttatcgtatcaaacacagaagctcccggtgacgataaagtatactctgccaatggcttcacaactcagacagttggtgcctccgcacaaggagtgtgtgggaccgttggaagcggaattaagaatggagggcaagagaccattgaaatggttaagggaggtcatcaaactagcgagagctgccgcggtgccggtcaccaccatacgctggattcgtgcaggggaggacatacagaggtggataactgtagatacacttacagtgagtggcatagctttacccagcccaggctgggcgagaaagtttacctttgcaaccaagatgagaatcacaaacatgcccaggattatgtattgacatacaactacgaagggcgaggctccgttgccggaagcgtgggctgttgtagcgagaggcaggaagaagatggccttgagttcctagataatcttgagcccaagtttcggactctggcagaggcatgtatgaagagatag

SEQ ID NO: 275601 - protein, 452 aa, Artificial Sequence
  derived and/or modified sequence
MFPDQPEKPLNLAHIVPPRPVTSMNDTLFSHSVPSSGSPFITRRLPEGISASSPVAEEHSLIKLYVNQLDHGARSPPKDSEVEQNKLLARAAPAFLKGKGIQYSLNVADRLADEHVLIGLYVNMLRNNPSCMLESSNRLDEEHRLIARYAARLAAESSSSQPPQQRSAPDISFTIDANKQQRQLIAELENKNREILQEIQRLRLEHEQASQPTPEKAQQNPTLLAELRLLRQRKDELEQRMSALQESRRELMVQLEGLMKLLKTQGAGSPRSSPSHTISRPIPMPIRSASACSTPTHTPQDSLTGVGGDVQEAFAQSSRRNLRNDLLVAADSITNTMSSLVKELNSEVGSETESNVDSEFARTQFEDLVPSPTSEKAFLAQIHARKPGYIHSGATTSTMRGDMVTEDADPYVQPEDENYENDSVRQLENELQMEEYLKQKLQDEAYQVSLQG

SEQ ID NO: 275602 - DNA, 1964 bp, Artificial Sequence
  derived and/or modified sequence
agagttaaagggaatatcaaggatggtggcagaattaaagggcaaacttaccttccatcccaggtctagtattcagtcccccttcctcccactctccaccctactgcgtgctcttacttattctgttggaacccagtgtagcttcctgagatttaaaatataggaagactcaaaactatgttacttcttggaatatagataattcagtactgatttaaataacaactgaatagcaaggaccttctggaacataatcttacattcacaaaatcacctgctaagaagctgactaatgcattaagcaagtccctgagctgtgcttccagccgtgaacctttgcaccccatgttcccagatcagcctgagaagccactcaacttggctcacatcgtgcctcccagacctgtaaccagcatgaacgacaccctgttctcccactctgttccctcctcaggaagtccttttattaccaggaggttacctgagggaataagtgcatccagccctgtggctgaagagcattccctcataaagctgtacgtaaatcagcttgatcacggtgcacgctctcctcccaaggacagtgaagtagagcagaacaaactgctggctagggctgctccagcttttctgaagggcaaagggatacagtacagcctgaatgtggcagacaggctagctgatgaacatgttctcatcgggttgtatgtcaacatgctccggaacaacccctcatgcatgcttgagagttcaaaccggcttgatgaagaacacaggctaattgccaggtatgcggcaaggctggcagcagagtcctcttcgtctcagccacctcagcagagaagtgctcctgacatctctttcaccatcgatgcgaataagcagcaaaggcagctgattgctgagctagaaaacaagaacagagaaatcttacaggagatccagagacttcggctagagcatgaacaagcttctcagcccacgccagagaaggcacagcaaaaccccaccctgctggcagaactccggctcctcagacagcgcaaagatgagctggaacagagaatgtctgctctccaggagagccggagagagctaatggtccagttggagggtctcatgaagctactaaagactcagggggcaggctctccccgctcctcccccagccacaccatcagcaggccaattcccatgcccatccggtcagcgtcagcctgctccaccccgacgcacacgccgcaggactccctcacaggagtagggggagatgtacaagaggcatttgcacaaagttcaagaagaaacttaaggaatgacttgctagtggctgcagattccatcactaacactatgtcctctcttgtgaaagagctgaattctgaggttgggagtgaaacagagagtaatgtggattctgaatttgcacggactcagtttgaggatcttgttccctcaccaacctctgaaaaggcttttctagcgcaaatccatgcccgaaaacctgggtacattcacagtggagctaccacaagtaccatgcgtggcgacatggttacggaggatgcagatccctatgtgcagcctgaagatgaaaactatgaaaatgactctgtccggcagctggagaatgagctccagatggaggaatacctgaaacagaagctgcaagatgaagcttatcaggtcagcttgcaaggttgaatgcaatatccttttatcacactcctctcaagcaagctatagtcagacagatgatgaaagtaacatgaaaactggtgatgatggagagccctgtggccacacagaggaggaagacagcagcctggcagcagcctcaccgaagagaggaaccaccacacccagcagctcctgacagacccccacccctaaagatgtgtcctgatgactatagtgcagctaactttttgttctcagatttgtagtgcataggtgtgtgtttc

SEQ ID NO: 275603 - protein, 395 aa, Artificial Sequence
  derived and/or modified sequence
MFPDQPEKPLNLAHIVPPRPVTSMNDTLFSHSVPSSGSPFITRRLPEGISASSPVAEEHSLIKLYVNQLDHGARMLESSNRLDEEHRLIARYAARLAAESSSSQPPQQRSAPDISFTIDANKQQRQLIAELENKNREILQEIQRLRLEHEQASQPTPEKAQQNPTLLAELRLLRQRKDELEQRMSALQESRRELMVQLEGLMKLLKTQGAGSPRSSPSHTISRPIPMPIRSASACSTPTHTPQDSLTGVGGDVQEAFAQSSRRNLRNDLLVAADSITNTMSSLVKELNSEVGSETESNVDSEFARTQFEDLVPSPTSEKAFLAQIHARKPGYIHSGATTSTMRGDMVTEDADPYVQPEDENYENDSVRQLENELQMEEYLKQKLQDEAYQVSLQG

SEQ ID NO: 275604 - DNA, 1626 bp, Artificial Sequence
  derived and/or modified sequence
gaatatcaaggatggtggcagaattaaagggcaaacttaccttccatcccaggtctagtattcagtcccccttcctcccactctccaccctactgcgtgctcttacttattctgttggaacccagtgtagcttcctgagatttaaaatataggaagactcaaaactatgttacttcttggaatatagataattcagtactgatttaaataacaactgaatagcaaggaccttctggaacataatcttacattcacaaaatcacctgctaagaagctgactaatgcattaagcaagtccctgagctgtgcttccagccgtgaacctttgcaccccatgttcccagatcagcctgagaagccactcaacttggctcacatcgtgcctcccagacctgtaaccagcatgaacgacaccctgttctcccactctgttccctcctcaggaagtccttttattaccaggaggttacctgagggaataagtgcatccagccctgtggctgaagagcattccctcataaagctgtacgtaaatcagcttgatcacggtgcacgcatgcttgagagttcaaaccggcttgatgaagaacacaggctaattgccaggtatgcggcaaggctggcagcagagtcctcttcgtctcagccacctcagcagagaagtgctcctgacatctctttcaccatcgatgcgaataagcagcaaaggcagctgattgctgagctagaaaacaagaacagagaaatcttacaggagatccagagacttcggctagagcatgaacaagcttctcagcccacgccagagaaggcacagcaaaaccccaccctgctggcagaactccggctcctcagacagcgcaaagatgagctggaacagagaatgtctgctctccaggagagccggagagagctaatggtccagttggagggtctcatgaagctactaaagactcagggggcaggctctccccgctcctcccccagccacaccatcagcaggccaattcccatgcccatccggtcagcgtcagcctgctccaccccgacgcacacgccgcaggactccctcacaggagtagggggagatgtacaagaggcatttgcacaaagttcaagaagaaacttaaggaatgacttgctagtggctgcagattccatcactaacactatgtcctctcttgtgaaagagctgaattctgaggttgggagtgaaacagagagtaatgtggattctgaatttgcacggactcagtttgaggatcttgttccctcaccaacctctgaaaaggcttttctagcgcaaatccatgcccgaaaacctgggtacattcacagtggagctaccacaagtaccatgcgtggcgacatggttacggaggatgcagatccctatgtgcagcctgaagatgaaaactatgaaaatgactctgtccggcagctggagaatgagctccagatggaggaatacctgaaacagaagctgcaagatgaagcttatcaggtcagcttgcaaggttgaatgcaatatccttttatcacactcctctcaagcaagctatagtcagacagatgatgaaagtaacatgaaaactggtgatgatggagagccctgtggccacacag

SEQ ID NO: 275605 - protein, 391 aa, Artificial Sequence
  derived and/or modified sequence
MFPDQPEKPLNLAHIVPPRPVTSMNDTLFSHSVPSSGSPFITRSSPPKDSEVEQNKLLARAAPAFLKGKGMLESSNRLDEEHRLIARYAARLAAESSSSQPPQQRSAPDISFTIDANKQQRQLIAELENKNREILQEIQRLRLEHEQASQPTPEKAQQNPTLLAELRLLRQRKDELEQRMSALQESRRELMVQLEGLMKLLKTQGAGSPRSSPSHTISRPIPMPIRSASACSTPTHTPQDSLTGVGGDVQEAFAQSSRRNLRNDLLVAADSITNTMSSLVKELNSEVGSETESNVDSEFARTQFEDLVPSPTSEKAFLAQIHARKPGYIHSGATTSTMRGDMVTEDADPYVQPEDENYENDSVRQLENELQMEEYLKQKLQDEAYQVSLQG

SEQ ID NO: 275606 - DNA, 6094 bp, Artificial Sequence
  derived and/or modified sequence
ggatttcatactcatagctctccctagaatttcagagagttctgttatgatctctgttgtaattaccaatttggttcaagtttgttctttaaatgaatatgcttagaattcacatatgttctggatgtactggaattaaaaggatttaagagatcatggtgtgcatgttctaggataaataggatttaccaatccttggatgaagtgcttgggaagtctttaagtgccataatcaactgccatttcaaagaatatagatggttttgaaaagttcatgctgtcccttcattgaattttagaatgattgaagatagtgggaaaagaggaaataccatggcagaaagaagacagctgtttgcagagatgagggctcaagatctggatcgcatccgactctccacctacagaacagcatgcaagcttaggtttgttcagaagaaatgcaatttgcacctggtggacatatggaatgtcatagaagcattgcgggaaaatgctctgaacaacctggacccaaacactgaactcaacgtgtcccgcttagaggctgtgctctccactattttttaccagctcaacaaacggatgccaaccactcaccaaatccatgtggagcagtccatcagcctcctccttaacttcctgcttgcagcgtttgatccggaaggccatggtaaaatttcagtatttgctgtcaaaatggctttagccacattgtgtggagggaagatcatggacaaattaagatatattttctcaatgatttctgactccagtggggtgatggtttatggacgatatgaccaattccttcgggaagttctcaaactacccacggcagtttttgaaggtccttcatttggttacacagaacagtcagccagatcctgtttctcccaacagaaaaaagtcacgttaaatggtttcttggacacgcttatgtcagatcctcccccgcagtgtctggtctggttgcctcttctgcatcgactagcaaatgtggaaaatgtcttccatccggttgagtgttcctactgccacagtgagagtatgatgggatttcgctaccgatgccaacagtgtcacaattaccagctctgtcaggactgcttctggaggggacatgccggtggttctcatagcaaccagcaccaaatgaaagagtacacgtcatggaaatcacctgctaagaagctgactaatgcattaagcaagtccctgagctgtgcttccagccgtgaacctttgcaccccatgttcccagatcagcctgagaagccactcaacttggctcacatcgtgcctcccagacctgtaaccagcatgaacgacaccctgttctcccactctgttccctcctcaggaagtccttttattaccaggagctctcctcccaaggacagtgaagtagagcagaacaaactgctggctagggctgctccagcttttctgaagggcaaaggcatgcttgagagttcaaaccggcttgatgaagaacacaggctaattgccaggtatgcggcaaggctggcagcagagtcctcttcgtctcagccacctcagcagagaagtgctcctgacatctctttcaccatcgatgcgaataagcagcaaaggcagctgattgctgagctagaaaacaagaacagagaaatcttacaggagatccagagacttcggctagagcatgaacaagcttctcagcccacgccagagaaggcacagcaaaaccccaccctgctggcagaactccggctcctcagacagcgcaaagatgagctggaacagagaatgtctgctctccaggagagccggagagagctaatggtccagttggagggtctcatgaagctactaaagactcagggggcaggctctccccgctcctcccccagccacaccatcagcaggccaattcccatgcccatccggtcagcgtcagcctgctccaccccgacgcacacgccgcaggactccctcacaggagtagggggagatgtacaagaggcatttgcacaaagttcaagaagaaacttaaggaatgacttgctagtggctgcagattccatcactaacactatgtcctctcttgtgaaagagctgaattctgaggttgggagtgaaacagagagtaatgtggattctgaatttgcacggactcagtttgaggatcttgttccctcaccaacctctgaaaaggcttttctagcgcaaatccatgcccgaaaacctgggtacattcacagtggagctaccacaagtaccatgcgtggcgacatggttacggaggatgcagatccctatgtgcagcctgaagatgaaaactatgaaaatgactctgtccggcagctggagaatgagctccagatggaggaatacctgaaacagaagctgcaagatgaagcttatcaggtcagcttgcaaggttgaatgcaatatccttttatcacactcctctcaagcaagctatagtcagacagatgatgaaagtaacatgaaaactggtgatgatggagagccctgtggccacacagaggaggaagacagcagcctggcagcagcctcaccgaagagaggaaccaccacacccagcagctcctgacagacccccacccctaaagatgtgtcctgatgactatagtgcagctaactttttgttctcagatttgtagtgcataggtgtgtgtttcaagaaggaaaaaaaaagacttctgttcaaagttaacttatcagctacatcctctgtaacgtggttcatccctggttaaaaagcaaacaaacacaggctgaaaacccatgctgctgttatacacaatggcagtattaacaagcattttaaacctttgcacatgatattgaacctgttcagtttacaatgacaatattaatactgtttatagctagaagtttgatttctgaattctttgagattttagcaaaacagtttattatacactgtacatttttttcacagcaattggaaaaaaacaaccacttgcaatcattcaataaccctgaagaatttggttcctgagtgtacaaactcagagcccggaagccaagaagggtccttggcctgcacggtctgtagttgactccaagtctctgtgagcagtgacttgaaccaaacacaccaggaataatccattctttggggcctctttccaactcgaggttgttttctttcaagatactctaatcagccatagaatttagtgtaaatatttttttttccaaatagatatcatattcaaaaaaggcagcattcaaattatatagaatctagtttttaaaatcagcacagatcttcttaaaaactgtgaactatgttttgaaatactcgttactaaagctgtttataaaccacaggtgccataagatccccaaacggactaaagttatctctgctcttccatggtcttgttcctctcgttttggctttaggaagcatgtctttaacagcaccgctcgttcacaagttcccccatcaagttgtttggaggccttcagctttaaatgtacaggcttaaagtgcgcttgcaaacgtttgctctcctttttttctgaatgttgattgccttagctggccacctggtgttctgcatgtagccttctgtggtcatgtgaaaggagacaggctcttctaagttgagttgggatttttgcactcagtgaaaagctgaagtgcaaaagagctatcaaagacaagaggataaaagactgggatagtcttttccaaggaccctctttagagggccctaaagacctcctttgggaattctggggaaaaagaaaaagtaatcttctacttgcttcaagatttgatttttttaaaaaagcctgcgacctattcaatacattatgcttaaattagcagtttctctggaattcctgtctctcctttaaaagaaaggagagaacattttagaacaatagttctcaaagtgtgttccccggacaagcagcatctgcaacacttaggaaggtcttcgaaatactaatttgtaagccccacctcaggcctactgaatcagaagctctgggggttgggtccagaagtctgttttagtcaaccctctaggtgattctgatgctcgctaaaggttgagaactactgctttagaatgaagtcgtataataaagtctctgaaaaggccttattcagaataagcaagaaaggttctgtgattcacttttgcttctggggctggcaaaaaccttctctgaacccacacaccaagttcgtagttggtaggtgcccagccaagtcctgacatcttcatgccccctctgcagagggcggctgtacgatgttcacatgtctgcgtttggtcagacatcatctccttggctgccctttgaaaccaaatcacttgccttggggataaagtgctcaattggcattagtgagaagcccatcctatcccttgacatacttaatcatatatctctccagagaactcacctgacaaatgtctctgagcacaggctgacaccaaagtggcacaactgcacagttctcagatttctttgcacagattgatttttattgcgggttttgttggggtgtcttaatgttcatctcttttccactgcccatcctctgtgaacccatacctctctagatggagcaggtggccactggtgcctcatactcagtattgaaaaccactacatcccagctacctataatgctgtcagctcaaaatcatagccaggtagttcttgaactcagaacttaaatcctgcacgtggcactccaccactgactggaccgagctggcatatgttgtttctttgtgtttctacatcaaaatgttcgtctaagatttgaactgttctgctgataaccttccccgttgtcatagctatttcattgccaaccaactccatcacatggttgttgatatcgtcatataaagccattgcaaggactctggaaactgccgccaatgaccaatttctgactaaccagccaccttttctctctcttagctccacgtcagcactgagaccagactcgagcacccctgtcctgtaagcgagacaaaatggcgtgtgttattttggggttttgtgttttttggtgggtttctttccttggctctccagatttacttttggggcctgttctaagtgcaaacccagcaagtttcacttgtcctgtccattagatacaactacatcttgcgggggttgtttctttcttgttccacaatgaattgcacatccatctccatcagagctgatagcctgttaataagcactggtctaacacagccaaccctcctccacagcgccatattaatggaggaggggaggaaggtgaaatctactgcatgggattcaggaaacagttgtggttggtcaggacggaagttggggtaagtttggttggtcagagggagttgtgctggagattgtgaaaaatgggttcttgaatgatctactataaggcagggaaggttcatttgtaagtagtaatgtgaactgaattgcattaagagtgtgtggcctttgttgtgatatactatgtattttcttatatgcatgagccaaactgttgcatcataatttagcactgatgtctgcttttattttgatcatctttgtccacccttattagttcttggctgttaaccgtagatagatcttgtaaatccagcaacctttggttgctgcattccccttggttcgattccacgcaaggagccacaagtgagaactccactgtccttagaagaaagggcatttttacttttgaaccaaaaagagaaaaaaaaatcagaagtgttgcatcttgaggcgaattaactgtaagacatttttaattatgactactgcaatttgacaccatttgaaataatcaattcagagacactaaagatttcacaatattcattggtattgtaaaaaaaaaatactattgtatggatttttgtattgctgttaagtattgttttgtgtgtgtgtgtgtgtgtgtgtgttggaacctcctggggacatgttatattttgaagtgattaaactatttaattgtgtgtctatattttggagtggaataatttcttcattaaaaaatgtttttaaaaac

SEQ ID NO: 275607 - DNA, 1787 bp, Artificial Sequence
  derived and/or modified sequence
ggaatatcaaggatggtggcagaattaaagggcaaacttaccttccatcccaggtctagtattcagtcccccttcctcccactctccaccctactgcgtgctcttacttattctgttggaacccagtgtagcttcctgagatttaaaatataggaagactcaaaactatgttacttcttggaatatagataattcagtactgatttaaataacaactgaatagcaaggaccttctggaacataatcttacattcacaaaatcacctgctaagaagctgactaatgcattaagcaagtccctgagctgtgcttccagccgtgaacctttgcaccccatgttcccagatcagcctgagaagccactcaacttggctcacatcgtgcctcccagacctgtaaccagcatgaacgacaccctgttctcccactctgttccctcctcaggaagtccttttattaccaggagctctcctcccaaggacagtgaagtagagcagaacaaactgctggctagggctgctccagcttttctgaagggcaaaggcatgcttgagagttcaaaccggcttgatgaagaacacaggctaattgccaggtatgcggcaaggctggcagcagagtcctcttcgtctcagccacctcagcagagaagtgctcctgacatctctttcaccatcgatgcgaataagcagcaaaggcagctgattgctgagctagaaaacaagaacagagaaatcttacaggagatccagagacttcggctagagcatgaacaagcttctcagcccacgccagagaaggcacagcaaaaccccaccctgctggcagaactccggctcctcagacagcgcaaagatgagctggaacagagaatgtctgctctccaggagagccggagagagctaatggtccagttggagggtctcatgaagctactaaagactcagggggcaggctctccccgctcctcccccagccacaccatcagcaggccaattcccatgcccatccggtcagcgtcagcctgctccaccccgacgcacacgccgcaggactccctcacaggagtagggggagatgtacaagaggcatttgcacaaagttcaagaagaaacttaaggaatgacttgctagtggctgcagattccatcactaacactatgtcctctcttgtgaaagagctgaattctgaggttgggagtgaaacagagagtaatgtggattctgaatttgcacggactcagtttgaggatcttgttccctcaccaacctctgaaaaggcttttctagcgcaaatccatgcccgaaaacctgggtacattcacagtggagctaccacaagtaccatgcgtggcgacatggttacggaggatgcagatccctatgtgcagcctgaagatgaaaactatgaaaatgactctgtccggcagctggagaatgagctccagatggaggaatacctgaaacagaagctgcaagatgaagcttatcaggtcagcttgcaaggttgaatgcaatatccttttatcacactcctctcaagcaagctatagtcagacagatgatgaaagtaacatgaaaactggtgatgatggagagccctgtggccacacagaggaggaagacagcagcctggcagcagcctcaccgaagagaggaaccaccacacccagcagctcctgacagacccccacccctaaagatgtgtcctgatgactatagtgcagctaactttttgttctcagatttgtagtgcataggtgtgtgtttcaagaaggaaaaaaaaa

SEQ ID NO: 275608 - protein, 559 aa, Artificial Sequence
  derived and/or modified sequence
MRKFAYCKVVLATSLIWVLLDMFLLLYFSECNKCDEKKERGLPAGDVLEPVQKPHEGPGEMGKPVVIPKEDQEKMKEMFKINQFNLMASEMIALNRSLPDVRLEGCKTKVYPDNLPTTSVVIVFHNEAWSTLLRTVHSVINRSPRHMIEEIVLVDDASERDFLKRPLESYVKKLKVPVHVIRMEQRSGLIRARLKGAAVSKGQVITFLDAHCECTVGWLEPLLARIKHDRRTVVCPIIDVISDDTFEYMAGSDMTYGGFNWKLNFRWYPVPQREMDRRKGDRTLPVRTPTMAGGLFSIDRDYFQEIGTYDAGMDIWGGENLEISFRIWQCGGTLEIVTCSHVGHVFRKATPYTFPGGTGQIINKNNRRLAEVWMDEFKNFFYIISPGVTKVDYGDISSRVGLRHKLQCKPFSWYLENIYPDSQIPRHYFSLGEIRNVETNQCLDNMARKENEKVGIFNCHGMGGNQVFSYTANKEIRTDDLCLDVSKLNGPVTMLKCHHLKGNQLWEYDPVKLTLQHVNSNQCLDKATEEDSQVPSIRDCNGSRSQQWLLRNVTLPEIF

SEQ ID NO: 275609 - protein, 499 aa, Artificial Sequence [sequence omitted]

SEQ ID NO: 275610 - DNA, 1680 bp, Artificial Sequence
  derived and/or modified sequence
atgagaaagttcgcctactgcaaggtggtgctggccaccagcctgatctgggtgctgctggacatgttcctgctgctgtacttcagcgagtgcaacaagtgcgacgagaagaaggagagaggcctgcccgccggcgacgtgctggagcccgtgcagaagccccacgagggccccggcgagatgggcaagcccgtggtgatccccaaggaggaccaggagaagatgaaggagatgttcaagatcaaccagttcaacctgatggccagcgagatgatcgccctgaacagaagcctgcccgacgtgagactggagggctgcaagaccaaggtgtaccccgacaacctgcccaccaccagcgtggtgatcgtgttccacaacgaggcctggagcaccctgctgagaaccgtgcacagcgtgatcaacagaagccccagacacatgatcgaggagatcgtgctggtggacgacgccagcgagagagacttcctgaagagacccctggagagctacgtgaagaagctgaaggtgcccgtgcacgtgatcagaatggagcagagaagcggcctgatcagagccagactgaagggcgccgccgtgagcaagggccaggtgatcaccttcctggacgcccactgcgagtgcaccgtgggctggctggagcccctgctggccagaatcaagcacgacagaagaaccgtggtgtgccccatcatcgacgtgatcagcgacgacaccttcgagtacatggccggcagcgacatgacctacggcggcttcaactggaagctgaacttcagatggtaccccgtgccccagagagagatggacagaagaaagggcgacagaaccctgcccgtgagaacccccaccatggccggcggcctgttcagcatcgacagagactacttccaggagatcggcacctacgacgccggcatggacatctggggcggcgagaacctggagatcagcttcagaatctggcagtgcggcggcaccctggagatcgtgacctgcagccacgtgggccacgtgttcagaaaggccaccccctacaccttccccggcggcaccggccagatcatcaacaagaacaacagaagactggccgaggtgtggatggacgagttcaagaacttcttctacatcatcagccccggcgtgaccaaggtggactacggcgacatcagcagcagagtgggcctgagacacaagctgcagtgcaagcccttcagctggtacctggagaacatctaccccgacagccagatccccagacactacttcagcctgggcgagatcagaaacgtggagaccaaccagtgcctggacaacatggccagaaaggagaacgagaaggtgggcatcttcaactgccacggcatgggcggcaaccaggtgttcagctacaccgccaacaaggagatcagaaccgacgacctgtgcctggacgtgagcaagctgaacggccccgtgaccatgctgaagtgccaccacctgaagggcaaccagctgtgggagtacgaccccgtgaagctgaccctgcagcacgtgaacagcaaccagtgcctggacaaggccaccgaggaggacagccaggtgcccagcatcagagactgcaacggcagcagaagccagcagtggctgctgagaaacgtgaccctgcccgagatcttctag

SEQ ID NO: 275611 - DNA, 1500 bp, Artificial Sequence
  derived and/or modified sequence
atgggcaagcccgtggtgatccccaaggaggaccaggagaagatgaaggagatgttcaagatcaaccagttcaacctgatggccagcgagatgatcgccctgaacagaagcctgcccgacgtgagactggagggctgcaagaccaaggtgtaccccgacaacctgcccaccaccagcgtggtgatcgtgttccacaacgaggcctggagcaccctgctgagaaccgtgcacagcgtgatcaacagaagccccagacacatgatcgaggagatcgtgctggtggacgacgccagcgagagagacttcctgaagagacccctggagagctacgtgaagaagctgaaggtgcccgtgcacgtgatcagaatggagcagagaagcggcctgatcagagccagactgaagggcgccgccgtgagcaagggccaggtgatcaccttcctggacgcccactgcgagtgcaccgtgggctggctggagcccctgctggccagaatcaagcacgacagaagaaccgtggtgtgccccatcatcgacgtgatcagcgacgacaccttcgagtacatggccggcagcgacatgacctacggcggcttcaactggaagctgaacttcagatggtaccccgtgccccagagagagatggacagaagaaagggcgacagaaccctgcccgtgagaacccccaccatggccggcggcctgttcagcatcgacagagactacttccaggagatcggcacctacgacgccggcatggacatctggggcggcgagaacctggagatcagcttcagaatctggcagtgcggcggcaccctggagatcgtgacctgcagccacgtgggccacgtgttcagaaaggccaccccctacaccttccccggcggcaccggccagatcatcaacaagaacaacagaagactggccgaggtgtggatggacgagttcaagaacttcttctacatcatcagccccggcgtgaccaaggtggactacggcgacatcagcagcagagtgggcctgagacacaagctgcagtgcaagcccttcagctggtacctggagaacatctaccccgacagccagatccccagacactacttcagcctgggcgagatcagaaacgtggagaccaaccagtgcctggacaacatggccagaaaggagaacgagaaggtgggcatcttcaactgccacggcatgggcggcaaccaggtgttcagctacaccgccaacaaggagatcagaaccgacgacctgtgcctggacgtgagcaagctgaacggccccgtgaccatgctgaagtgccaccacctgaagggcaaccagctgtgggagtacgaccccgtgaagctgaccctgcagcacgtgaacagcaaccagtgcctggacaaggccaccgaggaggacagccaggtgcccagcatcagagactgcaacggcagcagaagccagcagtggctgctgagaaacgtgaccctgcccgagatcttctag

SEQ ID NO: 275612 - DNA, 1680 bp, Artificial Sequence
  derived and/or modified sequence
atgcgaaagtttgcatattgcaaagttgtgctagccaccagtcttatttgggtgttgctcgacatgtttctactgctatattttagcgagtgtaataaatgtgatgaaaagaaagagagaggcctgcctgctggcgacgtactggaacccgtgcagaaaccccacgagggtccgggggaaatgggaaagcctgtggtgattccgaaagaagaccaagagaaaatgaaggagatgtttaaaatcaaccagttcaacctgatggccagcgaaatgatcgcgctgaataggtctctccctgatgttcgactcgaaggttgtaaaacaaaggtctaccccgataatttgcctacgacaagtgtggtgatcgtctttcacaacgaggcctggagtacacttctgagaactgtgcacagcgtgatcaaccgcagcccgcgacacatgatcgaggagatcgtcctcgtcgacgacgctagtgaacgagattttttgaaacggcccctggagtcatatgttaagaagctaaaggtaccggtacatgtgataaggatggagcagcgatctggattgatccgcgccagattgaaaggcgccgccgtgtccaagggccaagtgattacatttttagatgctcactgtgagtgtaccgtggggtggctcgaaccactgttggctcgtattaagcacgatcgaagaacagtcgtgtgccccattattgacgtgatttccgacgacaccttcgagtacatggctggttcagatatgacctacggcggttttaattggaaattgaattttcgctggtatccagtgcctcagcgagagatggaccggcgaaagggtgaccgcacactgcctgttaggactccaacaatggctggcgggctgtttagtattgatcgagactatttccaggagataggaacttacgatgctgggatggatatttggggcggtgagaaccttgaaatcagcttccgaatctggcagtgtggtggcacactcgagatcgtgacgtgctcccacgtgggccacgtttttcgtaaggccaccccgtatacctttcccggcgggaccggccagataatcaataagaataatcgtcggttggcagaagtctggatggacgagttcaaaaattttttctatataataagcccaggagtgacaaaggtcgactacggggacatttcgtcacgagtgggtctgcgccacaaactccagtgtaaaccattcagttggtatcttgagaatatataccctgatagtcaaatacctcgccattatttcagtctgggagagatccggaacgttgaaactaaccagtgccttgacaatatggcgagaaaggagaatgaaaaagtaggcattttcaattgccacggcatgggtggcaaccaggtgttcagttatactgcaaataaagaaataaggaccgacgatctgtgtttggacgttagcaagctgaacggtcccgttaccatgctcaagtgtcaccacctgaaggggaaccaattgtgggaatatgatcctgtgaaactaacattacaacatgtgaattccaatcaatgcctggacaaggcaactgaggaggattcccaggtcccatccattagggactgcaatggctcccggtcgcaacaatggttattacgtaacgttacactgcccgaaatcttttag

SEQ ID NO: 275613 - DNA, 1500 bp, Artificial Sequence
  derived and/or modified sequence
atggggaaacctgtggttatcccaaaggaggaccaagaaaagatgaaggagatgtttaaaattaatcagttcaatctcatggcttccgaaatgatcgctttgaaccgcagtctgccagacgtgcgcctcgagggatgtaagaccaaagtgtatcctgacaacctgccaacaacttcagtcgtgatagtttttcataatgaagcctggtcaaccctcctccggactgtccactcagtcatcaatcgatcaccccgccatatgattgaggagattgtcttggttgatgatgcttcagagcgggattttcttaagcgtcccctagagtcgtatgtcaaaaaactcaaggtgcccgtgcacgtgattagaatggaacaaaggagcggactgattagagcacgactcaagggggctgcagtcagcaaaggacaggtaatcaccttcctcgacgcacactgtgagtgtactgtgggttggctggaaccacttttggccagaataaagcatgaccgaagaacagtcgtgtgccctattatagacgtaatctccgacgacaccttcgaatacatggccggaagtgatatgacttacggcgggtttaactggaaactcaacttcaggtggtaccctgtgcctcagcgcgagatggaccgccgtaaaggggatcgaacactgcctgttcgtactcccactatggccggagggctgttttccatcgacagggattattttcaggaaatcggtacctacgatgcaggcatggacatatggggaggagaaaacttggagattagctttagaatctggcagtgtggaggcaccctggagattgtaacttgttctcatgttggccatgtgtttcggaaagccaccccgtacacattccccggaggtactggccagattattaacaagaacaaccggcgcctcgcagaggtgtggatggacgagttcaagaatttcttttatatcataagtccaggtgtgacgaaggtggactacggcgatatctcaagccgcgtcggactcagacacaagttacagtgtaagccttttagctggtaccttgaaaacatctatccagatagccaaattcccaggcactacttcagtcttggggagatccgtaatgtggagaccaatcagtgtctggataatatggcccgaaaggaaaatgagaaagtgggcatatttaactgtcacggaatgggaggtaatcaggtattctcttatacagcgaacaaggagatcaggacagatgatctgtgtctggatgtgagtaaattgaacggacctgttacaatgttgaaatgccatcatctcaaaggtaatcaactgtgggaatatgacccagtgaagctgacgctgcagcacgtaaactcaaatcagtgcctggacaaagcgactgaagaggatagccaggtccctagtatacgagattgcaacggctcaaggtcacagcagtggctcctgagaaatgtcactctaccggagatattttag

SEQ ID NO: 275614 - DNA, 1680 bp, Artificial Sequence
  derived and/or modified sequence
atgcggaaatttgcctactgtaaggtcgtgttagcaacatccctcatctgggtcttactggacatgtttttgctgctctatttttctgaatgtaacaaatgcgacgagaaaaaagagcgcggccttcccgctggtgatgtcttggagccagtccagaagccacacgagggtcccggggagatggggaagcctgttgtcattccaaaagaggatcaggaaaaaatgaaagagatgtttaagatcaatcaattcaatctgatggcctctgagatgatcgccctgaaccgatctctgcccgatgtgaggctcgagggctgtaagactaaggtctatcctgataacctcccgaccacatccgtggtgatcgtctttcataatgaggcatggtccaccttgctacggacagtgcactccgtgatcaatagaagcccaagacacatgatcgaggagattgtgttggtcgacgatgcctctgagagagatttcctgaaacggcccctcgagagttacgttaagaagctgaaggttccagtgcacgtgattcggatggagcagcggtctggccttatccgcgccaggcttaaaggcgcagcggtctcaaaagggcaagtgataacttttcttgacgcacattgcgaatgcaccgtcggctggcttgagcctctcctcgccagaatcaaacacgaccgtcgaaccgttgtatgcccgatcatcgacgtgatcagtgatgacaccttcgagtatatggccgggagtgacatgacctacggtggttttaattggaaactgaacttcaggtggtacccagtgccacaacgcgagatggatcgtagaaaaggtgaccggactttgcccgttcgaacaccgaccatggccggaggactattcagcatcgacagggactattttcaagagatcggcacatatgacgctggaatggatatctggggaggggagaatctagaaatatcgttccgcatctggcagtgtggtgggactttagaaattgtaacctgttctcacgtcggccacgtttttaggaaagccaccccttacacctttcccggcggaaccggccagatcataaacaaaaataataggcgactggccgaagtatggatggacgaattcaaaaacttcttttatattatctctcccggtgtgacaaaagttgactatggggacattagcagcagagtgggactgcggcataaactgcagtgcaaacccttctcttggtatctggagaacatttacccagactcacagattccaagacactacttttcccttggagagattcggaacgttgagactaaccagtgcctggacaatatggccagaaaagaaaatgagaaggttggaatttttaactgtcacggaatgggcggcaatcaagtgttctcctatactgctaataaggaaatccggaccgacgatctctgtctcgacgtcagtaaacttaacggaccagtcacgatgctgaagtgccaccacctgaagggcaaccagctctgggaatacgacccagtgaaactcaccctgcaacatgttaattccaaccagtgcttagataaggcgaccgaggaggactcacaggtgccctctatacgagactgtaacggatcacgcagccagcagtggctgctgcggaatgtcacgcttccggagatcttctag

SEQ ID NO: 275615 - DNA, 1680 bp, Artificial Sequence
  derived and/or modified sequence
atgaggaagtttgcctactgcaaggtggtgctggccaccagcctcatctgggtgctgctggacatgttcctgctgctgtacttcagcgagtgcaacaagtgtgatgagaagaaggagcggggcctgcctgctggagatgtgctggagcctgtgcagaagccccatgagggccctggagagatgggcaagcctgtggtgatccccaaggaggaccaggagaagatgaaggagatgttcaagatcaaccagttcaacctgatggccagcgagatgattgccctgaacagaagcctgcctgatgtgcggctggagggctgcaagaccaaggtgtacccagacaacctgcccaccacctctgtggtgattgtgttccacaatgaggcctggagcaccctgctgaggacagtgcacagcgtcatcaacagaagccccaggcacatgattgaggagatcgtgctggtggatgatgccagcgagcgggacttcctgaagaggcccctggagagctatgtgaagaagctgaaggtgcctgtgcacgtgatccgcatggagcagaggagcggcctcatccgggcccggctgaagggagctgctgtgtccaagggccaggtgatcaccttcctggatgcccactgtgaatgtactgtgggctggctggagcccctgctggcccgcatcaagcatgacagaagaacagtggtgtgccccatcattgatgtgatcagtgatgacacctttgagtacatggccggcagtgacatgacctacggcggcttcaactggaagctgaacttccgctggtaccctgtgccccagcgggagatggacagaagaaaaggagacaggaccctgcctgtgaggacccccaccatggccggcggcctcttcagcattgaccgggactacttccaggagatcggcacctatgatgctggcatggacatctggggcggggagaacctggagatctccttccgcatctggcagtgtggcggcaccctggagatcgtgacctgcagccacgtgggccacgtgttcaggaaggccaccccctacaccttccctgggggcaccggccagatcatcaacaagaacaacagaaggctggccgaggtgtggatggatgagttcaagaacttcttctacatcatcagccctggggtgaccaaggtggactatggagacatcagcagccgggtgggcctgcggcacaagctgcagtgcaagcccttctcctggtacctggagaacatctacccagacagccagatccccaggcactacttcagcctgggggagatcagaaatgtggagaccaaccagtgcctggacaacatggccaggaaagaaaatgagaaggtgggcatcttcaactgccacggcatgggcggcaaccaggtgttctcctacacagccaacaaggagatcagaacagatgacctgtgcctggatgtgtccaagctgaatggacctgtgaccatgctgaagtgccaccacctgaagggcaaccagctgtgggagtatgaccctgtgaagctgaccctgcagcacgtgaacagcaaccagtgcctggacaaggccacagaggaggacagccaggtgcccagcatccgggactgcaatggcagccgcagccagcagtggctgctgagaaatgtgaccctgcctgagatcttctag

SEQ ID NO: 275616 - DNA, 1500 bp, Artificial Sequence
  derived and/or modified sequence
atgggcaagcctgtggtgatccccaaggaggaccaggagaagatgaaggagatgttcaagatcaaccagttcaacctgatggccagcgagatgattgccctgaacagaagcctgcctgatgtgcggctggagggctgcaagaccaaggtgtacccagacaacctgcccaccacctctgtggtgattgtgttccacaatgaggcctggagcaccctgctgaggacagtgcacagcgtcatcaacagaagccccaggcacatgattgaggagatcgtgctggtggatgatgccagcgagcgggacttcctgaagaggcccctggagagctatgtgaagaagctgaaggtgcctgtgcacgtgatccgcatggagcagaggagcggcctcatccgggcccggctgaagggagctgctgtgtccaagggccaggtgatcaccttcctggatgcccactgtgaatgtactgtgggctggctggagcccctgctggcccgcatcaagcatgacagaagaacagtggtgtgccccatcattgatgtgatcagtgatgacacctttgagtacatggccggcagtgacatgacctacggcggcttcaactggaagctgaacttccgctggtaccctgtgccccagcgggagatggacagaagaaaaggagacaggaccctgcctgtgaggacccccaccatggccggcggcctcttcagcattgaccgggactacttccaggagatcggcacctatgatgctggcatggacatctggggcggggagaacctggagatctccttccgcatctggcagtgtggcggcaccctggagatcgtgacctgcagccacgtgggccacgtgttcaggaaggccaccccctacaccttccctgggggcaccggccagatcatcaacaagaacaacagaaggctggccgaggtgtggatggatgagttcaagaacttcttctacatcatcagccctggggtgaccaaggtggactatggagacatcagcagccgggtgggcctgcggcacaagctgcagtgcaagcccttctcctggtacctggagaacatctacccagacagccagatccccaggcactacttcagcctgggggagatcagaaatgtggagaccaaccagtgcctggacaacatggccaggaaagaaaatgagaaggtgggcatcttcaactgccacggcatgggcggcaaccaggtgttctcctacacagccaacaaggagatcagaacagatgacctgtgcctggatgtgtccaagctgaatggacctgtgaccatgctgaagtgccaccacctgaagggcaaccagctgtgggagtatgaccctgtgaagctgaccctgcagcacgtgaacagcaaccagtgcctggacaaggccacagaggaggacagccaggtgcccagcatccgggactgcaatggcagccgcagccagcagtggctgctgagaaatgtgaccctgcctgagatcttctag

SEQ ID NO: 275617 - DNA, 1680 bp, Artificial Sequence
  derived and/or modified sequence
atgcggaagttcgcctactgcaaggtggtgctggccaccagcctgatatgggtgttactggatatgtttttgctgctatatttcagcgaatgtaacaaatgcgacgagaaaaaggagcgcggactgcccgccggagatgtgttggagcccgtgcagaaacctcatgaagggccaggagaaatgggaaagcccgtggtgatccctaaggaggaccaggagaaaatgaaagagatgttcaagatcaaccagttcaatttgatggcatccgagatgattgctctaaacagatcactgccagatgtccggctggagggatgtaaaacgaaggtctatccagataaccttcctacaacatctgtggttatagtcttccacaacgaagcttggtctactctgctccgcaccgtgcactctgtaattaatcgctctccccgccatatgatcgaggagattgtcttggttgatgatgcttctgaaagagacttccttaagcggcccctggaatcttacgtcaaaaagctgaaggtcccggtccacgtaatcaggatggaacagcgctccgggttgattcgggccagactgaaaggggctgccgtcagcaagggccaggtgatcactttccttgacgcgcattgtgagtgtaccgtgggttggctggagcctctcctggccaggattaaacatgatcggcgtactgtggtttgtcccatcatagacgtgattagtgacgataccttcgagtatatggccggctctgacatgacttacggaggatttaactggaagttaaattttagatggtatccggttccgcagcgggagatggaccgcaggaaaggggatcggaccttgcctgtacggacccctacaatggcagggggtctcttctcaattgaccgggattacttccaggagattggcacatacgacgcaggtatggacatctggggaggggagaatttggagatctcttttcgcatttggcagtgcggtggcaccttggagatcgttacctgctcacatgttggacacgtattcaggaaagccaccccctatacattccctggcgggactgggcagataattaataagaacaaccgccgcttggccgaagtctggatggacgagttcaagaactttttctacattatctctccgggggttaccaaagtggactatggcgacatttcctcgcgggtgggacttagacacaagctgcagtgtaaacccttctcatggtacctggagaatatttatccggatagtcaaatacccaggcactacttttccttaggggagatcagaaacgtggaaacgaaccagtgcctggataatatggctcgaaaagaaaatgagaaggtggggatatttaactgtcatggtatgggtggtaatcaggtgttctcatatactgccaacaaggagatcaggaccgatgatctgtgcctggacgtgtcgaaattgaacggccctgtaactatgttgaagtgtcatcacctgaagggcaatcagctatgggagtatgatccagtgaagctgaccttgcagcatgttaattctaaccagtgcctggacaaagccacagaagaggatagtcaggttcctagtatcagagactgcaacggatccaggagtcagcagtggcttctgcgaaatgttaccctgccggagatcttttag

SEQ ID NO: 275618 - DNA, 1500 bp, Artificial Sequence
  derived and/or modified sequence
atgggcaagcccgtggtgatccccaaggaggaccaggagaagatgaaggaaatgttcaagatcaaccagttcaatctcatggcctcggaaatgattgctctgaatagatccctgcctgacgtgcggctcgagggctgcaagacgaaagtgtaccccgacaacctacccacgaccagcgtcgtcatcgtgttccacaatgaagcctggtcaactttgctccggaccgtccacagcgttatcaaccggtcccctagacatatgatagaagagatcgtactggtagatgatgccagcgaaagagactttctgaagaggcccctcgaatcatacgtgaagaaacttaaggtgcccgtgcacgtgatccgcatggagcaacgctcaggattgattcgggcccggttgaagggggctgctgtcagcaaaggacaggtcatcaccttcctggacgcccactgcgaatgcactgttggttggctggaacctctgcttgcaagaataaagcacgaccgcaggacggtcgtgtgtccgatcatcgatgtgataagcgatgacaccttcgagtacatggcaggctcagatatgacctatggagggttcaactggaagttaaactttcggtggtatccagtaccacagcgtgaaatggacaggcggaagggcgatcggaccctgcctgttcggactccgacaatggctgggggcttgttttctatagatagggactatttccaggagatcgggacttacgatgccgggatggacatatggggcggcgagaacctggagatttccttcaggatttggcagtgtgggggtacgttagagatcgtgacttgctcacacgtgggccacgtgtttcgcaaggcaacgccctatactttccctgggggcacaggtcagattataaataaaaacaaccgcagacttgccgaggtgtggatggacgagtttaagaactttttttatataatctcccctggtgtcactaaagtggattatggagatatatcctctagggtaggccttagacacaaactgcagtgcaagcctttctcatggtacctggagaatatctacccggattcccaaataccccgacactacttttctctgggggaaatacgtaacgttgaaacaaatcagtgtctggacaacatggccaggaaagaaaatgaaaaggtcgggatctttaactgccacggaatgggagggaatcaggtcttttcctataccgccaacaaagagatcagaactgatgacctctgtctcgacgtcagcaaacttaacggacctgtgacaatgttgaaatgtcatcacttgaaaggtaatcaattatgggaatacgaccccgtgaaactgactctgcagcatgtaaatagcaaccagtgtttggacaaagctactgaagaggattcacaggtgccaagtataagggactgtaatggtagccgatctcagcagtggttacttcggaacgttacactcccagagattttttag

SEQ ID NO: 275619 - DNA, 1680 bp, Artificial Sequence
  derived and/or modified sequence
atgcggaagttcgcctactgcaaggtggtgctggccaccagcctgatttgggttctgctggatatgttcctattattgtatttcagcgagtgcaataagtgcgacgagaagaaggaacgtgggctccccgcgggcgatgtgcttgaaccagtgcagaaaccccacgagggtcctggcgagatggggaaaccggtggtcatcccgaaagaggaccaggaaaaaatgaaggagatgttcaaaattaaccaattcaaccttatggcgtccgaaatgattgcgttaaatagatctctgccagacgtccgtctggagggctgcaagacgaaggtctaccctgataacctgcccactacctctgtcgtgatagtatttcacaatgaggcctggtctaccctgttgcgcacagttcattctgtgattaaccggtccccgaggcacatgatcgaggaaatcgttctcgtcgatgacgctagcgagcgcgattttctaaaacgccctctggagtcatacgtgaagaaactcaaagtgccggtgcatgtgatcagaatggagcagcgaagcggattgattcgggcacggctcaaaggtgcggcggtgagcaagggccaggttataaccttcctggacgctcattgtgagtgtacagtggggtggctggagcctttactagcacgtataaagcacgacaggcgcactgtagtttgccccattattgacgtgatatccgacgatacctttgagtatatggccgggtccgacatgacatacggtggcttcaactggaaactgaatttccgctggtatccggtgccgcaaagggagatggaccgaaggaaaggtgacaggacactacccgtccggaccccaaccatggctggaggcttgttttccatagaccgagactacttccaggagatcggcacttacgacgcaggtatggacatctgggggggcgagaatctggagatcagcttcaggatctggcaatgtggcggaaccctggaaattgtgacatgttcccacgttggccatgtgttccgcaaggccacaccttatacatttcctggcggtacaggtcagatcattaataagaataatcgtcggctggctgaggtgtggatggacgaatttaagaatttcttctatatcattagccctggggtcactaaggtggactatggagatattagtagccgggtcggtctgcgccacaaactgcagtgtaaacctttctcctggtatttggaaaatatctatcctgacagccagattccacgccattattttagtctaggtgagattaggaacgttgaaaccaatcagtgtctggataatatggctcgcaaggagaatgagaaagtagggatctttaactgtcacgggatgggagggaatcaggttttttcctacaccgccaacaaagaaatcagaaccgatgacttatgcttggacgtctctaagctgaacgggcccgtgacaatgctgaaatgccaccacttgaagggaaaccagctgtgggaatacgatcctgttaaactgaccctgcagcatgtcaattccaaccagtgccttgacaaggcaaccgaggaagatagccaggttccgagcatccgggactgcaacgggtctcgatcacagcagtggctgcttagaaatgtaacactccctgaaatcttttag

SEQ ID NO: 275620 - DNA, 1680 bp, Artificial Sequence
  derived and/or modified sequence
atgcgtaaatttgcgtactgcaaggtggttctcgccacctctctgatttgggtgctactcgacatgtttctgcttctctacttttctgagtgcaataagtgcgacgagaaaaaggagaggggactgccagccggagatgtgctggagcccgtccagaagcctcatgagggccctggggaaatgggaaagcccgtcgtgataccgaaggaggaccaggaaaagatgaaagagatgtttaaaatcaaccagttcaatcttatggcctccgagatgatagcgttgaatcgcagcctgcccgatgtccggttagaaggctgcaaaaccaaggtgtatccggacaatctccccactacctccgtggtgatcgtgttccataatgaagcctggagtactctgctccgtacagttcactctgtcataaaccggtctcctcgccatatgattgaggaaattgtgctggtggacgatgcatcagaacgggactttctcaaacgcccattggagagctatgttaagaaattgaaggtgcctgtgcacgtgattaggatggaacaacgttctgggttaatccgcgctagattgaaaggggctgccgtgagtaaaggccaggtaataaccttcctggacgctcactgcgagtgtaccgtaggctggctagaaccactcctcgcccgaatcaagcatgaccgacgcacagtcgtgtgccctattatcgacgtgatcagcgatgatacattcgaatacatggccggttccgacatgacatacggaggctttaactggaaattaaatttcagatggtacccggtgccgcagcgtgagatggaccggaggaaaggtgatcgtacgctgccagtacgaactccaacaatggctggcggacttttttccattgatagggactatttccaggagatagggacgtatgatgccggaatggatatttgggggggagaaaacttagaaatctctttccggatctggcaatgcgggggaaccttagaaattgtgacgtgtagccatgttggtcatgtgttcaggaaagctactccatatacttttcctgggggaactggccaaatcattaacaagaataacagaagacttgctgaagtgtggatggacgagttcaagaactttttctacatcatctcacccggtgtgacaaaggttgactacggagatatttccagtagagtgggcttgaggcacaaactccaatgcaagcctttcagctggtatctggagaatatatacccagattcccagataccacgtcattatttttcactgggtgagataagaaacgttgagaccaaccagtgtctggataacatggctagaaaggagaatgagaaagtggggatcttcaattgtcacggcatggggggaaaccaagtatttagctatactgccaacaaagagatacggacagacgacttgtgcctggacgtctctaagctaaatgggccagtgaccatgcttaagtgccaccatttaaagggaaaccaattgtgggaatatgacccagttaaacttacccttcaacacgtgaacagcaatcagtgcttggacaaggcaactgaggaggactcccaggtccccagcattcgcgattgtaacggaagtcgttcccaacagtggctgctgcgcaatgttacactccctgaaatcttttag

SEQ ID NO: 275621 - DNA, 1500 bp, Artificial Sequence
  derived and/or modified sequence
atgggcaagcctgtggtaatccccaaagaagaccaggagaagatgaaggaaatgttcaagatcaatcaattcaatctgatggcttctgaaatgatagccctaaataggagcttacctgacgtgagactggagggatgtaagaccaaagtgtatcctgacaatttgcctacaacgtctgtagtgatagtgttccacaatgaggcctggagcacgctactgcgcacagtccactctgtcatcaatcgctcaccacggcatatgattgaagagatcgtcctggtcgacgatgcgtcggagcgggatttcttgaagagaccactggagtcatacgtcaagaaattgaaagttcctgtacacgtcatacgtatggagcagagaagcggattaattcgagccaggctaaagggagcggctgtgtccaagggtcaagtaatcacctttcttgatgctcattgtgagtgcacagtgggatggttagagcctctgctagcacggatcaagcacgataggaggacggtcgtgtgccctatcatagatgtgatttccgacgacactttcgagtacatggctggcagcgatatgacatacgggggattcaattggaaactgaatttcagatggtatcctgtgcctcagcgagagatggacaggcggaagggagataggactcttccggtaagaacccctacaatggccggaggcctgttttctatcgatagggactatttccaggagattgggacatatgacgcaggcatggacatttgggggggtgagaatttggagatctcctttcggatatggcagtgtggaggtacgctagagatagtcacatgttcgcacgttggccatgtgttccggaaagccacgccatatacttttcccggtgggactgggcaaattatcaacaagaacaacaggaggctggcagaggtctggatggatgaatttaaaaacttcttttacatcatctcacccggtgtaacaaaagtagactatggcgacatctcctcacgcgtgggactccgacacaagctccagtgtaaaccattcagctggtatctggaaaatatctatcccgattcacagattccaagacattacttcagcctgggtgagattcgcaatgtggaaacgaatcagtgcctcgacaatatggcccgaaaagagaacgagaaggtcgggatctttaattgtcatggtatgggcggaaaccaagtcttttcctacaccgctaataaggagatccgtaccgatgatctctgcctcgatgtatccaaattgaatggtcccgtcactatgctgaaatgccatcacctgaaagggaaccagctctgggagtacgatcctgtcaagctgactctgcagcacgttaattccaatcaatgcctggataaagcaactgaggaggattcccaggtcccatcaatcagagattgtaacggctcccgatcccaacaatggctgctgcggaatgtcacactgcccgagatattctag

SEQ ID NO: 275622 - DNA, 1680 bp, Artificial Sequence
  derived and/or modified sequence
atgcggaagtttgcttattgcaaagtcgttctcgctacctccttaatttgggttttactggacatgttcctcttgctgtattttagtgaatgtaacaagtgcgatgagaaaaaggagagaggtctgccagcaggagatgttttggaaccagtccagaaaccgcacgaagggcctggggagatgggaaagcccgtcgttatcccaaaggaagatcaagaaaagatgaaagaaatgtttaaaattaatcaattcaacctcatggcatctgagatgattgccctgaatcggtccttgccggacgtgagactcgaaggttgtaagacaaaagtgtacccagacaatctaccgactacctctgtggttatcgttttccacaatgaagcttggtccaccctcctgcggactgtgcacagtgtgataaatcgctcaccacgtcacatgatcgaagagatcgttctcgtcgatgacgcctccgagcgagacttcctgaaaaggccactcgagagctacgtgaaaaagttgaaagttcctgtccatgttattaggatggaacagaggagtggcttgatccgtgcgagactaaagggggcagccgtgtctaaaggacaggtcatcaccttccttgatgcccattgcgaatgcaccgttggctggctggagcctctcctggctcgaattaaacacgaccgcagaaccgtggtttgccccattatcgacgtcatcagtgacgataccttcgagtacatggccggttctgacatgacctacggcggattcaactggaagctgaacttcagatggtaccctgttccccagcgtgagatggacagacgtaaaggcgaccgcaccctgcccgttagaacgcctacaatggcaggcggtctgttctccatcgatcgtgactactttcaggaaatcggcacttatgacgcgggtatggacatctgggggggtgagaatctggaaatttcctttaggatctggcagtgcggcggtactctcgagatcgtgacgtgcagtcacgtcggtcacgtcttccggaaggctaccccctacacgttccccggaggcaccggacaaatcattaataaaaataatagacgattggccgaggtatggatggatgagtttaagaattttttttatattatatctcccggtgtcactaaagtggattatggcgatattagtagcagagtagggctccggcacaagctacagtgcaaacccttttcttggtaccttgagaacatctatccagactcccagattcctcgacactattttagcctcggtgagatacgaaatgtcgaaacaaaccagtgtttagacaacatggccagaaaagagaacgaaaaggtgggaatctttaactgccacggaatgggtggcaatcaagttttttcctacaccgctaataaagaaatccgcactgatgacctctgcctcgacgtcagtaagctgaacggccctgtcactatgctcaaatgccatcacctcaagggtaaccagctctgggaatatgaccccgtgaagttaacgctccagcatgtcaatagcaatcagtgtctggacaaggctacagaggaagacagtcaggttccatcaatccgcgactgtaacggaagccgatcccagcagtggctcctgcgtaacgtcacactccccgagatcttctag

SEQ ID NO: 275623 - DNA, 3847 bp, Artificial Sequence
  derived and/or modified sequence
ggtatgaacgtgatttctgatgaaactggattggaataattttcatgatctttgtatatttatatatatatatttttaaattttgcatttgacttaaagtgccatgagaaaatttgcatactgcaaggtggtcctagccacctccttgatttgggtactcttggatatgttcctgctgctttacttcagtgaatgcaacaaatgtgatgaaaaaaaggagagaggacttcctgctggagatgttctagagccagtacaaaagcctcatgaaggtcctggagaaatggggaaaccagtcgtcattcctaaagaggatcaagaaaagatgaaagagatgtttaaaatcaatcagttcaatttaatggcaagtgagatgattgcactcaacagatctttaccagatgttaggttagaagggtgtaaaacaaaggtgtatccagataatcttcctacaacaagtgtggtgattgttttccacaatgaggcttggagcacacttctgcgaactgtccatagtgtcattaatcgctcaccaagacacatgatagaagaaattgttctagtagatgatgccagtgaaagagactttttgaaaaggcctttagagagttatgtgaaaaaactaaaagtaccagttcatgtaattcgaatggaacaacgttctggattgatcagagctagattaaaaggagctgctgtgtctaaaggccaagtgatcaccttcctggatgcccattgtgagtgtacagtgggatggctggagcctctcttggccaggatcaaacatgacaggagaacagtggtgtgtcccatcatcgatgtgatcagtgatgatacttttgagtacatggcaggctctgatatgacctatggtgggttcaactggaagctcaattttcgctggtatcctgttccccaaagagaaatggacagaaggaaaggtgatcggactcttcctgtcaggacacctaccatggcaggaggccttttttcaatagacagagattactttcaggaaattggaacatatgatgctggaatggatatttggggaggagaaaacctagaaatttcctttaggatttggcagtgtggaggaactttggaaattgttacatgctcacatgttggacatgtgtttcggaaagctacaccttacacgtttccaggaggcacagggcagattatcaataaaaataacagacgacttgcagaagtgtggatggatgaattcaagaatttcttctatataatttctccaggtgttacaaaggtagattatggagatatatcgtcaagagttggtctaagacacaaactacaatgcaaacctttttcctggtacctagagaatatatatcctgattctcaaattccacgtcactatttctcattgggagagatacgaaatgtggaaacgaatcagtgtctagataacatggctagaaaagagaatgaaaaagttggaatttttaattgccatggtatggggggtaatcaggttttctcttatactgccaacaaagaaattagaacagatgacctttgcttggatgtttccaaacttaatggcccagttacaatgctcaaatgccaccacctaaaaggcaaccaactctgggagtatgacccagtgaaattaaccctgcagcatgtgaacagtaatcagtgcctggataaagccacagaagaggatagccaggtgcccagcattagagactgcaatggaagtcggtcccagcagtggcttcttcgaaacgtcaccctgccagaaatattctgagaccaaatttacaaaaaaacgaaaaaaataaggattgactgggctacctcagcatacatttctgccacattcttaagtagcaaaaaaggaaaagtgctttcctcctctgcaggatgtaaggtttatcagccattaaaacttagacttctctagcttttcactagctgtgaaccagccttcctgtccatggacgtgaaactgcatagtaatgagactgtgcacactgatgtttacaagattgaaagagtctttctccgaaaatcatggtaaagaatactgagacaatgaaaaaaaatcaacaaaatatgctttctggagaactgtaccttttatggtttgcttgcacatcagtagtttctgctgaacgtgctgtcataatgaagagatttccaagattttttttcctgattagaactggtagccagtatattaaatattgatataaaaataaaagaactggaaccagattcagaatcatgaaaacaacatttttacaacaacaaaaaaactatattaaacagggtttaaaggaaattaaaacagaactatgagaagtacaatttgttatagtatagtatcaaatttctatatagattttatacctcagtggggaaaaataactgattccaatgacattcattttgttttcatctgtgatagtcatggatgcttttattttccttggggtgctgaaattgagctgaaaaaaaaaggctctttgaatatagttttaatttctctctacagttttttttgtttggtttgtgggctgttggaattgtaatttttaattgccttctaaaaaatggaaatttaacaatgtctgatctcagctgaacaaattagatgtttcagttgctcttgggtcaactggcttacagatttacatgtgcacacacacacaaatttcttatcacattttcgacttcttcacttgacctaactgattatgcgaaatacccaagattcatgctactgtaccacagatttgttttcacagcaataaatcttcagttctttgtttatgattccacttaacaaaaggcctgcagaagtgatttattatttgggtatttggagataatacatttgatggttttttggaaaacctttttcactccatactcagatatgcttcattgtcaaatgcatatttagattagattattgaattgtaatgtttatctgctgctttttttaaataaaatttgactgaaaatgtttaattggcattttttaatgacttagccaaagaagtgcagctattattccatattaataggcttgcatttcttttcctaaatcttatttaggctaaatcagttttatttttctctgattttttttaataccacagaatcacctgagtgtcaattgaaagttgtcaattaaaaggtaaccttttaatctcgtaggaggaatctcattaagacatttttcctgatatgtagagcagtctgttggcaaaaatgcatatattttctttcatatttgtaaaattatatttaatggaattcttttctttgattatcaaggactttcactgcaggcagtgctatttcttgtgcctaagaatgtttccaaaagtcgcatcgctaatgatatttgccaagttgagtgtacacaaagtttctcatatcctgttcaagttaatcaacatcaagcacatggggatgctttagggtgagtctatagtacaaaatgcataaaccatgtccccaggaaatttgaaaggaagcaggtgctgaatggaatttttttccttttccatgagctgtgttaattctatctccagtaggcctaatgcttgaataagcaagatgtctaatcaataaattattttcatgctcagaatttcaggtttttgtactccagcatagcttggtcttatttcttactgtatgaaagcttaacagcaatgtgatttaaggttttgttttaaatgggagatgtaagtgatttaattcatgggtacttttagaacctgatagataatcccattgcctttatttttctaattaaagaattcctaaatactttgaaaatacaaaatattcctgaata

SEQ ID NO: 275624 - DNA, 1770 bp, Artificial Sequence
  derived and/or modified sequence
aagtgccatgagaaaatttgcatactgcaaggtggtcctagccacctccttgatttgggtactcttggatatgttcctgctgctttacttcagtgaatgcaacaaatgtgatgaaaaaaaggagagaggacttcctgctggagatgcgcaggtaaattgaacatgaaattggaaattgacaaggatgttgaagtagcagaaagttaccagtgagttaagttctagagccagtacaaaagcctcatgaaggtcctggagaaatggggaaaccagtcgtcattcctaaagaggatcaagaaaagatgaaagagatgtttaaaatcaatcagttcaatttaatggcaagtgagatgattgcactcaacagatctttaccagatgttaggttagaagggtgtaaaacaaaggtgtatccagataatcttcctacaacaagtgtggtgattgttttccacaatgaggcttggagcacacttctgcgaactgtccatagtgtcattaatcgctcaccaagacacatgatagaagaaattgttctagtagatgatgccagtgaaagagactttttgaaaaggcctttagagagttatgtgaaaaaactaaaagtaccagttcatgtaattcgaatggaacaacgttctggattgatcagagctagattaaaaggagctgctgtgtctaaaggccaagtgatcaccttcctggatgcccattgtgagtgtacagtgggatggctggagcctctcttggccaggatcaaacatgacaggagaacagtggtgtgtcccatcatcgatgtgatcagtgatgatacttttgagtacatggcaggctctgatatgacctatggtgggttcaactggaagctcaattttcgctggtatcctgttccccaaagagaaatggacagaaggaaaggtgatcggactcttcctgtcaggacacctaccatggcaggaggccttttttcaatagacagagattactttcaggaaattggaacatatgatgctggaatggatatttggggaggagaaaacctagaaatttcctttaggatttggcagtgtggaggaactttggaaattgttacatgctcacatgttggacatgtgtttcggaaagctacaccttacacgtttccaggaggcacagggcagattatcaataaaaataacagacgacttgcagaagtgtggatggatgaattcaagaatttcttctatataatttctccaggtgttacaaaggtagattatggagatatatcgtcaagagttggtctaagacacaaactacaatgcaaacctttttcctggtacctagagaatatatatcctgattctcaaattccacgtcactatttctcattgggagagatacgaaatgtggaaacgaatcagtgtctagataacatggctagaaaagagaatgaaaaagttggaatttttaattgccatggtatggggggtaatcaggttttctcttatactgccaacaaagaaattagaacagatgacctttgcttggatgtttccaaacttaatggcccagttacaatgctcaaatgccaccacctaaaaggcaaccaactctgggagtatgacccagtgaaattaaccctgcagcatgtgaacagtaatcagtgcctggataaagccacagaagaggatagccaggtgcccagcattagagactgcaatggaagtcggtcccagcagtggcttcttcgaaacgtcaccctgccagaaatattctgagaccaaattt

SEQ ID NO: 275625 - DNA, 2190 bp, Artificial Sequence
  derived and/or modified sequence
atcgcggtcgccaggcgcaggctcagcgcggctgacagcgctccagctcccgcgctcgcggccgcctcaggcagccgaccgggttggggcggccccgcgctcggcccgggagccgatccgctgtgagggctcctccatctcctcccaccccgtgacctgctcgacgcgcaacagcccgagccggcccggaggacgcctgccgccgccgccgccgcgcgcctagcgaggtgccatgagaaaatttgcatactgcaaggtggtcctagccacctccttgatttgggtactcttggatatgttcctgctgctttacttcagtgaatgcaacaaatgtgatgaaaaaaaggagagaggacttcctgctggagatgttctagagccagtacaaaagcctcatgaaggtcctggagaaatggggaaaccagtcgtcattcctaaagaggatcaagaaaagatgaaagagatgtttaaaatcaatcagttcaatttaatggcaagtgagatgattgcactcaacagatctttaccagatgttaggttagaagggtgtaaaacaaaggtgtatccagataatcttcctacaacaagtgtggtgattgttttccacaatgaggcttggagcacacttctgcgaactgtccatagtgtcattaatcgctcaccaagacacatgatagaagaaattgttctagtagatgatgccagtgaaagagactttttgaaaaggcctttagagagttatgtgaaaaaactaaaagtaccagttcatgtaattcgaatggaacaacgttctggattgatcagagctagattaaaaggagctgctgtgtctaaaggccaagtgatcaccttcctggatgcccattgtgagtgtacagtgggatggctggagcctctcttggccaggatcaaacatgacaggagaacagtggtgtgtcccatcatcgatgtgatcagtgatgatacttttgagtacatggcaggctctgatatgacctatggtgggttcaactggaagctcaattttcgctggtatcctgttccccaaagagaaatggacagaaggaaaggtgatcggactcttcctgtcaggacacctaccatggcaggaggccttttttcaatagacagagattactttcaggaaattggaacatatgatgctggaatggatatttggggaggagaaaacctagaaatttcctttaggatttggcagtgtggaggaactttggaaattgttacatgctcacatgttggacatgtgtttcggaaagctacaccttacacgtttccaggaggcacagggcagattatcaataaaaataacagacgacttgcagaagtgtggatggatgaattcaagaatttcttctatataatttctccaggtgttacaaaggtagattatggagatatatcgtcaagagttggtctaagacacaaactacaatgcaaacctttttcctggtacctagagaatatatatcctgattctcaaattccacgtcactatttctcattgggagagatacgaaatgtggaaacgaatcagtgtctagataacatggctagaaaagagaatgaaaaagttggaatttttaattgccatggtatggggggtaatcaggttttctcttatactgccaacaaagaaattagaacagatgacctttgcttggatgtttccaaacttaatggcccagttacaatgctcaaatgccaccacctaaaaggcaaccaactctgggagtatgacccagtgaaattaaccctgcagcatgtgaacagtaatcagtgcctggataaagccacagaagaggatagccaggtgcccagcattagagactgcaatggaagtcggtcccagcagtggcttcttcgaaacgtcaccctgccagaaatattctgagaccaaatttacaaaaaaacgaaaaaaataaggattgactgggctacctcagcatacatttctgccacattcttaagtagcaaaaaaggaaaagtgctttcctcctctgcaggatgtaaggtttatcagccattaaaacttagacttctctagcttttcactagctgtgaaccagccttcctgtccatggacgtgaaactgcatagtaatgagactgtgcacactgatgtttacaagattgaaagagtctttctccgaaaatcatggtaaagaatact

SEQ ID NO: 275626 - DNA, 1044 bp, Artificial Sequence
  derived and/or modified sequence
taagagcgcggccggaaagcagtagagaaatggtcagaaggaacgacaccacagaagaaattagaatgtttaaaagaaccaggaaaaacatctgtagaatctaaagtacctacccagatggaaaaatctacagacacagacgaggacaatgtaaccagaacagaatatagtgacaaaaccacccagtttccatcagtttatgctgtgccaggcactgagcaaacggaagcagttggtggtctttcttccaaaccagccacccctaagactactaccccaccctcatcaccacctccaacagctgtctcaccagagtttgcctacgtcccagctgacccagctcagcttgctgctcagatgttagcaatggcaacaagtgaacgaggacaaccaccaccatgttctaacatgtggaccctttattgtctaactgataagaatcaacaaggtcacccatcaccgccacctgcacctgggccttttccccaagcaaccctctatttacctaatcctaaggatccacagtttcagcagcatccaccaaaagtcacttttccaacttatgtgatgggcgacaccaagaagaccagtgccccaccttttatcttagtaggctcaaatgttcaggaagcacagggatggaaacctcttcctggacatgctgtcgtttcacagtcagatgtcttgagatatgttgcaatgcaagtgcccattgctgttcctgcagatgagaaataccagaaacataccctaagtccccagaatgctaatcctccaagtggacaagatgtccccaggccaaaaagccctgttttcctttctgttgctttcccagtagaagatgtagctaaaaaaagttcaggatctggtgacaaatgtgctccctttggaagttacggtattgctggggaggtaaccgtgactactgctcacaaacgtcgcaaagcagaaactgaaaactgatccagaaatgacgctgtctgggtcaacatttcagggaggagtctgccaccagtgtaatgtatcaataaacttcatgcaagc

SEQ ID NO: 275627 - protein, 605 aa, Artificial Sequence
  derived and/or modified sequence
MAEDWLDCPALGPGWKRREVFRKSGATCGRSDTYYQSPTGDRIRSKVELTRYLGPACDLTLFDFKQGILCYPAPKAHPVAVASKKRKKPSRPAKTRKRQVGPQSGEVRKEAPRDETKADTDTAPASFPAPGCCENCGISFSGDGTQRQRLKTLCKDCRAQRIAFNREQRMFKRVGCGECAACQVTEDCGACSTCLLQLPHDVASGLFCKCERRRCLRIVERSRGCGVCRGCQTQEDCGHCPICLRPPRPGLRRQWKCVQRRCLRGKHARRKGGCDSKMAARRRPGAQPLPPPPPSQSPEPTEPHPRALAPSPPAEFIYYCVDEDELQPYTNRRQNRKCGACAACLRRMDCGRCDFCCDKPKFGGSNQKRQKCRWRQCLQFAMKRLLPSVWSESEDGAGSPPPYRRRKRPSSARRHHLGPTLKPTLATRTAQPDHTQAPTKQEAGGGFVLPPPGTDLVFLREGASSPVQVPGPVAASTEALLQEAQCSGLSWVVALPQVKQEKADTQDEWTPGTAVLTSPVLVPGCPSKAVDPGLPSVKQEPPDPEEDKEENKDDSASKLAPEEEAGGAGTPVITEIFSLGGTRFRDTAVWLPRSKDLKKPGARKQ

SEQ ID NO: 275628 - DNA, 1818 bp, Artificial Sequence
  derived and/or modified sequence
atggcggaggattggctcgattgccccgcgctaggccctgggtggaagagacgcgaggtgttccgcaaaagcggcgcaacttgcggtaggtccgacacctactatcagtcccctacaggcgaccgcataaggtccaaggtggagctgacccgctacctggggcctgcctgtgacctgaccctctttgattttaaacagggcatactctgctaccctgccccgaaggcgcacccagtagcagtagccagcaaaaagcggaagaagccatcgcgcccagccaagactaggaaaaggcaggtgggtccgcagtcaggagaggttcgcaaggaggcaccacgcgacgaaacgaaggccgacacagacactgcgccagcaagcttccctgcccctggctgttgtgagaattgcggcatttccttttccggggatggaactcagcgccagagactgaagacactttgcaaagactgcagggctcagcgcattgcctttaacagagaacaaagaatgtttaaacgggtgggctgtggtgaatgcgctgcctgtcaggtgactgaggactgcggggcctgctcaacatgcctacttcagctcccacatgacgtcgcaagtggcctgttctgcaaatgcgagaggcgccgatgcctgcggatcgtcgagcgctctcgaggatgtggcgtgtgtagaggttgtcagactcaggaagactgtggacactgtcccatatgtctgagacctcccaggcctgggctacgacggcagtggaagtgtgtgcagaggcgatgtctgagaggcaagcacgccagaagaaaagggggatgcgacagtaagatggccgcgaggagacgcccgggcgcccaacccttgcccccccccccaccttcccaaagccctgaaccgactgagccccatccgcgagccctggcgccctcccctcctgccgagtttatttactattgtgtcgacgaggatgaattgcagccttacactaacagaagacaaaacaggaagtgcggcgcatgtgctgcatgcttgaggagaatggactgtggccgatgcgacttttgttgtgataagccaaaatttgggggaagcaatcagaaaaggcagaaatgtagatggagacagtgcctgcagttcgccatgaaaaggctgctcccgagcgtctggtcggaatcggaggacggcgccgggtccccccccccctaccggcggaggaagcggcctagctcagctcggcggcatcacctcggacctacgctaaagccaacactggcaacaaggaccgcccagcctgaccacacacaggcacccaccaaacaggaagccggcggaggtttcgtgctcccacctccaggaaccgatctcgtgttcctccgcgagggagctagtagcccggttcaggtgcccggtcctgttgctgctagtaccgaagccctgctgcaggaagctcagtgtagtggattgagttgggtcgtcgcgttaccacaggtcaagcaagaaaaggccgacactcaggatgaatggacacccggaaccgctgtgctgacatcacctgtacttgtgccggggtgcccatccaaagccgtagatcctggccttccctcagtgaagcaggagccgcccgacccagaagaggataaagaggagaataaggacgactcggcgagcaagctcgctccagaagaggaagccgggggggctggaacacctgtgatcacagaaatctttagtctcggcggaaccagatttagggatacagcggtctggctgcccagatctaaagatttgaagaaacctggagctcgcaaacaatag

SEQ ID NO: 275629 - DNA, 1818 bp, Artificial Sequence
  derived and/or modified sequence
atggctgaggattggcttgattgtcccgcccttggccccggttggaaacggcgcgaagttttccggaagtcgggcgctacgtgtgggaggtccgacacttattaccaatccccaacaggtgaccgaatccggtcaaaggtcgaactgacgcgttacctgggtccagcgtgtgacttaacactgtttgacttcaaacagggtatattatgctatcctgctccgaaggcccatcctgttgcggtcgcaagcaagaaacgaaaaaaaccttcaagacccgcaaagactaggaagagacaggtgggccctcaatccggtgaggtgagaaaagaggcccctcgggacgaaaccaaagctgatactgacacagcccctgccagttttccggcccctggttgttgcgaaaattgcggaatttcctttagcggagatgggactcagagacagagactgaagaccttatgcaaagattgccgcgctcagcgtatcgcattcaacagagagcaacggatgttcaaaagggtagggtgcggagagtgtgccgcctgccaagtgactgaagattgtggcgcctgcagcacctgtctgctgcagcttccccatgacgtagcgtcagggttattttgcaaatgtgagcgacggcgatgcttgcgaatagtcgaacgaagtagagggtgtggcgtttgtcggggttgccagactcaggaggactgtgggcattgcccaatctgtctgagacccccccgcccggggctgcgacggcaatggaaatgtgtccagcggcgatgcttgcgcggaaagcacgctaggcggaagggcggctgcgactcaaagatggccgccagaagaaggcccggagcccagcctctgccgcccccccccccgtcacagagtccagagccaaccgaacctcacccacgcgcccttgctccttctcctcccgccgagtttatctattactgtgttgatgaggatgagcttcaaccttacaccaacagacgccagaaccgcaaatgcggggcctgcgccgcctgtctaagacgcatggattgtggacggtgtgacttttgctgtgataagccaaaattcgggggcagcaatcagaagagacagaagtgccgctggcgtcagtgcctgcaattcgctatgaaacgcttattgccgtccgtgtggtctgagagcgaagatggagcaggaagtccaccaccttatcgtagacggaagcgcccgtcaagcgcacgacgacatcacctgggtcctacactgaaacccacgctcgccacaaggacggcacagcccgaccatactcaggctccaacgaagcaggaggccggaggtggtttcgtgctgccaccgccaggtaccgatctggtgttcctgagagagggagcatctagccccgtacaggtgcccggccctgtggccgcaagtactgaggccctgctgcaggaagctcaatgctccgggttgagctgggtggtggctcttcctcaggtgaaacaggagaaagctgatacacaggacgaatggacccctggcaccgcagttctcacaagcccggtcctggtgcctggttgtccaagtaaggccgtcgacccaggactgccgtctgtcaaacaggaaccaccggatcccgaggaggacaaggaggaaaacaaggacgactcggcaagcaagcttgcccccgaagaagaagccggcggggctggcactcccgtcattacagagattttcagcctaggaggtacacgcttccgggatactgctgtttggctccctcggtccaaggatctgaagaagcctggcgcacgaaagcaatag

SEQ ID NO: 275630 - DNA, 1818 bp, Artificial Sequence
  derived and/or modified sequence
atggctgaagactggttggattgtccagccctcggtcccgggtggaaaaggagggaagtgttccgcaaaagcggggcgacgtgtggcagaagtgacacatattaccagtcgccaactggagacagaattcggagcaaggtggagctgacaaggtacctgggaccagcttgcgacctgacactttttgactttaaacaaggaattctatgctaccctgctcccaaagcccatcctgttgctgtcgccagtaaaaagagaaagaagccctcccggcctgccaaaacacggaaacgccaagtgggaccccagagtggagaggttaggaaagaagctcctcgggacgagaccaaggcggatacggacacggcaccggcctctttcccagccccaggttgctgtgaaaattgcggcatttccttttctggagatggaacccaacggcagaggctgaaaacattgtgtaaggactgtcgcgcacaaagaatcgccttcaatcgcgagcagagaatgttcaaaagggtggggtgtggggaatgcgcagcttgtcaggtgacagaggattgtggcgcctgcagcacttgcctcctgcagctcccccatgacgttgccagcggcctgttttgtaagtgcgagagacgtcggtgtctacgcatagtcgagaggagcagggggtgcggcgtttgtagagggtgtcaaacacaggaggactgtggacattgtcccatctgtctcaggccccccagaccaggcctcaggcggcagtggaagtgcgtgcagcgacggtgtctgcggggaaaacacgcgcggcgcaagggcggatgcgacagtaagatggccgcacgacgccgtccaggagctcagccgcttccccccccccccccgagtcaaagtccagagccgactgaacctcaccctcgggcactcgctccaagccctcccgctgagtttatttattactgcgtggacgaggacgagctgcagccatataccaaccgtcgccagaacaggaagtgtggagcttgtgccgcctgcctgcggaggatggactgcggccgctgcgacttttgttgcgataagcctaagttcggagggtctaatcagaaaagacaaaagtgccggtggcggcagtgtctacaattcgctatgaagcgcctcctgccatccgtctggtccgagtcagaagacggggctggatcccctcccccataccgaagaaggaaacgaccaagcagcgcaaggaggcaccacctgggccccactctgaaacccactctggctactcgaacagcacagcccgaccacacgcaggccccaaccaagcaagaggcagggggtgggttcgtgcttccacccccagggactgacttagtgttcctcagggagggtgcttctagtcctgtgcaagtaccggggcccgtggccgcctcaaccgaggccctactacaagaggcgcagtgctccgggttgagctgggttgtggctctcccccaggtgaagcaggagaaggcagacacccaagacgaatggacccccggcacagctgtcttgacatcgcctgtattggtgcccggctgccccagtaaagcagtagacccaggcttgccttctgtgaagcaggaaccccccgacccagaggaagataaagaggagaataaagacgacagcgcttccaagctggcccccgaagaggaagctggcggggcagggacacctgtcattactgaaattttttcactggggggtaccaggtttagggacacagccgtttggctgccccgttctaaagatcttaagaagcccggcgctcggaaacagtag

SEQ ID NO: 275631 - DNA, 1818 bp, Artificial Sequence
  derived and/or modified sequence
atggccgaggactggctggactgcccagccctgggccctggctggaagagaagagaggtgttcaggaagagcggggccacctgtggccgcagtgacacctactaccagagccccactggagaccgcatccgcagcaaggtggagctgacccgctacctgggccctgcctgtgacctgaccctgtttgacttcaagcagggcatcctgtgctacccagcccccaaggcccaccctgtggccgtggccagcaagaagaggaagaagcccagcaggcctgccaagaccaggaagaggcaggtgggcccccagagcggggaggtgaggaaggaggcccccagagatgagaccaaggctgacacagacacagccccagccagcttccctgcccctggctgctgtgagaactgtggcatctccttctctggagatggcacccagaggcagaggctgaagaccctgtgcaaggactgccgggcccagagaattgccttcaaccgggagcagaggatgttcaagagggtgggctgtggggagtgtgccgcctgccaggtgacagaggactgtggggcctgcagcacctgcctgctgcagctgccccatgatgtggccagcggcctcttctgcaagtgtgagcggcggcgctgcctgcgcatcgtggagaggagccggggctgcggcgtgtgccggggctgccagacccaggaggactgtggccactgccccatctgcctgcggccccccaggcctggcctgcggcggcagtggaagtgtgtgcagaggcgctgcctgcggggcaagcacgcccggaggaaaggaggctgtgacagcaagatggccgcccggcggcggcctggggcccagcccctgcccccacctccacccagccagagccctgagcccacagagccccacccccgggccctggcccccagccccccagctgagttcatctactactgtgtggatgaagatgagctgcagccctacaccaacagacggcagaacagaaaatgtggggcctgtgccgcctgcctgcggaggatggactgtggccgctgtgacttctgctgtgacaagcccaagtttggaggcagcaaccagaagaggcagaagtgccgctggaggcagtgcctgcagtttgccatgaagaggctgctgcccagcgtgtggagcgagagtgaagatggagctggcagccccccaccctacagaagaaggaagaggcccagcagcgcccggcggcaccacctgggccccaccctgaagcccaccctggccaccaggacagcccagcctgaccacacccaggcccccaccaagcaggaggccggcggcggctttgtgctgcccccacctggaacagacctggtgttcctgcgggagggcgccagcagccctgtgcaggtgcccggccctgtggccgccagcacagaggccctgctgcaggaggcccagtgcagcggcctgtcctgggtggtggccctgccccaggtgaagcaggagaaggctgacacccaggatgagtggaccccaggcacagctgtgctgaccagccctgtgctggtgcccggctgccccagcaaggctgtggaccccggcctgcccagcgtgaagcaggagcccccagaccctgaggaggacaaggaggagaacaaggatgattctgccagcaagctggcccctgaggaggaggccggcggggccggcacccctgtgatcacagagatcttcagcctgggcggcacccgcttccgggacacagctgtgtggctgcccaggagcaaggacctgaagaagccaggggccaggaagcagtag

SEQ ID NO: 275632 - DNA, 2801 bp, Artificial Sequence
  derived and/or modified sequence
agccagaggcggagcccgagaggcaggcagcggacttccggttccgggagcaacgaacagccgcggaggcgacagctaccgcttcagaggaggcggccgcggaggaggaggaaggggaggagggcgaggcgggaggtgcaggagggaccctcgccatgggtccacgggcctagagtggcggaagataccggcctggtgccaaactggctactgctgcttcctgtggcctccatggctgaggactggctggactgcccggccctgggccctggctggaagcgccgcgaagtctttcgcaagtcaggggccacctgtggacgctcagacacctattaccagagccccacaggagacaggatccgaagcaaagttgagctgactcgatacctgggccctgcgtgtgatctcaccctcttcgacttcaaacaaggcatcttgtgctatccagcccccaaggcccatcccgtggcggttgccagcaagaagcgaaagaagccttcaaggccagccaagactcggaaacgtcaggttggaccccagagtggtgaggtcaggaaggaggccccgagggatgagaccaaggctgacactgacacagccccagcttcattccctgctcctgggtgctgtgagaactgtggaatcagcttctcaggggatggcacccaaaggcagcggctcaaaacgttgtgcaaagactgtcgagcacagagaattgccttcaaccgggaacagagaatgtttaagcgtgtgggctgtggggagtgtgcagcctgccaggtaacagaagactgtggggcctgctccacctgcctcctgcagctgccccatgatgtggcatcggggctgttctgcaagtgtgaacggagacgctgcctccggattgtggaaaggagccgagggtgtggagtatgccggggctgtcagacccaagaggattgtggccattgccccatctgccttcgccctccccgccctggtctcaggcgccagtggaaatgtgtccagcgacgttgcctacggggtaaacatgcccgccgcaagggaggctgtgactccaagatggctgccaggcggcgccccggagcccagccactgcctccaccacccccatcacagtccccagagcccacagagccgcaccccagagccctggccccctcgccacctgccgagttcatctattactgtgtagacgaggacgagctacagccctacacgaaccgccggcagaaccgcaagtgcggggcctgtgcagcctgcctacggcggatggactgtggccgctgcgacttctgctgcgacaagcccaaattcgggggcagcaaccagaagcgccagaagtgtcgttggcgccaatgcctgcagtttgccatgaagcggctgctgcccagtgtctggtcagagtctgaggatggggcaggatcgcccccaccttaccgtcgtcgaaagaggcccagctctgcccgacggcaccatcttggccctaccttgaagcccaccttggctacacgcacagcccaaccagaccatacccaggctccaacgaagcaggaagcaggtggtggctttgtgctgcccccgcctggcactgaccttgtgtttttacgggaaggcgcaagcagtcctgtgcaggtgccgggccctgttgcagcttccacagaagccctgttgcaggaggcccagtgctctggcctgagttgggttgtggccttaccccaggtgaagcaagagaaggcggatacccaggacgagtggacaccaggcacagctgtcctgacttctcccgtattggtgcctggctgccctagcaaggcagtagacccaggcctgccttctgtgaagcaagagccacctgacccagaggaggacaaggaggagaacaaggatgattctgcctccaaattggccccagaggaagaggcaggaggggctggcacacccgtgatcacggagattttcagcctgggtggaacccgcttccgagatacagcagtctggttgccaaggtccaaagaccttaaaaaacctggagctagaaagcagtagactggaggcttctacagactgtaggattcaaggtgatatttgcagactggctttatgagagacaacactgatctactaggggctggaccctagattggttgccagggcttgtgtgtgaatcaaccctaggaggaaaaacctactaccaaaccagaagagcaggcctaagagtactttgagcttctagaagaagtaagcgggaaaggaagagaaagagtagaaagttggtgcatcttctcctccccaagagcctgagtataagaagttggattttaagggtgggggagctgggttggagaaaggtaatataattaaagccaccacaaaacaacctaaacaagccatgttcatgagtaattgtaagtggcttctggatgagacctggcagtgtctctacatacttcctcagggagatagcaattgaaaatgtaattgaataaataaggaaaggaactgctatttggtgtgttcctctgtggacccagtttatttaatccttaaaataatatttttgggaagacattgattttgtccatttatgtggatgggaaaactgagactcattaatttgtccaatgtcgaacagctggtgttagtagagcctagactcaaacccagcttttaaagcccttgttctttactccactaaactgtaacctgtaatcctgtatgcactaacaggagttttcggtgaccttgaaaacacagattactataattactataataaatcccttacattcctgtctcta

SEQ ID NO: 275633 - DNA, 1818 bp, Artificial Sequence
  derived and/or modified sequence
atggccgaggactggctggactgccccgccctgggccccggctggaaacgccgcgaggttttcagaaagagcggcgctacctgtggccggagcgatacatactatcagtctccaaccggcgatagaatccgtagtaaagtcgagttaacccggtacttgggacctgcatgtgacctgaccctcttcgatttcaagcagggaatcctgtgctaccccgcaccaaaagctcaccccgtcgcagtggcctcaaaaaagaggaaaaagccatctcgcccggcaaagactcgtaagcgtcaggttggaccacaatccggggaggtgcgcaaggaagcgcctagagacgagacaaaggcggacacagacaccgctccagcctctttcccagcccccgggtgctgtgagaattgcggcattagcttcagtggtgatggtacccagaggcagcgactcaagaccctatgtaaggattgtagggctcagcgcatagccttcaacagggagcagaggatgtttaaaagggttggatgcggcgagtgcgcagcctgccaagtcaccgaagattgcggagcttgttctacttgcctcctgcagctaccccacgatgttgcatcggggctgttctgcaagtgcgagagacggcgatgtttgaggatcgtggagcgaagcagaggatgtggagtgtgcaggggctgtcagacacaagaagattgtggacattgtcccatctgtctgagaccccccaggccaggactccgccgccaatggaagtgcgtccagaggcgctgccttcggggaaagcatgcccggcgaaaagggggctgcgattccaagatggctgcgcggaggaggccaggcgcccaacctttgccccctcctcccccttcccagtctccagagcctaccgagccccacccgcgtgctttggcccctagtcctccagcagagtttatctattactgcgtggacgaggacgagcttcagccgtacactaaccggcgtcagaaccgaaaatgtggagcttgtgccgcttgcttacgtaggatggattgtgggaggtgtgatttttgctgtgacaagcccaagtttggtgggtctaatcagaaaaggcagaagtgcagatggcgccagtgtctacagttcgctatgaagagactgctcccgagtgtctggtccgagtccgaagatggagctggttcaccgcccccctacagacgaagaaagcgtccatcctcagcccgaagacaccacttgggacccacgcttaaacccacactggctacccggacagcacagccagatcatacacaggccccaactaagcaggaggcagggggtggcttcgtcctgcccccacccggcactgacctggtcttcctgcgcgagggcgcctctagccctgttcaggtgcccgggccagtggctgcctcaactgaggcgttgctccaggaggcccagtgctctggcctgtcatgggtcgtggcattaccccaggtaaagcaggaaaaggcggatacccaggacgagtggaccccagggaccgccgttctcacaagcccagtgctcgtccctggatgcccaagtaaagctgtcgatccagggctgccatccgtgaaacaggaaccacctgacccagaagaggacaaagaagagaacaaggacgatagcgcctccaaactcgctccggaggaagaagcgggcggtgccggcacgccagttattacggaaatatttagtctgggggggacccgttttcgtgacaccgctgtgtggttgcccaggtcaaaggatctgaagaagccgggcgccaggaagcaatag

SEQ ID NO: 275634 - DNA, 1818 bp, Artificial Sequence
  derived and/or modified sequence
atggccgaggactggctggactgccccgccctgggccccggctggaagcgccgggaagtctttaggaagtcaggcgcaacctgtgggaggtctgatacatactaccagtctcctaccggcgacagaatccggagcaaagtggaactaacgcgctatctgggccccgcttgtgatctaaccttgtttgacttcaagcaagggattctgtgttatcccgcccctaaggcacacccggtggcggtcgccagcaaaaagcggaagaaacccagcaggcccgcaaagacccggaagcggcaggtcggcccacaatcaggggaggtgcgcaaggaagcccctcgcgacgaaactaaagctgacaccgatacggcacccgcctcttttcctgcaccaggatgctgtgagaactgtgggatttccttttccggtgatggcacccagcgacagcgactgaaaaccctgtgcaaggactgtagggcccaaagaattgccttcaatcgggaacagcggatgttcaaacgcgtgggatgcggggagtgtgccgcctgtcaggttacggaagattgcggggcgtgctcaacatgtctgctccaattgccgcacgacgtagcctccggcctcttctgcaagtgtgaaaggcgccgctgtttgagaatagtagagcggtcgagagggtgcggcgtttgtcgcggctgtcaaacgcaggaagactgcgggcactgtcccatttgcctgagaccacctcgaccaggattacgaaggcagtggaaatgcgtgcagaggcggtgcttgcgcgggaagcacgctcgtcgaaaaggcgggtgcgacagcaagatggccgctcggagacggcccggcgcacagccccttcctccccctcctccaagtcagagccccgaaccaaccgaacctcacccacgcgcactggccccgagcccaccggcagaatttatctattactgtgtggatgaggacgaactgcagccatacactaacagacgtcagaacagaaaatgtggcgcttgcgctgcctgtttacgtagaatggactgtgggaggtgcgacttttgttgtgacaaacctaaattcggtggaagtaatcagaaacggcaaaagtgccgctggaggcaatgcttgcagtttgccatgaaacgattgctcccaagcgtgtggagcgaatccgaggatggggccggctctcctcctccgtatcgtcgcagaaagcgcccctcatccgcacgcagacatcacctgggcccaactctgaaaccgactctggcgacaaggactgcacagcccgaccacactcaggcgccaactaaacaggaagccggcggtggattcgtcctgcccccgcccggaacagacttggtttttctccgggagggagcatcaagccctgtgcaagtgcccggtccggtggctgcctcaaccgaggccctgctccaagaggcacaatgctctggcttatcctgggttgttgcactgccgcaagtgaaacaggagaaagctgatacgcaggatgaatggaccccaggcactgcggttctaacctcgcccgtgttggtgcccggttgcccttcaaaagctgtggacccagggctgccttcggtgaaacaggaacctcccgaccctgaggaggataaggaggaaaacaaggacgattctgcttcaaagctagcccctgaagaggaagccggtggcgccgggacacccgtgataactgagatcttttccctgggaggaactcgatttagagatactgctgtctggctgccaagaagtaaagacctcaaaaagcctggagctcgaaaacagtag

SEQ ID NO: 275635 - DNA, 1818 bp, Artificial Sequence
  derived and/or modified sequence
atggccgaggactggctggactgccccgccctgggccccggctggaagcggagagaagttttcaggaagtcaggagccacttgtggaaggagcgatacatactatcagagcccaaccggagacaggatcagaagtaaagtagaactaacaaggtacctgggacctgcttgcgacctgacgctgttcgattttaagcagggcattttatgctatcccgcccctaaagctcacccagttgctgtggcttccaagaagcgaaaaaagccatctcgaccagcaaagacaaggaagcgtcaggtgggcccacagtccggcgaagttcgcaaggaagctccaagggatgaaaccaaagctgatacagatactgcccccgcctcctttccagcccccgggtgctgcgaaaattgtggaataagtttttcaggcgacggcactcaacgtcaaaggctcaagacactttgcaaagattgcagggcgcaaagaattgccttcaatcgagagcagcgcatgttcaagcgcgtcggttgtggggagtgcgcagcttgccaagtgaccgaggattgtggtgcctgtagcacctgtctgctccaactgccccacgacgtggcctcagggctgttctgcaagtgcgagcgccggcgctgcctccgcatagtggagcgttccagaggctgtggcgtgtgtcggggctgccagacacaagaagactgtggacactgccctatctgtcttcgcccccctcgccctgggttgcggaggcagtggaaatgtgtccagcggcgctgcctgagagggaaacacgcaagaagaaaaggtggatgcgactctaaaatggctgccaggcgacgtcctggggcccagccattgccgcccccgccaccctcccagtcaccagagcccactgaaccccaccctagggccctggccccatcgccacccgcggaatttatttactattgtgttgatgaggacgaacttcagccctacaccaacagaaggcagaaccggaaatgtggcgcttgtgccgcatgtcttcggcggatggactgcggaaggtgcgacttctgttgtgacaaacccaaatttgggggatcaaatcagaagaggcagaaatgtcgctggagacagtgtttgcagttcgccatgaagcggttacttccttctgtttggagcgaatcggaggacggcgcgggcagtcctccaccgtatcgtcgaaggaagaggccaagtagcgcgcgccgacaccacctggggcccacactgaaaccaactctggctaccaggacagctcagcccgatcatacccaagcacccaccaagcaggaagcaggcggcggcttcgtgctcccacctccaggaacagatctggtctttctgcgcgagggggcttctagccctgttcaggtgcccggtccagtggcggccagcactgaggccttgctgcaggaggctcagtgctcgggcctgtcctgggtggttgctctaccccaggtaaaacaggagaaagcggacacacaggatgaatggacccccgggaccgccgtgctgacgtcccccgtgcttgtgccgggttgcccatcaaaagctgtcgatcctggcttgcctagcgtgaagcaggagccacctgaccccgaggaggacaaagaggaaaacaaggatgattctgcctccaagctcgcccctgaggaagaggccggcggcgccggcactcctgtgataaccgaaatctttagcctgggaggaactcggttcagagatacggctgtgtggctgcccaggtcaaaggatcttaaaaaacctggagcccggaaacagtag

SEQ ID NO: 275636 - DNA, 1818 bp, Artificial Sequence
  derived and/or modified sequence
atggcagaggattggctggactgccctgctctcgggccaggttggaagagaagggaggtgtttcgaaagtcgggggctacatgcggccgttctgatacatactaccagtccccaaccggagataggatccgctccaaggtagagcttacccgatacctcggccctgcatgcgatctgaccttgtttgactttaagcagggcatcctgtgctacccggctccaaaggcccatccagtcgcagtggcctccaaaaagcgcaaaaaaccgtcccggcctgcaaagactaggaagcgccaggtcgggcctcagtcaggcgaagtccgcaaagaagctcccagagacgagacaaaagcagataccgacacggctcctgccagttttcccgcaccaggatgctgcgaaaattgtggcatttctttcagcggcgatggcacccagagacagaggctaaaaacgttatgcaaagattgccgagcacagagaatagcattcaatcgggaacagagaatgttcaagagagtcggatgtggcgaatgtgctgcttgccaggttaccgaagactgtggggcttgcagcacatgtctgctccaactgccgcatgatgtcgcctctggcttgttctgcaaatgtgagcgacgcaggtgtcttcggatagtagagcggtctcgcggatgcggggtttgccgaggctgtcagacacaagaagattgcggccactgtcccatctgcttaagacctcctaggccagggttgagaagacagtggaagtgtgttcagcgcaggtgtctgaggggcaagcatgctcgcagaaagggagggtgcgactccaagatggctgcccgtcgaaggcccggagcccagcccctgccacctcccccaccaagtcagagccccgaaccaacggaacctcaccctagagccttagccccttcccccccagctgaatttatctactattgcgttgacgaggacgagcttcagccctataccaatcgtaggcagaataggaaatgcggtgcgtgcgccgcatgccttcgacgaatggattgtggacggtgtgacttttgctgcgacaagcccaaatttggcggatctaaccagaaacgccaaaagtgtcggtggaggcagtgcttgcagttcgcaatgaaaagacttttgccatctgtctggagcgaaagcgaggatggggcaggaagccctcctccatataggcgacgaaagcggcctagctctgccaggcggcatcacctcggacctaccctgaagccaaccctggccacccggacagcccagcccgaccacacacaggctccaactaaacaggaagcgggtggaggcttcgtcctgcccccacctggaaccgacttggtgttcctgcgtgagggcgcatctagtcccgttcaggtcccagggcctgtggccgcaagtactgaggcgctactgcaggaggcgcagtgctccggtctgtcatgggtggtggccctccctcaggtcaaacaggaaaaggctgacacccaggatgaatggacaccagggactgccgtcctgactagtcccgtgctggtgccaggatgtcccagcaaggccgtggacccagggttgccctctgtaaagcaagaaccacctgatccagaggaggataaggaggagaataaggatgactcggcatccaaactggcccctgaagaggaagctggaggggctgggacgcccgtgatcactgagatcttctctctcggcggaacaagattcagagataccgctgtgtggctcccccgttcaaaggacctcaaaaagccgggtgcacggaagcagtag

SEQ ID NO: 275637 - DNA, 1818 bp, Artificial Sequence
  derived and/or modified sequence
atggctgaagactggttggactgccctgcgctgggcccagggtggaagcgcagagaggtgtttaggaagtccggcgctacatgtggtagaagtgacacatattatcagagccctaccggagataggattagatcaaaagtggagcttactcggtatcttggccctgcttgtgatctgacactgttcgacttcaagcagggcattttatgttaccctgccccaaaagcccatccagttgctgtagcatcaaaaaagagaaagaaaccatctaggccagccaagacacgcaaaaggcaagttggaccacagagcggggaagttcgcaaagaagcacccagggatgagaccaaggccgatacagatacggctcctgcttccttccctgcccctgggtgttgtgagaactgcggaatctcgttcagcggtgacggtacacagcgccaacggctaaaaaccctgtgcaaagattgtcgggcacagcgaattgcattcaatagggagcagaggatgtttaaacgcgttggatgcggagagtgcgcagcttgccaggtgaccgaagactgcggcgcatgctcaacctgtctcttgcagttaccccatgatgttgcctccggccttttttgcaagtgtgaacgcagacgttgtctgaggattgtggagcgcagccgcggatgcggcgtgtgccggggttgtcagacccaggaggactgcggacattgtcccatctgtctgagacctcctcggccaggtctgaggcggcagtggaagtgtgtccagcgcagatgtctgaggggtaagcatgctcgaagaaaaggcggatgcgacagtaagatggccgctaggcggagacctggggcacagccactgccccctccgcctccaagtcaaagtcctgagccaaccgagccacaccctagggccttggccccttcccccccagcggaattcatttactactgcgttgacgaggatgagttgcagccctatactaatcgcaggcaaaacagaaagtgcggagcctgcgcagcctgtttgcggcgaatggactgtggcagatgcgatttttgttgtgataaacccaagttcggcggatctaatcagaagcgacagaagtgccgctggaggcagtgtctgcaatttgccatgaaaaggctgttgcctagtgtctggtctgagtcagaagacggagctgggagtcctcctccttatcgaaggaggaagaggccttcatcagcaagaaggcaccatctaggcccaaccttaaagcccacactggccacaagaaccgctcaacctgaccatacacaggcgccaaccaagcaggaagctggaggcggatttgtcttaccccctccaggcaccgacctggtctttctacgcgagggtgcatcatccccggtgcaggtgcctggccctgttgccgcttccactgaagcactcctgcaggaggcccagtgtagtgggctttcctgggtggtggcactgccccaggtcaagcaagagaaggccgatactcaggatgagtggacacccggaacagccgtcctgacctcacccgtgctcgttcctggctgcccttctaaggccgtagatcctggcctgcctagcgtgaaacaggaaccgccagatcccgaggaggacaaggaagaaaacaaggatgactcagcctctaagttggcccctgaagaggaggctggtggggcaggaacccctgtgataacagagatctttagtctgggtggaaccagatttcgtgatacagctgtctggctccctcgcagtaaagatctgaagaaacctggggctagaaagcagtag

SEQ ID NO: 275638 - DNA, 1818 bp, Artificial Sequence
  derived and/or modified sequence
atggctgaggattggctggattgcccagctctgggcccagggtggaagcggagggaggtatttagaaagagcggagccacttgcggaaggtccgacacctactatcagtctcccacaggcgaccgcatacggtctaaggtggagctgacaagatatctgggacccgcatgtgacttgactctatttgatttcaagcaggggatactgtgctacccagctcccaaggctcatccagtcgccgttgcctcaaaaaagagaaagaaaccatcaaggcccgctaaaacacggaaacggcaggttgggccacagtcaggggaagtgcgaaaggaggctccaagagacgagactaaggctgatacagatacggcccctgcctcctttccagcgccagggtgctgcgagaactgcggcatatccttcagcggagacggcacccaaagacagagactgaaaaccttgtgtaaggattgccgtgcccagaggattgcttttaacagggaacagcgtatgtttaaacgggtgggttgtggagagtgtgctgcctgtcaggtcactgaggattgcggcgcttgttcgacctgccttctacagctgccacatgacgttgcttcaggactgttttgcaaatgcgaaaggcggcgatgtctgaggatagtcgaaagatcccgcggatgcggcgtctgcagaggctgtcagacacaggaggactgcggacactgcccgatttgtcttcgaccgcctaggcccggtctgagaaggcagtggaagtgtgtccagaggaggtgtctgaggggtaagcatgcaagaaggaaaggaggctgtgactccaagatggctgctcgcagaaggcccggtgctcagcctctaccacccccaccccctagtcagtctcctgagcctactgagccacaccccagagcccttgcccctagccctccagccgaattcatctattactgcgtcgatgaggacgaactgcagccatacacgaatcggaggcaaaataggaagtgtggagcgtgtgcagcttgtttgcgcagaatggactgcggacggtgcgacttttgctgcgataagcctaaattcggcggtagtaaccagaagcggcagaagtgtcgttggagacagtgtctgcagttcgccatgaaacgattgttgccgagtgtatggtccgagtccgaggatggtgccggttctccacccccttacagacgcagaaaaaggcccagctctgctagaaggcatcatctgggtcctactctgaagcctacactcgcgacccgaaccgcacaaccggaccacactcaggcgcctaccaagcaggaggcagggggaggattcgtactgcctcccccagggacggatctcgtattcctccgagaaggggcttcaagcccagttcaggtcccgggtcctgtcgcagctagcactgaagcactgctccaggaggctcagtgttcagggctaagctgggtggtggctcttcctcaggtaaaacaggagaaagccgacacccaggatgagtggacacccggaacagccgtgctcacctctccagtgttagtgcctggctgtcccagcaaggctgtcgatcctggtcttccaagtgtgaagcaggaaccaccggaccccgaggaagataaagaagagaacaaggatgacagcgcttccaaactagcacctgaagaagaggctggtggggcaggaacaccggttatcactgaaatcttttcactagggggaaccagattcagagatacagcagtgtggctgccacgttccaaggatctcaaaaagcccggagccaggaagcagtag

SEQ ID NO: 275639 - DNA, 1818 bp, Artificial Sequence
  derived and/or modified sequence
atggccgaggactggctggactgccccgccctgggccccggctggaagagaagagaggtgttcagaaagagcggcgccacctgcggcagaagcgacacctactaccagagccccaccggcgacagaatcagaagcaaggtggagctgaccagatacctgggccccgcctgcgacctgaccctgttcgacttcaagcagggcatcctgtgctaccccgcccccaaggcccaccccgtggccgtggccagcaagaagagaaagaagcccagcagacccgccaagaccagaaagagacaggtgggcccccagagcggcgaggtgagaaaggaggcccccagagacgagaccaaggccgacaccgacaccgcccccgccagcttccccgcccccggctgctgcgagaactgcggcatcagcttcagcggcgacggcacccagagacagagactgaagaccctgtgcaaggactgcagagcccagagaatcgccttcaacagagagcagagaatgttcaagagagtgggctgcggcgagtgcgccgcctgccaggtgaccgaggactgcggcgcctgcagcacctgcctgctgcagctgccccacgacgtggccagcggcctgttctgcaagtgcgagagaagaagatgcctgagaatcgtggagagaagcagaggctgcggcgtgtgcagaggctgccagacccaggaggactgcggccactgccccatctgcctgagaccccccagacccggcctgagaagacagtggaagtgcgtgcagagaagatgcctgagaggcaagcacgccagaagaaagggcggctgcgacagcaagatggccgccagaagaagacccggcgcccagcccctgcccccccccccccccagccagagccccgagcccaccgagccccaccccagagccctggcccccagcccccccgccgagttcatctactactgcgtggacgaggacgagctgcagccctacaccaacagaagacagaacagaaagtgcggcgcctgcgccgcctgcctgagaagaatggactgcggcagatgcgacttctgctgcgacaagcccaagttcggcggcagcaaccagaagagacagaagtgcagatggagacagtgcctgcagttcgccatgaagagactgctgcccagcgtgtggagcgagagcgaggacggcgccggcagcccccccccctacagaagaagaaagagacccagcagcgccagaagacaccacctgggccccaccctgaagcccaccctggccaccagaaccgcccagcccgaccacacccaggcccccaccaagcaggaggccggcggcggcttcgtgctgcccccccccggcaccgacctggtgttcctgagagagggcgccagcagccccgtgcaggtgcccggccccgtggccgccagcaccgaggccctgctgcaggaggcccagtgcagcggcctgagctgggtggtggccctgccccaggtgaagcaggagaaggccgacacccaggacgagtggacccccggcaccgccgtgctgaccagccccgtgctggtgcccggctgccccagcaaggccgtggaccccggcctgcccagcgtgaagcaggagccccccgaccccgaggaggacaaggaggagaacaaggacgacagcgccagcaagctggcccccgaggaggaggccggcggcgccggcacccccgtgatcaccgagatcttcagcctgggcggcaccagattcagagacaccgccgtgtggctgcccagaagcaaggacctgaagaagcccggcgccagaaagcagtag

SEQ ID NO: 275640 - protein, 960 aa, Artificial Sequence
  derived and/or modified sequence
MYVIMWITYMAFLLVFFGAFFAVWCYRKRYFVSEYTPIDSNIAFSVNASDKGTAWLLTSTFPSSPVLPGEASCCDPVSAAFEGCLRRLFTRWGSFCVRNPGCVIFFSLVFITACSSGLVFVRVTTNPVDLWSAPSSQARLEKEYFDQHFGPFFRTEQLIIRAPLTDKHIYQPYPSGADVPFGPPLDIQILHQVLDLQIAIENITASYDNETVTLQDICLAPLSPYNTNCTILSVLNYFQNSHSVLDHKKGDDFFVYADYHTHFLYCVRFINFVKNYKNPNLTISFTAERSIEDELNRESDSDVFTVVISYAIMFLYISLALGHMKSCRRLLVDSKVSLGIAGILIVLSSVACSLGVFSYIGLPLTLIVIEVIPFLVLAVGVDNIFILVQAYQRDERLQGETLDQQLGRVLGEVAPSMFLSSFSETVAFFLGALSVMPAVHTFSLFAGLAVFIDFLLQITCFVSLLGLDIKRQEKNRLDIFCCVRGAEDGTSVQASESCLFRFFKNSYSPLLLKDWMRPIVIAIFVGVLSFSIAVLNKVDIGLDQSLSMPDDSYMVDYFKSISQYLHAGPPVYFVLEEGHDYTSSKGQNMVCGGMGCNNDSLVQQIFNAAQLDNYTRIGFAPSSWIDDYFDWVKPQSSCCRVDNITDQFCNASVVDPACVRCRPLTPEGKQRPQGGDFMRFLPMFLSDNPNPKCGKGGHAAYSSAVNILLGHGTRVGATYFMTYHTVLQTSADFIDALKKARLIASNVTETMGINGSAYRVFPYSVFYVFYEQYLTIIDDTIFNLGVSLGAIFLVTMVLLGCELWSAVIMCATIAMVLVNMFGVMWLWGISLNAVSLVNLVMSCGISVEFCSHITRAFTVSMKGSRVERAEEALAHMGSSVFSGITLTKFGGIVVLAFAKSQIFQIFYFRMYLAMVLLGATHGLIFLPVLLSYIGPSVNKAKSCATEERYKGTERERLLNF

SEQ ID NO: 275641 - DNA, 423 bp, Artificial Sequence
  derived and/or modified sequence
atggactgcaaaagcccaaagcgcgccaacatctgccctcacctcccgggaggcggcctcttctcaacccctccttcccaggctgcctggcgaaccctgctcacagcactgtgtttcccagggcctacatgtaccggacccatgcgcgagggaccaagggccgtgtacaacccaccaagagctcaccgaaacagcagcgataattgtgtgatgaagcacctgctctgcgccggggataaaaatggaacaagaagacatgcccttccctcacctctggaaggctcttttcagccgggccggcagatcccgcccccacagacacccagtacagatccccagactcttcccctcagctttagaagtcttctcaggtgtcatcagctgtgcgctgcatcgttacccccttctctgaaactcccctag

SEQ ID NO: 275642 - DNA, 1857 bp, Artificial Sequence
  derived and/or modified sequence
atgcccgccggcctgaccgagcccgccggcgccgccccccccgccgccgtgagcgccagcggcaccgtgaccatggcccccgccggcgccctgcccgtgagagtggagagcacccccgtggccctgggcgccgtgaccaaggcccccgtgagcgtgtgcgtggagcccaccgccagccagcccctgagaagccccgtgggcaccctggtgaccaaggtggcccccgtgagcgccccccccaaggtgagcagcggccccagactgcccgccccccagatcgtggccgtgaaggcccccaacaccaccaccatccagttccccgccaacctgcagctgccccccggcaccgtgctgatcaagagcaacagcggccccctgatgctggtgagcccccagcagaccgtgaccagagccgagaccaccagcaacatcaccagcagacccgccgtgcccgccaacccccagaccgtgaagatctgcaccgtgcccaacagcagcagccagctgatcaagaaggtggccgtgacccccgtgaagaagctggcccagatcggcaccaccgtggtgaccaccgtgcccaagcccagcagcgtgcagagcgtggccgtgcccaccagcgtggtgaccgtgacccccggcaagcccctgaacaccgtgaccaccctgaagcccagcagcctgggcgccagcagcacccccagcaacgagcccaacctgaaggccgagaacagcgccgccgtgcagatcaacctgagccccaccatgctggagaacgtgaagaagtgcaagaacttcctggccatgctgatcaagctggcctgcagcggcagccagagccccgagatgggccagaacgtgaagaagctggtggagcagctgctggacgccaagatcgaggccgaggagttcaccagaaagctgtacgtggagctgaagagcagcccccagccccacctggtgcccttcctgaagaagagcgtggtggccctgagacagctgctgcccaacagccagagcttcatccagcagtgcgtgcagcagaccagcagcgacatggtgatcgccacctgcaccaccaccgtgaccaccagccccgtggtgaccaccaccgtgagcagcagccagagcgagaagagcatcatcgtgagcggcgccaccgcccccagaaccgtgagcgtgcagaccctgaaccccctggccggccccgtgggcgccaaggccggcgtggtgaccctgcacagcgtgggccccaccgccgccaccggcggcaccaccgccggcaccggcctgctgcagaccagcaagcccctggtgaccagcgtggccaacaccgtgaccaccgtgagcctgcagcccgagaagcccgtggtgagcggcaccgccgtgaccctgagcctgcccgccgtgaccttcggcgagaccagcggcgccgccatctgcctgcccagcgtgaagcccgtggtgagcagcgccggcaccaccagcgacaagcccgtgatcggcacccccgtgcagatcaagctggcccagcccggccccgtgctgagccagcccgccggcatcccccaggccgtgcaggtgaagcagctggtggtgcagcagcccagcggcggcaacgagaagcaggtgaccaccatcagccacagcagcaccctgaccatccagaagtgcggccagaagaccatgcccgtgaacaccatcatccccaccagccagttcccccccgccagcatcctgaagcagatcaccctgcccggcaacaagatcctgagcctgcaggccagccccacccagaagaacagaatcaaggagaacgtgaccagctgcttcagaagcaccttcatctgcgtgtactag

SEQ ID NO: 275643 - DNA, 1857 bp, Artificial Sequence
  derived and/or modified sequence
atgcctgcaggcctcactgaacccgctggtgcagcaccgccagcagccgtgagtgccagcgggaccgttaccatggcacccgccggagccctgcccgtccgagtagagtcaaccccagttgcgctgggggcagtgactaaagcccccgtgtcagtgtgcgtggaaccaaccgctagtcagcccctccgctctcccgttggaaccctcgtaaccaaagtggcgcctgtcagtgctccacctaaggtcagttcaggtcccaggctaccagcgccacagatcgtggcagtgaaggcccctaatacaacaacgattcaatttcctgccaaccttcagctgccccctggtaccgtgctgataaagagcaactcggggccactcatgctggtgtccccacagcaaaccgtgacacgcgccgaaaccacatccaatatcacgagtcgacctgccgtccccgccaatccccagacagtgaaaatttgcaccgtgcctaattccagctctcagcttattaagaaggtagccgtcacccccgtgaagaagctcgcccaaattgggacgaccgttgttacgactgtgcccaaaccctcttctgtccagtcggtcgcggtacctacctctgtcgtcaccgtaacgccaggaaagccgctcaacactgtcacaaccttgaagccctcatccctgggtgccagcagtacacctagcaacgaacccaacctcaaggcagaaaattctgctgccgtacaaataaatctatcacctactatgttagaaaatgttaaaaaatgtaagaacttcctggccatgctcataaagcttgcatgttccggctctcagagtcctgagatgggccagaacgtcaagaagctcgtggaacaactcctcgatgccaagattgaggcagaagagtttacccgcaagctctacgtggagctgaaatcctctccacagccccacttggtgccattcctgaagaagtcagtggttgcactaagacagttgctgcctaattcacagagcttcatccagcaatgcgtgcagcaaacctccagtgacatggttattgcaacttgcaccacaacagtcacaacctctccggtcgttaccacaacggtatcttcctcacagagtgagaaaagtatcatcgtgtcgggcgccacagctccccgtactgtgtccgtgcaaaccctgaatccccttgccggtccagtcggcgccaaagcaggcgtggtaactctgcactccgtcggccctactgcagctactggcgggaccacagctggcaccggcctgttgcagacctccaagcctctagtgacctcggtggccaacacggtcacaaccgtgagtctacagcccgagaaaccagtagtttctggaacagccgtgaccttgtcactccccgccgtcacgttcggagagacatctggagccgctatttgtttgccgagcgtaaagccggtggtgagctccgcgggcaccacctcagataagcctgtcatcggcacaccagtgcaaatcaaactggcccagccagggcctgtgctgagtcagccagcagggatccctcaggcagtccaggtgaaacagctggtggttcaacagccgtctggcggtaatgagaaacaggtcacaacaatcagccacagtagcacactaacaatccagaaatgcggacagaagaccatgcccgtcaacaccataattcctacatctcaattcccccctgcatctatcctcaaacaaatcactttacctgggaataagattctgtctctccaggcctcgccaacccagaaaaacagaatcaaagagaacgtcacaagctgtttcagatctactttcatttgtgtgtactag

SEQ ID NO: 275644 - DNA, 1857 bp, Artificial Sequence
  derived and/or modified sequence
atgcctgctggcctgacagagcctgctggagctgcccctcctgctgctgtgtctgccagcggcaccgtgaccatggccccagctggggccctgcctgtgcgggtggagagcacccctgtggccctgggcgctgtgaccaaggcccctgtgtctgtgtgtgtggagcccacagccagccagcccctgcggagccctgtgggcaccctggtgaccaaggtggcccctgtgtctgccccacccaaggtgagcagcggcccccggctgcctgccccccagatcgtggccgtgaaggcccccaacaccaccaccatccagtttcctgccaacctgcagctgcccccaggcaccgtgctgatcaagagcaacagcggccccctgatgctggtgagcccccagcagacagtgaccagggctgagaccaccagcaacatcaccagcaggcctgctgtgcctgccaacccccagacagtgaagatctgcaccgtgcccaacagcagcagccagctgatcaagaaggtggccgtgacccctgtgaagaagctggcccagatcggcaccaccgtggtgaccaccgtgcccaagcccagctctgtgcagagcgtggccgtgcccacctctgtggtgacagtgacccctgggaagcccctgaacacagtgaccaccctgaagcccagcagcctgggcgccagcagcacccccagcaatgagcccaacctgaaggccgagaacagcgctgctgtgcagatcaacctgagccccaccatgctggagaatgtgaagaagtgcaagaacttcctggccatgctgatcaagctggcctgcagcggcagccagagccctgagatgggccagaatgtgaagaagctggtggagcagctgctggatgccaagattgaggccgaggagttcaccaggaagctgtatgtggagctgaagagcagcccccagccccacctggtgcccttcctgaagaagtctgtggtggccctgcggcagctgctgcccaacagccagagcttcatccagcagtgtgtgcagcagaccagcagtgacatggtgattgccacctgcaccaccaccgtgaccaccagccctgtggtgaccaccaccgtgagcagcagccagagcgagaagagcatcatcgtgtctggggccacagcccccaggacagtgtctgtgcagaccctgaaccccctggccggccctgtgggcgccaaggccggcgtggtgaccctgcacagcgtgggccccacagctgccactggaggcaccacagctggcaccggcctgctgcagaccagcaagcccctggtgacctctgtggccaacacagtgaccaccgtgtccctgcagcctgagaagcctgtggtgtctggaacagctgtgaccctgagcctgcctgctgtgacctttggagagaccagcggggccgccatctgcctgcccagcgtgaagcctgtggtgagcagcgctggcaccaccagtgacaagcctgtgattggcacccctgtgcagatcaagctggcccagcccggccctgtgctgagccagcctgctggcatcccccaggccgtgcaggtgaagcagctggtggtgcagcagcccagcggcggcaatgagaagcaggtgaccaccatcagccacagcagcaccctgaccatccagaagtgtggccagaagaccatgcctgtgaacaccatcatccccaccagccagttccccccagccagcatcctgaagcagatcaccctgcccggcaacaagatcctgagcctgcaggccagccccacccagaagaaccgcatcaaggaaaatgtgaccagctgcttccgcagcaccttcatctgtgtgtactag

SEQ ID NO: 275645 - DNA, 1857 bp, Artificial Sequence
  derived and/or modified sequence
atgcccgccggcctgaccgagcccgccggcgccgccccccccgccgcagtgtccgctagcggcactgtgactatggctcccgcaggcgctctccctgttcgggtggagagtacaccagtggccctcggggctgtcaccaaagcacccgtgtcagtttgcgtggagcctaccgcctcccagccccttcggtcccccgtgggcaccctggttacaaaagtggcacccgtctcggctcctcctaaggtctctagcgggcctagactgcccgcaccacagattgttgctgttaaagcaccgaacaccacgacaatccagtttccggctaacctgcaactgcctcccggaaccgtccttataaagtccaactccggccctctcatgctggtgtcccctcagcagacagtgacaagggcagagaccaccagcaatatcacctcacggcccgccgtgcccgcaaacccgcagactgtgaagatatgcacagtgcccaactcctcctctcagttgattaagaaagtggccgtcacccccgtgaaaaagctggcccagatagggaccaccgtggtcaccaccgtcccaaagcccagcagtgttcagtccgttgcagtcccaacaagcgtggttacagtaacccctggaaagccacttaacacagtgaccactctcaagccctcaagcctgggcgcgagcagtactccatccaatgagcctaatttgaaggcggagaacagcgccgccgtccagatcaacctttcccccaccatgttagagaatgtgaaaaaatgtaaaaattttctggccatgctcatcaaactcgcgtgctcaggctctcagtctcccgaaatgggccagaacgttaaaaagttggtggaacagcttctcgatgccaaaatcgaggctgaagaatttaccaggaagctctatgtagagctgaagtcgtccccgcagcctcatctcgtcccctttctcaagaagtccgtggtcgctctccgccagcttttgccgaattcacaatctttcatccagcagtgtgtacagcagaccagtagcgatatggtgattgcaacttgtactacaaccgtgacaacatccccagtcgtgacaaccacagtgtcctcctcgcagtcggaaaaatccatcattgtctctggagcaacggccccacggaccgtcagcgtgcaaaccctcaaccccctcgctgggccggtcggagcaaaggctggggtggtgactcttcactcagtgggacccactgccgctaccggtggcactacagccggcacaggcctgctccagacctccaaaccgctcgtgacctccgttgccaacaccgtcacaacagtttcactccagcctgagaagcccgtcgtgtcaggtaccgcagtcacgttatccttacctgctgtaacctttggcgaaacgtccggcgccgcgatctgcctgcccagcgtcaagcctgtggtgagctctgctggaaccacttctgacaagcccgtcattgggacacccgtgcagattaagcttgcacagcctgggccagttctttcccaaccagctggtatcccccaggccgttcaagtgaaacagcttgtggtccagcagccctctggaggaaatgaaaaacaggttaccaccatttctcactcaagtactcttacgattcagaaatgcggacaaaagaccatgccagtgaacacaatcataccgacttcccagtttccccccgcatcaatcctcaagcagataacactacctggaaataagattctgtccctccaggccagccccacccagaagaacaggatcaaagaaaacgtaacgtcctgtttcagaagcactttcatttgcgtgtactag

SEQ ID NO: 275646 - DNA, 1857 bp, Artificial Sequence
  derived and/or modified sequence
atgccagcgggactgacagaaccagctggagctgccccacctgcagctgtgagtgcatcaggtaccgtgacaatggcaccggcaggcgcactccctgtcagggtcgagagtactcctgtggctctcggagcagtgacaaaggctcccgtatccgtctgcgtggagccaaccgcgtcccagcctcttcgttccccagtcggcacactggttacgaaggtcgcacccgtgtctgccccacctaaggttagttcgggtccacgcttacccgcaccccagattgtggcagtaaaagcccctaacaccacaacaatccagttccccgctaatctgcaacttcctcctggcactgtactgatcaagagcaatagtggtccacttatgttggtgtctccacagcagaccgttacacgggctgagacaacttccaacatcaccagtcgtccagccgtccctgccaaccctcagacagtgaagatctgtactgtccccaatagtagcagccagttgatcaaaaaagtggccgtaacccccgtgaagaagctcgctcagattgggaccactgtggtgactaccgtgccgaaaccttcatctgtgcagagcgtcgccgtacccactagcgttgttacagtcacaccgggtaaacctctcaataccgttaccacccttaagccgtcttctctaggagcctccagcactcctagtaatgaacccaatcttaaggcagagaattcagccgctgtccaaattaatctcagtccaacaatgttagagaatgtaaaaaaatgcaaaaattttttagccatgttgatcaagctggcctgttccggaagccagtccccggagatgggccaaaatgtcaaaaaactggtcgaacagcttttagatgcgaagatcgaagccgaggagttcacacggaaactatacgtggaactgaagtcgtcaccacagcctcacctggtgccctttctgaagaaatccgtcgtggccctccgtcagctcctgcccaatagtcagtcctttattcagcagtgtgttcagcagacatctagtgacatggtgatcgccacctgcacaaccacagtaacaactagcccagttgtcactacgaccgtgagtagttcccagtccgaaaaatcaatcattgtatccggagccactgccccaagaaccgtcagcgtgcaaaccctgaacccactggcaggtcctgtgggcgcaaaggccggtgtcgtgaccttacactccgtcgggccaacagctgccactggcggtacgactgctggtacgggactccttcagacatccaaacctctggtgactagtgtcgccaatacagtaactacagtcagcctgcagcctgagaagccggtcgtttccggcactgcagtgacactgtccctgccagcggtgacatttggcgagacttccggggcagctatatgcctgcctagcgtgaaaccagtggtctctagtgccggtaccacctctgacaaacccgtcattggaacaccagtgcagattaagctggctcagcccggtcccgtgctctcacaaccagctggtattcctcaggccgttcaggttaaacagctcgttgtgcagcagccctcgggaggcaacgagaagcaggtgacgaccattagccattctagcacactaactatccagaaatgcgggcagaagaccatgcctgttaatacaatcatacccaccagtcagttcccccctgccagcatccttaagcagatcacgctgccaggcaacaagatactatctcttcaggcctccccaacccaaaagaacagaattaaggagaacgtgacttcgtgttttaggtccacctttatctgcgtttactag

SEQ ID NO: 275647 - DNA, 2346 bp, Artificial Sequence
  derived and/or modified sequence
gtggctatataaacatggctggcgtggccgcgcggcggggccgtgccaatcgcgcgtagggggctgtgggcactcggggttcgtagttttgaaatttctggcgggggagcagctgcgcagttaggctcgaggtgtgagcgacgaccttccgggagccgcaagtccaggctcccccgcagcgggacccgagcctgaggcgcagggctgaggcagcgcacgtgtgagcgccgctgaggaagctgcgagaggtcgggcgggtgtcgctccgggggcagcccaggctcgcgcggacgagaggaaggtccgggacgcgcgtgtcctgccgtgcagcgggcgcccgtcactgacttcgctgctgcggcccccgcgcctctccccagcgatgctgtggaacccgaaccgcaccggagtcggctgccgcgcgccaagcctcccctcacctctgctcccggaaccgcagcgccaaagctgccgctgagcccctgggggatgcccgccggcctcaccgaacccgccggcgccgctcccccggctgctgtgagcgcctcggggaccgtgaccatggccccggccggggcgctgccggtgcgggtggagagcactccggtggccctgggcgccgtgactaaggctcctgtcagcgtctgcgtggagcccacggcgtcccagcccctgcggtcccccgtggggaccctggtgaccaaagtggctccggtcagcgcccctcctaaagtcagcagcggccctaggctgcctgctcctcagatagtcgccgtgaaagcccccaacaccacgacaatccagtttcctgctaatttgcagcttcctccaggaaccgttttgattaaaagtaacagtggtccgttgatgttggtatctcctcagcaaactgtaacaagagccgagaccacaagtaacataacctcaaggccagcagtaccagcgaatcctcaaacagtcaaaatctgtacagtgccgaactctagctcacaattaatcaagaaagtggcagtgacacctgttaaaaaattggcacaaataggaactactgtggtaaccactgttccgaagccttcctcagtacaatctgtggctgtgccaaccagtgtcgtcacagttactcctggaaagccattgaatactgtaactaccctgaagccttcaagtttgggagcatcatccactccttcaaatgagcccaatcttaaagcagagaactcagcagctgttcagattaatctttctccgacaatgctagaaaatgtgaagaaatgcaagaacttccttgcaatgttaataaaactagcatgtagtggatcacagtccccagaaatggggcaaaatgtgaagaagctggtggaacaacttttggatgcaaaaatcgaagcagaagaatttactaggaaactgtatgttgaactcaagtcttcacctcagcctcacctggttccttttcttaagaaaagcgtggttgccttacgacaacttctgcctaactcccagagcttcatccagcaatgtgttcagcagacttctagtgacatggtcattgctacctgtactacaacagtaacaacttctcctgtggtgacaactacagtgtcctcaagccagtctgaaaagtcaattattgtttctggagcaacagcacccagaactgtgtcagtgcaaactttgaacccacttgctggtccagtgggagcaaaagctggagttgtgacacttcattctgtgggcccaactgctgcaacaggaggaacaacagctggaactggtttgcttcagacttcaaaaccacttgtgacatctgtggcaaacacagtgaccacggtctcactgcaacctgaaaagccagttgtctctggaacagcagtaacactgtcccttccagcagtaacttttggagaaacttcaggtgcagctatttgtcttccatctgtgaaacctgttgtttcttctgctgggaccacatctgacaagcctgttattgggactccagttcaaatcaaacttgcccagccgggccctgtcctttcacaaccagctgggattccacaggcagttcaagtcaagcaactagtagttcagcagccttcaggaggcaatgaaaaacaagtgaccacaatttcacattcctcaacattgaccattcagaaatgtggacagaagacgatgccagtgaacaccataatacctactagtcagtttcctccagcttccattctaaagcaaattactctgcctggaaataaaattctgtcacttcaagcatctcctactcagaaaaatagaataaaagagaatgtaacatcatgcttccggtctacttttatatgcgtatattaa

SEQ ID NO: 275648 - protein, 1401 aa, Artificial Sequence
  derived and/or modified sequence
MATLACRVQFLDDTDPFNSTNFPEPSRPPLFTFREDLALGTQLAGVHRLLQAPHKLDDCTLQLSHNGAYLDLEATLAEQRDELEGFQDDAGRGKKHSIILRTQLSVRVHACIEKLYNSSGRDLRRALFSLKQIFQDDKDLVHEFVVAEGLTCLIKVGAEADQNYQNYILRALGQIMLYVDGMNGVINRNETIQWLYTLIGSKFRLVVKTALKLLLVFVEYSESNAPLLIQAVTAVDTKRGVKPWSNIMEILEEKDGVDTELLVYAMTLVNKTLSGLPDQDTFYDVVDCLEELGIAAVSQRHLNKKGTDLDLVEQLNIYEVALRHEDGDETTEPPPSGCRDRRRASVCSSGGGEHRGLDRRRSRRHSVQSIKSTLSAPTSPCSQSAPSFKPNQVRDLREKSSPSGLLTSSFRQHQESLAAERERRRQEREERLQRIEREERNKFSRDYLDKREEQRQAREERYKYLEQLAAEEHEKELRSRSVSRGRADLSLDLTSPAAPACLAPLSHSPSSSDSQEALTVSASSPGTPHHPQASAGDPEPESEAEPEAEAGAGQVADEAGQDIASAHEGAETEVEQALEQEPEERASLSEKERQNEGVNERDNCSASSVSSSSSTLEREEKEDKLSRDRTTGLWPAGVQDAGVNGQCGDILTNKRFMLDMLYAHNRKSPDDEEKGDGEAGRTQQEAEAVASLATRISTLQANSQTQDESVRRVDVGCLDNRGSVKAFAEKFNSGDLGRGSISPDAEPNDKVPETAPVQPKTESDYIWDQLMANPRELRIQDMDFTDLGEEDDIDVLDVDLGHREAPGPPPPPPPTFLGLPPPPPPPLLDSIPPPPVPGNLLVPPPPVFNAPQGLGWSQVPRGQPTFTKKKKTIRLFWNEVRPFDWPCKNNRRCREFLWSKLEPIKVDTSRLEHLFESKSKELSVSKKTAADGKRQEIIVLDSKRSNAINIGLTVLPPPRTIKIAILNFDEYALNKEGIEKILTMIPTDEEKQKIQEAQLANPEIPLGSAEQFLLTLSSISELSARLHLWAFKMDYETTEKEVAEPLLDLKEGIDQLENNKTLGFILSTLLAIGNFLNGTNAKAFELSYLEKVPEVKDTVHKQSLLHHVCTMVVENFPDSSDLYSEIGAITRSAKVDFDQLQDNLCQMERRCKASWDHLKAIAKHEMKPVLKQRMSEFLKDCAERIIILKIVHRRIINRFHSFLLFMGHPPYAIREVNINKFCRIISEFALEYRTTRERVLQQKQKRANHRERNKTRGKMITDSGKFSGSSPAPPSQPQGLSYAEDAAEHENMKAVLKTSSPSVEDATPALGVRTRSRASRGSTSSWTMGTDDSPNVTDDAADEIMDRIVKSATQVPSQRVVPRERKRSRANRKSLRRTLKSGLTPEEARALGLVGTSELQL

SEQ ID NO: 275649 - DNA, 4828 bp, Artificial Sequence
  derived and/or modified sequence
gctgcggctgcggcctcccctgcgcgcagctacccgggcgtcccggcccgcggccccgctaaccccggggcccgcgcccccgcggcagggatgcatcatggccacgctggcttgccgggtgcagttcttggacgacacggaccctttcaacagcaccaacttccccgagcccagccggccgccgctgttcacgttccgcgaggacctcgcgctcggcacccagctggcgggggtccataggctgctgcaggcgccgcacaagctggatgactgtactctgcagctctctcacaatggcgcctacctggatttggaggccaccctggcagagcagcgggatgagttggaaggcttccaggatgacgccgggcggggcaagaagcacagcatcatcctaaggacgcagctgtctgtgagggtccatgcctgcatcgaaaaactatacaactccagcggacgagatttgagaagggccctcttctccctgaagcagatatttcaggatgacaaggatttggtgcatgaatttgtagtggctgaaggtctgacatgtttgatcaaggtgggagctgaggctgatcagaactatcagaactacatcttaagggctttgggccagattatgttgtatgtggatggaatgaatggagtaataaaccgcaatgaaaccattcagtggctgtacactctcattgggtcaaagttccgcctggtggtgaagacagccctgaagctgctgctcgtctttgtagagtactcggagtccaacgcacctctcctaattcaggctgtcactgctgttgacacgaaaagaggggtcaaaccttggtcaaatatcatggaaatcctggaggaaaaagatggagttgatacggagctactggtttatgcaatgactttggtgaacaagacgttatcaggactaccagaccaagacaccttctacgacgtcgtggactgcctggaggagctgggcattgctgctgtgtcccagaggcacttgaacaagaaagggactgacctggacttagtggagcaactcaacatttatgaggtggcgctcaggcacgaggatggcgatgagaccacggagccaccccccagtgggtgccgggaccggaggagggccagcgtgtgttccagtggcggaggcgagcaccggggcctggaccgcagaaggagccgcaggcactcggtgcagagcatcaagagcaccctgtcggcccccaccagtccctgctcccagtcagctcccagcttcaagcccaaccaagtgcgagatctgcgtgaaaagtcatcaccgagtggtcttctcacatcatccttcaggcagcaccaagagtcactggcagcagagagagagaggcggcggcaggagagagaagaaaggttgcagagaatagagcgggaagaaagaaacaaattcagccgagattatttagacaaaagagaggagcaaaggcaagcaagagaagaaagatacaaatacttggaacagttggcagctgaggagcacgagaaggagctgagaagccggagtgtgagccggggcagagccgacctctccttggacctgacctcgccagcagccccagcctgcctggctcctctgagccatagcccctcatcttcagactctcaagaggctctcacggtgtctgcctcctccccaggaacccctcaccatccccaagcaagtgccggggatcctgaacccgaatcagaggcagaaccggaagcagaggcaggggcggggcaggttgctgatgaagctggccaggacatagcctctgcccacgagggtgcagagactgaagtggagcaggcactagagcaagagccggaagaaagagcctccctcagtgaaaaagagaggcagaacgagggggtgaacgagagggacaactgctctgcctccagcgtctcgtcctccagcagcacgttggagagggaggagaaggaggacaagctctccagggacaggacaactggtttgtggcccgcaggtgtccaggatgcaggtgtaaatggacagtgtggcgacatcctcaccaacaaacggttcatgcttgacatgctgtatgcccataacaggaagtctccggatgatgaggagaagggggatggggaggctgggaggacccagcaggaggcagaggcggtagccagccttgctaccaggatatccaccctgcaggccaactctcagacccaggatgagagtgtcaggagggtggatgtcggctgtttggacaatcggggcagtgtgaaagcatttgctgagaaattcaacagtggggacctggggagaggttccatctcccctgatgctgagcccaatgacaaggtcccagaaacagcgccggtgcagccgaagacagagtctgattacatctgggaccagctcatggccaatccaagagagctcagaatccaagacatggatttcactgacctgggggaggaggatgacattgatgtcctagatgtggacctgggtcacagggaggcccctgggccacctcccccacccccacccacctttctgggtttgccgcccccaccccctccgcccctgttggacagcattcctccccctcctgtccctggtaatttattggttcctcctcctccagtgttcaacgctcctcagggcttagggtggtcccaggtacccaggggtcagcccacattcactaagaaaaagaagaccatccgtttgttctggaatgaagttcggccttttgactggccatgtaaaaacaaccgacgctgcagagaattcctgtggtcaaaactggaacccattaaggtggacacttccagactggagcacctgtttgagtctaaatccaaggaactgtctgtctcaaagaaaactgctgcagatggaaaaaggcaagagatcattgttctggattccaagaggagtaacgccatcaatattggtctgacggtgctgccccctccaaggacgattaagatcgccattttgaattttgatgagtatgccttaaacaaagaaggaatcgagaaaattctaacgatgattcccaccgatgaggagaagcagaaaatccaggaagctcagctggccaaccctgaaatccccctgggcagtgcagagcagttcctcctcaccctgtcctccatcagcgagctctctgcacgacttcacctctgggcattcaaaatggattatgaaactacagaaaaggaagtagcagaaccactcctggacctgaaggaaggaatagaccagttggagaacaataaaaccttgggctttatcctgtctactctcttagccattgggaactttctaaatggaactaatgccaaagcgtttgagttaagctacctcgagaaggttccagaagtcaaagacacagtgcacaagcagtcgcttctccaccatgtgtgcaccatggtggtagaaaacttcccagacagctccgatctgtactcggagatcggggccatcaccaggtcagccaaggttgactttgatcaacttcaggataatttatgtcagatggagagaagatgcaaagcttcatgggatcacctcaaggcaattgcaaaacatgaaatgaaaccagttttaaaacaacggatgtcagagttcctgaaagactgtgcagagcgaattataattttaaagattgtccatagaaggataatcaacagattccactcctttttactctttatgggccatccaccttatgcaattcgggaagtgaacataaacaaattctgcaggattattagtgaatttgcactagagtatcgcacaaccagggaaagggttttgcagcagaaacagaaacgggccaaccacagagagagaaataagaccagagggaagatgatcaccgattctggcaagttctccggcagttctccggcgcccccaagccagccgcagggtctgagctatgcggaggacgcggctgagcacgagaacatgaaggctgtgctgaaaacctcgtccccctccgtggaggacgccacccccgcgctgggcgtccgcacacgcagccgagcaagccgaggatccactagttcctggactatgggaactgatgactcgcccaatgtcacagatgatgcagctgatgagatcatggaccgcatcgtcaagtcagccacccaagtgcccagtcagcgagtggtgccgagggagaggaaacgatcccgggccaaccggaaatctttgcgaagaaccctgaagagcggcctgaccccagaagaagccagagccctgggcttggttggcacctcggagttgcagctgtgacactcataggttactcccaggagtgtgctgagcagaaggcaagctcttgctggatgaaacccctccaggtggggttggggagacttgatattcacatccaacagtttgaaaagggagagctcaattcccagcgtcaccccatggcttgtgttgcctgctacgcattgacttggatctccaggagtcccctgcacataccttctccatcgtgtcagctgtgtttctcttgattccgtgacacccggtttattagttcaaaagtgtgacaccttttctgggcaaggaacagcccctttaaggagcaaatcacttctgtcacagttattatggtaatatgaggcaatctgattagcttcacagactgagtctccacaacaccaaaatatccagatgtaaaccccaaacttgtacacaaaagaaagcacagattgtttacctgttgtggattttagatgtaacaaatgtttatacaaatacatacatgtacaccatgtttcaaatactaaataaatagagtttaatgcc

SEQ ID NO: 275650 - DNA, 4206 bp, Artificial Sequence
  derived and/or modified sequence
atggctacactcgcctgtcgcgtgcaatttctggacgataccgatcctttcaacagcaccaattttccggaaccatctcgccccccgctgttcacctttagggaagaccttgcactaggaactcagctggccggcgttcatagactactgcaggctccacacaaattggacgattgcacactgcagctcagtcacaacggtgcctatttggacctggaggccacactggccgaacagcgagatgagctggaagggttccaggacgatgcgggtcgcggcaagaaacacagtatcattctgagaacccagctttctgtgagggtgcacgcctgtatagagaagctgtacaattcttctggccgggatcttagacgagcacttttctccctaaagcaaattttccaagatgataaagatctcgtgcatgagttcgtagtagctgagggccttacgtgcctgatcaaagtcggggcagaagccgatcagaactaccagaactacattttgcgagctctggggcagatcatgctctacgtcgacgggatgaacggagtgattaaccgaaatgaaactattcagtggctatatactctcataggaagtaaattcagattggtggtcaagactgccctgaaacttctgctagtttttgtggagtatagcgaatccaacgccccactccttatccaggctgtcaccgctgtggacactaaacgaggtgtcaagccttggtccaatataatggaaattctcgaggagaaagatggggtggacaccgagcttctagtgtacgcaatgactctagtgaacaagacgctctccgggctacccgaccaggatacattctatgacgtggtggactgcctcgaagagctggggattgccgcagtgagtcagcgccacctgaacaagaaagggaccgacctcgatttggtagaacaactgaacatctatgaagtcgctttgagacacgaggatggcgacgagactactgaaccacctccaagtgggtgcagggacaggcgtagggctagcgtctgtagcagtgggggcggggagcaccgagggttggatcgccgacgctcccgacgtcactcagtgcaatcaataaaaagcacgctaagtgctcctactagcccatgctcacaaagtgcaccttctttcaagcccaatcaggtgagggacctgcgcgagaaatcctccccttcaggattactgacgtcatcctttcggcagcaccaggagtcccttgccgctgagagggaacgccgccgccaggagagggaggaaaggctgcagcgaatcgaacgagaagagaggaataagttctcacgggattatctggacaagcgagaggagcagcgtcaagcccgagaagaaagatataaatatcttgagcaactggctgcagaggagcacgagaaggaactgcgaagtcgctctgtcagcagagggcgggccgacctgtctcttgatctaacgagcccagcggcgcccgcatgcctcgcacccctttcccattctcctagctcttccgattcacaggaagcactcaccgtgtcagccagcagcccgggcacaccccaccatccccaggcaagtgcaggcgatcctgagccagagtccgaggctgagccggaggccgaagcaggagccggccaggtagccgacgaggccggccaggatattgcgtccgcacacgaaggcgctgagacagaggtcgaacaggctctggagcaggaaccagaggagcgagcctccctttcagagaaggagcggcagaatgagggggtaaatgaaagggacaattgctctgccagctcggtgtcttcctcatcttccaccctggaaagagaggagaaagaggataagctgtccagggatagaaccacaggcctttggccagctggcgtgcaagatgccggagtcaatggccagtgtggggatattctcaccaataagagatttatgctcgacatgctctatgcccacaaccgcaagtctccggacgacgaggaaaaaggcgatggcgaggcgggccggacacaacaggaagcagaagccgtggcaagcttggctacacgcatctccactctgcaagcaaattctcagacccaggacgagagtgtcagaagggtggatgtggggtgtctcgacaacaggggtagcgtcaaggcgtttgctgagaaatttaactcaggcgatctcggcagaggttccatttcccccgacgccgagcctaatgacaaagtgccagaaaccgcaccggtgcagccaaagacggagtctgattatatatgggaccagctcatggctaaccctcgggaactacggatccaggatatggattttacagatctaggcgaggaggatgatatcgacgtcctggatgtcgatttaggacatagagaggcgcctgggccgcccccaccccctcctcctacttttctgggtctgcctcccccccctccgcccccgctactagactctatacctccgccccccgtgccaggaaaccttctggtcccgccgccccctgtctttaatgcaccccaaggcctgggttggtctcaggtcccgagaggacaaccaacattcaccaagaagaaaaagactatcagactgttctggaacgaagtgaggcctttcgactggccatgtaagaataaccgcagatgcagggagttcctgtggtcaaaactggaaccgatcaaggtggacacctctcgacttgagcacctgtttgagtctaaaagcaaggagctcagcgtgtccaaaaaaaccgccgctgacggaaaacggcaagaaatcatcgttctggacagtaagcgctccaatgcgataaacattggcctcaccgtgctgccacccccgcgaactatcaaaattgctatcttaaacttcgatgaatatgccttaaataaggaggggatcgagaaaattctcactatgatccccaccgatgaggaaaaacagaagatccaggaggcacagctggccaatccagaaatccccctgggcagcgccgaacaatttctgctgacgctgtcaagcataagcgaactctccgcccgcctccatctgtgggccttcaagatggactatgagactaccgagaaggaggtggccgagcctttgctggacctgaaagagggcatagatcaattggagaacaataaaacccttggtttcatcctctctacccttcttgcgatcgggaattttttgaacggcaccaacgcaaaggcttttgaactgtcctatctggagaaggtccctgaggtgaaagacacggttcacaaacagtcattgctgcaccacgtatgtactatggttgtggagaactttccagacagcagtgacctgtactccgagattggagccatcacacgctctgctaaagtggacttcgatcagttacaggataacctgtgtcagatggaaaggagatgcaaagcgtcttgggatcatctgaaggcgatcgctaagcatgagatgaaacccgtcttaaagcagagaatgtctgagtttctcaaggattgtgctgagcgtataattatactcaagatcgtgcaccgtcggatcataaatagatttcactcctttttgcttttcatgggacaccccccgtacgctataagggaggtcaacatcaataaattttgtaggatcatttctgagtttgctcttgagtacagaaccactagggaaagggtgctacagcagaaacagaagagggccaatcacagagaacggaacaagacccgcggcaaaatgatcacagattcgggcaagttttctggcagtagtcccgctccacctagtcagccacaggggctgtcatacgctgaagacgcggctgaacacgagaatatgaaggctgtgctcaaaaccagctccccctcggtggaagatgccacgcctgctctcggagtgcggacccgctcaagagcatcccgagggtccacatcctcatggacgatgggaaccgacgactctcccaatgttacagacgacgccgccgacgaaattatggaccggatcgtcaaatccgccacacaggtaccatctcaaagagtcgtgcctcgagaaaggaaacgctctcgcgcaaataggaagtcgctgcggcgtactctgaagtcaggcctgacgccagaggaggcacgagctctggggctcgtgggaacgtccgaacttcagctgtag

SEQ ID NO: 275651 - DNA, 4206 bp, Artificial Sequence
  derived and/or modified sequence
atggccaccctggcctgccgggtgcagttcctggatgacacagaccccttcaacagcaccaacttccctgagcccagccggcccccactcttcaccttccgggaggacctggccctgggcacccagctggccggcgtgcaccggctgctgcaggccccccacaagctggatgactgcaccctgcagctgagccacaacggggcctacctggacctggaggccaccctggccgagcagagagatgagctggagggcttccaggatgatgctggccggggcaagaagcacagcatcatcctgcggacccagctgtctgtgcgggtgcacgcctgcatcgagaagctgtacaacagcagcggccgggacctgcggcgggccctcttcagcctgaagcagatcttccaggatgacaaggacctggtgcatgaatttgtggtggccgagggcctgacctgcctgatcaaggtgggcgctgaggccgaccagaactaccagaactacatcctgcgggccctgggccagatcatgctgtatgtggatggcatgaatggagtcatcaacagaaatgagaccatccagtggctgtacaccctgattggcagcaagttccggctggtggtgaagacagccctgaagctgctgctggtgtttgtggagtacagcgagagcaatgcccccctgctgatccaggccgtgacagctgtggacaccaagaggggcgtgaagccctggagcaacatcatggagatcctggaggagaaggatggagtggacacagagctgctggtgtatgccatgaccctggtgaacaagaccctgagcggcctgcctgaccaggacaccttctatgatgtggtggactgcctggaggagctgggcattgctgctgtgtcccagaggcacctgaacaagaagggcacagacctggacctggtggagcagctgaacatctatgaggtggccctgcggcatgaagatggagatgagaccacagagcccccacccagcggctgccgggacagaagaagagcctctgtgtgcagcagcggcggcggggagcaccggggcctggacagaagaagaagcagaagacacagcgtgcagagcatcaagagcaccctgagcgcccccaccagcccctgcagccagagcgcccccagcttcaagcccaaccaggtgcgggacctgcgggagaagagcagccccagcggcctgctgaccagcagcttccggcagcaccaggagagcctggccgctgagcgggagcggcggcggcaggagcgggaggagcggctgcagagaattgagcgggaggagaggaacaagttcagccgggactacctggacaagcgggaggagcagaggcaggcccgggaggagcgctacaagtacctggagcagctggccgctgaggagcacgagaaggagctgcggagccgctctgtgtcccggggccgggctgacctgagcctggacctgaccagccctgctgccccagcctgcctggcccccctgagccacagccccagcagcagtgacagccaggaggccctgactgtgtctgccagcagccctggcaccccccaccacccccaggccagcgctggggaccctgagcctgagagcgaggccgagcctgaggccgaggccggggccggccaggtggctgatgaagctggccaggacatcgccagcgcccatgaaggagctgagacagaggtggagcaggccctggagcaggagcctgaggagcgggccagcctgtctgagaaggagcggcagaatgaaggagtgaatgaaagagacaactgcagcgccagctctgtgagcagcagcagcagcaccctggagcgggaggagaaggaggacaagctgagccgggacaggaccaccggcctgtggccagctggggtgcaggatgctggggtgaatggccagtgtggggacatcctgaccaacaagcgcttcatgctggacatgctgtatgcccacaacaggaagagcccagatgatgaggagaagggagatggagaggccggccgcacccagcaggaggccgaggccgtggccagcctggccacccgcatcagcaccctgcaggccaacagccagacccaggatgaatctgtgagaagagtggatgtgggctgcctggacaacagaggctctgtgaaggcctttgctgagaagttcaacagcggggacctgggccggggcagcatcagcccagatgctgagcccaatgacaaggtgcctgagacagcccctgtgcagcccaagacagaaagtgactacatctgggaccagctgatggccaacccccgggagctgcgcatccaggacatggacttcacagacctgggggaggaggatgacattgatgtgctggatgtggacctgggccaccgggaggcccctggccccccacctcctcctccacccaccttcctgggcctgcccccacctcctcctccacccctgctggacagcatccccccacctcctgtgcccggcaacctgctggtgcccccacctcctgtgttcaatgccccccagggcctgggctggagccaggtgccccggggccagcccaccttcaccaagaagaagaagaccatccgcctcttctggaatgaggtgcggccctttgactggccctgcaagaacaacagacgctgccgggagttcctgtggagcaagctggagcccatcaaggtggacaccagccggctggagcacctgtttgagagcaagagcaaggagctgtctgtgtccaagaagacagctgctgatggcaagaggcaggagatcatcgtgctggacagcaagaggagcaatgccatcaacatcggcctgactgtgctgcccccacccaggaccatcaagatcgccatcctgaactttgatgaatatgccctgaacaaggagggcatcgagaagatcctgaccatgatccccacagatgaggagaagcagaagatccaggaggcccagctggccaaccctgagatccccctgggcagcgctgagcagttcctgctgaccctgagcagcatcagcgagctgagcgcccggctgcacctgtgggccttcaagatggactatgagaccacagagaaggaggtggccgagcccctgctggacctgaaggagggcatcgaccagctggagaacaacaagaccctgggcttcatcctgagcaccctgctggccatcggcaacttcctgaatggcaccaatgccaaggcctttgagctgagctacctggagaaggtgcctgaggtgaaggacacagtgcacaagcagagcctgctgcaccacgtgtgcaccatggtggtggagaacttcccagacagcagtgacctgtacagcgagatcggggccatcaccaggtctgccaaggtggactttgaccagctgcaggacaacctgtgccagatggagcggcgctgcaaggcctcctgggaccacctgaaggccatcgccaagcatgagatgaagcctgtgctgaagcagaggatgtctgagttcctgaaggactgtgccgagcgcatcatcatcctgaagatcgtgcaccggcgcatcatcaaccgcttccacagcttcctgctcttcatgggccaccccccctatgccatccgggaggtgaacatcaacaagttctgccgcatcatcagcgagtttgccctggagtaccgcaccacccgggagcgggtgctgcagcagaagcagaagagggccaaccaccgggagaggaacaagacccggggcaagatgatcacagattctgggaagttcagcggcagcagccctgccccacccagccagccccagggcctgtcctatgcagaagatgctgctgagcacgagaacatgaaggctgtgctgaagaccagcagccccagcgtggaggatgccaccccagccctgggcgtgaggaccaggagccgggccagccggggcagcaccagctcctggaccatgggcacagatgacagccccaacgtgacagatgatgctgctgatgagatcatggaccgcatcgtgaagagcgccacccaggtgcccagccagagggtggtgccccgggagaggaagaggagccgggccaacaggaagagcctgcggaggaccctgaagagcggcctgaccccagaggaggcccgggccctgggcctggtgggcaccagcgagctgcagctgtag

SEQ ID NO: 275652 - DNA, 4206 bp, Artificial Sequence
  derived and/or modified sequence
atggccaccctggcctgccgggtgcagttcctggacgacaccgacccgttcaatagcacaaacttcccggaaccgtctcggcctcccttgttcacgttccgagaggacctggcactcgggacccagctcgctggggtccaccgactcctacaggccccacataaactggatgattgcaccttgcagttgagtcacaacggtgcatacctggacctggaagcgactttggctgaacagagggatgagctcgaaggattccaggacgacgccggtagggggaaaaaacactcaataatattacggacacaactaagcgtgcgggtacacgcctgcattgagaagctctacaacagtagtggacgcgacctccgacgtgctctcttttcgttgaagcagattttccaggatgacaaagatctcgtccatgaattcgtggtggccgaaggcctgacttgtctgatcaaagtgggtgctgaggccgaccagaattatcagaactacatcctgagggctctcggccagattatgctttatgtggatggcatgaacggagtgatcaaccggaatgaaacaatccagtggctgtatacattgatcggtagcaagttccggttggtagtcaagaccgctctcaagttactcctagtgtttgtcgaatattccgagtccaacgcccctctgttaatccaggccgtcactgcagttgacaccaaacgcggcgttaaaccgtggtcaaacataatggagattttagaggaaaaagacggcgtggatacagagctgctcgtctacgccatgaccctcgtaaataagaccctctcaggcctgcccgaccaggatacattctacgatgttgttgactgcctggaggagttaggaattgccgcggtgtcgcagcgccacctaaacaagaagggcacagaccttgacctggttgaacagctcaacatctacgaagtggccctccgtcacgaagatggggatgagaccacagagcccccccctagcgggtgcagggatcggcgacgggcctctgtatgtagttcaggtggcggcgagcaccggggccttgaccgcagacgatccagaaggcattccgtgcagagcattaaatctaccttgtccgctccaactagcccatgctcacaatccgccccctcctttaaaccgaaccaagtgcgcgatctccgcgagaaatcttcccccagcggcttactgacctcctcctttcgccaacatcaagagtcgctggccgccgagagagaaaggcgccggcaggaacgagaagagaggctacagcgtatcgaaagggaggaacggaataaattctcccgcgactacctggacaagcgggaggaacagcggcaggctcgcgaggagcgctacaaatacctcgagcagctggccgcagaggagcacgagaaagagctgcgctctagaagcgttagtagagggcgggctgaccttagtctcgacttgacctcccctgccgcccccgcctgcttagctccgttaagccacagcccctccagctccgacagccaggaggcgttgaccgtcagcgcgtccagtcccggcacacctcatcacccccaggcatcagcaggcgacccagagcccgaaagtgaagccgaacctgaggccgaggcaggggcggggcaagtggccgacgaggccggccaggatatcgcttccgcacacgagggagccgagactgaagtggaacaagcactggagcaggaacccgaggaacgtgcctcacttagcgagaaagaaagacagaacgaaggggttaacgaaagagacaactgcagcgcatcgtctgtgtcaagcagtagttctactctggaacgggaggagaaggaggacaagctgagtcgcgacagaactaccggcttatggccagccggggtacaggatgcgggggtcaatggacagtgtggagatatccttaccaataagagatttatgcttgacatgctgtatgcacacaacaggaagtctcccgatgatgaggaaaaaggtgacggcgaggctggacgaactcagcaggaggctgaagcagttgccagtctggcaacccgcatctcaactctccaggccaactcccagactcaggatgagtccgtcagacgagtggacgtggggtgtcttgacaatcggggtagcgttaaggctttcgctgaaaaatttaattctggcgaccttgggaggggaagcattagtcctgatgcagagccaaatgataaggttcccgagacagccccagtgcagcccaaaacagagtcagactacatttgggaccagcttatggctaacccccgtgaactgcgcatccaagatatggatttcaccgatttgggcgaagaagacgatattgatgtgttggacgtggatttgggccaccgcgaggcacccggtcctccccccccccctccacccacatttctgggtctgccaccccctccgccaccaccgctgctggactctattccgccccctcctgtacctggcaatctcctagtgccaccccccccagtgtttaacgccccccaggggcttggctggagccaggttcccagaggccagcccaccttcacaaagaagaagaagaccattaggctgttttggaacgaggtaaggcccttcgactggccatgtaagaataatagaaggtgccgcgagtttctgtggtcaaagctcgagccaatcaaggtggatacgtcccggctagaacacctgttcgaatctaaatctaaagagctttcggtcagcaagaaaacggctgctgatgggaagcgtcaagaaataatcgtgcttgatagcaaacggtctaatgcaatcaacatcggccttaccgttttgccacctccaagaaccataaaaattgccattctcaactttgacgagtacgcactgaacaaagaaggtatcgagaaaatccttacaatgattcctactgacgaagagaagcaaaaaattcaggaggcccagctggctaatcctgaaattcccctgggcagtgccgaacagttcctcctgaccttgtcgagtatttccgaacttagcgccagacttcacctgtgggcttttaaaatggactatgaaacaaccgaaaaggaggtggcagagccgctcctcgacctgaaggagggtatcgatcagctggaaaacaataagactttaggcttcatattgtccacactgctggcgatcggaaactttctgaatggtacgaatgccaaagccttcgaactgtcttacctggagaaggtgccagaggtgaaggacactgtccacaaacagtccttgctacaccatgtgtgcactatggtcgtcgagaatttccctgactcctctgatttatatagtgagattggggctattacacgttctgcaaaagtggactttgatcagcttcaggataacctctgccaaatggagaggcggtgtaaggcttcttgggaccaccttaaggccatagcaaagcacgagatgaagccagtgctcaagcagcgcatgagtgagtttctcaaagattgcgccgagagaatcatcatcttgaaaattgtgcatcggcgaattatcaaccggttccatagtttcctgctgtttatggggcacccaccttacgctattcgggaggtgaatataaataagttctgtcgcatcatcagtgaatttgctctggagtataggacaactagagaacgggtactacagcaaaaacagaagagagctaatcaccgcgaacgcaacaaaactcgcggcaaaatgattactgactctggtaagttctcaggcagcagccccgcccccccgtcccagccgcagggcttgtcatatgccgaggacgcagcagagcatgagaatatgaaggcagtgttaaagacaagcagtccgagcgtcgaggacgcaacgcctgctctgggggtcagaaccaggtcacgagcatctcggggcagtacatcctcttggacaatgggcaccgacgactctcccaatgtcacagatgatgcggccgatgagattatggaccgaatcgtgaagagcgccacacaggttcccagtcagagagtggtacctagagagaggaaaaggagcagggctaaccgcaagtccctccgccggacactgaagagtggcctgacccctgaagaggcccgtgcactgggccttgtgggcacaagcgaacttcagctatag

SEQ ID NO: 275653 - DNA, 4206 bp, Artificial Sequence
  derived and/or modified sequence
atggccacacttgcttgccgtgtacagtttctggatgataccgacccctttaattctacaaacttccccgagccctctcgaccaccactgttcacgttccgggaagatctcgcattggggacccagctggcaggcgtacaccggcttctgcaggcaccccataagcttgacgactgcacgctgcagctgtcacacaacggcgcatacctcgacttggaggctacattagctgaacaacgcgatgaattggagggattccaggatgacgccggtcgtggtaaaaagcactcaattattttgagaacgcagctgtccgttagagtccacgcctgcattgaaaagctctacaatagctctggcagagacctgcggagagccctcttttcccttaaacagatctttcaggatgacaaggacttggtccacgagtttgtggttgccgaaggcttaacatgtctgattaaagtgggagcagaagcggatcagaattatcagaactatatcctgcgcgctttaggccagattatgctgtacgtggacgggatgaacggtgtaattaataggaatgagacaatccagtggttgtatactcttatcggatcgaagtttcgactggtggttaagacagccctgaagttgctgctggtatttgtggagtactcggagtctaatgcaccgcttctaatccaagccgtgaccgcagttgatacaaagaggggcgtcaaaccatggagtaatattatggagatcctggaagagaaggacggtgtggatacagagcttctagtatacgccatgaccttggtcaacaagaccctgtccggattgccagaccaggatactttctacgatgtggttgattgcctcgaagagctcgggatcgctgctgtgtcgcagagacacctgaataagaaaggtactgacctggatcttgtggagcagctgaacatttacgaggtagcactaaggcacgaagacggcgatgaaacgaccgaaccacccccaagcggctgtcgtgatcgccgaagggcctcagtgtgctctagcggcggtggggagcaccgcggtctggatcgacgcagatcacgaagacattccgtacagagtatcaagtctaccctgtcagctcctactagcccgtgcagtcagtcagccccaagctttaagcccaaccaggtgcgcgatctgcgggaaaagtctagcccctctggcctactgacttcctcatttagacagcaccaagagagtctcgccgctgaaagggaacggcgtcgtcaggagcgggaagaacgcctccagcggatcgaaagagaggagcggaacaaattttctcgggattacctcgacaagagggaagaacagcgtcaagctagagaggagagatacaaatacctggaacagctcgcggcagaagaacatgagaaggagctgagaagccgaagcgtatcgcgtggtcgggctgatctctcactggatctgacaagccctgcagcgccagcatgccttgcacctctgagccactcccctagttcttcggattcacaggaggcacttactgtatccgctagcagccctggaactccacatcacccccaggcttctgccggagatcccgaaccagaaagcgaggctgagccagaggccgaggccggagccggacaggtggcagatgaagccggacaggacattgcctccgcacatgagggcgcagagactgaagtggaacaggccctggaacaggagcccgaggaaagggcttcactgtccgagaaggaacgtcagaacgaaggggtgaacgaacgtgacaattgctcggccagtagtgtgtcaagttcaagcagcacactcgagagggaggaaaaggaggacaaactgtctagggaccgcacaaccgggctgtggccagcaggagtccaagatgccggtgtcaacggacagtgcggcgacattttgaccaataaaaggtttatgctggacatgctctatgcccataatcgcaagtctcctgacgacgaggagaagggcgacggggaagcaggcagaacccaacaggaagccgaagccgttgcttcccttgccactcggatctccacactccaggctaatagccaaactcaggatgagtccgtgagaagggtagacgttggctgcctggataaccggggtagcgtgaaggcctttgccgagaagttcaactctggagacctggggaggggtagtatttcccccgatgcagaacccaacgacaaggttcccgagaccgccccagttcagcctaagacagagagcgattatatttgggatcaattaatggcaaaccctagggaactaaggattcaggatatggacttcaccgacctgggagaggaggatgatatagatgttctggatgtcgaccttgggcacagagaggccccaggcccaccgccacctccgccacccacttttctgggcctcccccctccacctcccccaccgctgctggactctattcctcctcctccggtcccagggaacctcctggtgccaccgcctcccgtatttaacgccccacagggcttaggctggagccaggtacccagggggcaacccacgtttacaaagaagaaaaagacgattcggctgttctggaatgaagtgcgacccttcgactggccttgcaagaacaatagacgatgccgagagtttctctggtctaaactagagccgatcaaagtggatacctcccgtttggaacaccttttcgagtcaaaatctaaggaactgtcagtctcaaaaaagaccgcagccgatggaaagcggcaggagatcattgtcctggacagtaagcgatctaacgccattaacatcggcctgactgttcttccacctcccaggacgatcaagatcgccattcttaactttgacgagtatgcactgaacaaggaagggattgagaaaattctgaccatgatacctactgatgaggagaagcagaaaatccaggaggctcagctcgctaatccagagattccactgggcagcgctgagcaatttttactcaccctctcttcaataagtgaacttagcgcgcgtctacacctgtgggccttcaaaatggattacgaaaccactgaaaaggaggttgctgagcctctgctcgaccttaaggaaggaattgaccagcttgagaataacaagactctgggcttcattctttcaactttgctcgcaatcggtaacttcctcaatggcacgaacgcgaaagcatttgagctgtcttatctggaaaaggtgcctgaagtgaaggacacagtgcacaaacagagtctgctgcaccacgtctgcacaatggttgtggaaaacttccccgatagctcagatctttattctgaaattggggctattactcgcagcgcaaaagtcgacttcgaccagctccaggataacctgtgtcagatggagcggaggtgcaaggcttcctgggaccacctgaaagcgatagcgaaacacgagatgaaaccggttttgaagcaacgcatgtccgagtttttgaaggattgcgcagaaagaattatcatactcaaaatcgtccaccgcagaatcataaaccggttccattctttcctgctattcatgggacacccgccatacgctattcgcgaggtgaacatcaacaaattctgtagaattatcagcgaatttgctctcgagtaccgaaccacaagagagcgggtgctgcagcagaaacaaaagcgtgccaaccaccgagagaggaataagacgcgcggtaagatgatcacagatagcggtaagttcagtggctcatcgcccgcaccacccagtcagccacagggattgtcctacgccgaggatgcagccgagcacgaaaatatgaaagctgtgttgaagacctcctcaccaagcgtggaagacgcgaccccggcactaggagtaaggaccaggagtcgtgcttcaagagggtcaacttcgtcttggaccatgggcacagacgactcacccaacgtgaccgatgatgccgcagacgaaatcatggaccgcatcgttaagagtgcaacccaggtccccagccagagggtggtgccacgtgagagaaaacgtagccgagccaatcgtaagtccctccggaggacccttaaatcaggactaacaccagaagaagctagggcacttggcctggtgggcacgagcgagctccagctatag

SEQ ID NO: 275654 - DNA, 4206 bp, Artificial Sequence
  derived and/or modified sequence
atggccaccctggcctgcagagtgcagttcctggacgacaccgaccccttcaacagcaccaacttccccgagcccagcagaccccccctgttcaccttcagagaggacctggccctgggcacccagctggccggcgtgcacagactgctgcaggccccccacaagctggacgactgcaccctgcagctgagccacaacggcgcctacctggacctggaggccaccctggccgagcagagagacgagctggagggcttccaggacgacgccggcagaggcaagaagcacagcatcatcctgagaacccagctgagcgtgagagtgcacgcctgcatcgagaagctgtacaacagcagcggcagagacctgagaagagccctgttcagcctgaagcagatcttccaggacgacaaggacctggtgcacgagttcgtggtggccgagggcctgacctgcctgatcaaggtgggcgccgaggccgaccagaactaccagaactacatcctgagagccctgggccagatcatgctgtacgtggacggcatgaacggcgtgatcaacagaaacgagaccatccagtggctgtacaccctgatcggcagcaagttcagactggtggtgaagaccgccctgaagctgctgctggtgttcgtggagtacagcgagagcaacgcccccctgctgatccaggccgtgaccgccgtggacaccaagagaggcgtgaagccctggagcaacatcatggagatcctggaggagaaggacggcgtggacaccgagctgctggtgtacgccatgaccctggtgaacaagaccctgagcggcctgcccgaccaggacaccttctacgacgtggtggactgcctggaggagctgggcatcgccgccgtgagccagagacacctgaacaagaagggcaccgacctggacctggtggagcagctgaacatctacgaggtggccctgagacacgaggacggcgacgagaccaccgagcccccccccagcggctgcagagacagaagaagagccagcgtgtgcagcagcggcggcggcgagcacagaggcctggacagaagaagaagcagaagacacagcgtgcagagcatcaagagcaccctgagcgcccccaccagcccctgcagccagagcgcccccagcttcaagcccaaccaggtgagagacctgagagagaagagcagccccagcggcctgctgaccagcagcttcagacagcaccaggagagcctggccgccgagagagagagaagaagacaggagagagaggagagactgcagagaatcgagagagaggagagaaacaagttcagcagagactacctggacaagagagaggagcagagacaggccagagaggagagatacaagtacctggagcagctggccgccgaggagcacgagaaggagctgagaagcagaagcgtgagcagaggcagagccgacctgagcctggacctgaccagccccgccgcccccgcctgcctggcccccctgagccacagccccagcagcagcgacagccaggaggccctgaccgtgagcgccagcagccccggcaccccccaccacccccaggccagcgccggcgaccccgagcccgagagcgaggccgagcccgaggccgaggccggcgccggccaggtggccgacgaggccggccaggacatcgccagcgcccacgagggcgccgagaccgaggtggagcaggccctggagcaggagcccgaggagagagccagcctgagcgagaaggagagacagaacgagggcgtgaacgagagagacaactgcagcgccagcagcgtgagcagcagcagcagcaccctggagagagaggagaaggaggacaagctgagcagagacagaaccaccggcctgtggcccgccggcgtgcaggacgccggcgtgaacggccagtgcggcgacatcctgaccaacaagagattcatgctggacatgctgtacgcccacaacagaaagagccccgacgacgaggagaagggcgacggcgaggccggcagaacccagcaggaggccgaggccgtggccagcctggccaccagaatcagcaccctgcaggccaacagccagacccaggacgagagcgtgagaagagtggacgtgggctgcctggacaacagaggcagcgtgaaggccttcgccgagaagttcaacagcggcgacctgggcagaggcagcatcagccccgacgccgagcccaacgacaaggtgcccgagaccgcccccgtgcagcccaagaccgagagcgactacatctgggaccagctgatggccaaccccagagagctgagaatccaggacatggacttcaccgacctgggcgaggaggacgacatcgacgtgctggacgtggacctgggccacagagaggcccccggccccccccccccccccccccccaccttcctgggcctgcccccccccccccccccccccctgctggacagcatcccccccccccccgtgcccggcaacctgctggtgccccccccccccgtgttcaacgccccccagggcctgggctggagccaggtgcccagaggccagcccaccttcaccaagaagaagaagaccatcagactgttctggaacgaggtgagacccttcgactggccctgcaagaacaacagaagatgcagagagttcctgtggagcaagctggagcccatcaaggtggacaccagcagactggagcacctgttcgagagcaagagcaaggagctgagcgtgagcaagaagaccgccgccgacggcaagagacaggagatcatcgtgctggacagcaagagaagcaacgccatcaacatcggcctgaccgtgctgcccccccccagaaccatcaagatcgccatcctgaacttcgacgagtacgccctgaacaaggagggcatcgagaagatcctgaccatgatccccaccgacgaggagaagcagaagatccaggaggcccagctggccaaccccgagatccccctgggcagcgccgagcagttcctgctgaccctgagcagcatcagcgagctgagcgccagactgcacctgtgggccttcaagatggactacgagaccaccgagaaggaggtggccgagcccctgctggacctgaaggagggcatcgaccagctggagaacaacaagaccctgggcttcatcctgagcaccctgctggccatcggcaacttcctgaacggcaccaacgccaaggccttcgagctgagctacctggagaaggtgcccgaggtgaaggacaccgtgcacaagcagagcctgctgcaccacgtgtgcaccatggtggtggagaacttccccgacagcagcgacctgtacagcgagatcggcgccatcaccagaagcgccaaggtggacttcgaccagctgcaggacaacctgtgccagatggagagaagatgcaaggccagctgggaccacctgaaggccatcgccaagcacgagatgaagcccgtgctgaagcagagaatgagcgagttcctgaaggactgcgccgagagaatcatcatcctgaagatcgtgcacagaagaatcatcaacagattccacagcttcctgctgttcatgggccaccccccctacgccatcagagaggtgaacatcaacaagttctgcagaatcatcagcgagttcgccctggagtacagaaccaccagagagagagtgctgcagcagaagcagaagagagccaaccacagagagagaaacaagaccagaggcaagatgatcaccgacagcggcaagttcagcggcagcagccccgccccccccagccagccccagggcctgagctacgccgaggacgccgccgagcacgagaacatgaaggccgtgctgaagaccagcagccccagcgtggaggacgccacccccgccctgggcgtgagaaccagaagcagagccagcagaggcagcaccagcagctggaccatgggcaccgacgacagccccaacgtgaccgacgacgccgccgacgagatcatggacagaatcgtgaagagcgccacccaggtgcccagccagagagtggtgcccagagagagaaagagaagcagagccaacagaaagagcctgagaagaaccctgaagagcggcctgacccccgaggaggccagagccctgggcctggtgggcaccagcgagctgcagctgtag

SEQ ID NO: 275655 - protein, 466 aa, Artificial Sequence
  derived and/or modified sequence
MEYESYYFVKFQKYPKIVKKSSDTAENNLPQRSRGKTRRMMNDSCQNLPKINQQRPRSKTTAGKTGDTKSLNKEHPNQEVVDNTRLESANFGLHISRIRKDSGEENAHPRRGQIIDFQGLLTDAIKGATSELALNTFDHNPDPSERLLKPLSAFIGMNSEMRELAAVVSRDIYLHNPNIKWNDIIGLDAAKQLVKEAVVYPIRYPQLFTGILSPWKGLLLYGPPGTGKTLLAKAVATECKTTFFNISASTIVSKWRGDSEKLVRVLFELARYHAPSTIFLDELESVMSQRGTASGGEHEGSLRMKTELLVQMDGLARSEDLVFVLAASNLPWELDCAMLRRLEKRILVDLPSREARQAMIYHWLPPVSKSRALELHTELEYSVLSQETEGYSGSDIKLVCREAAMRPVRKIFDALENHQSESSDLPRIQLDIVTTADFLDVLTHTKPSAKNLAQRYSDWQREFESV

SEQ ID NO: 275656 - protein, 538 aa, Artificial Sequence
  derived and/or modified sequence
MELSYQTLKFTHQAREACEMRTEARRKNLLILISHYLTQEGYIDTANALEQETKLGLRRFEVCDNIDLETILMEYESYYFVKFQKYPKIVKKSSDTAENNLPQRSRGKTRRMMNDSCQNLPKINQQRPRSKTTAGKTGDTKSLNKEHPNQEVVDNTRLESANFGLHISRIRKDSGEENAHPRRGQIIDFQGLLTDAIKGATSELALNTFDHNPDPSERLLKPLSAFIGMNSEMRELAAVVSRDIYLHNPNIKWNDIIGLDAAKQLVKEAVVYPIRYPQLFTGILSPWKGLLLYGPPGTGKTLLAKAVATECKTTFFNISASTIVSKWRGDSEKLVRVLFELARYHAPSTIFLDELESVMSQRGTASGGEHEGSLRMKTELLVQMDGLARSEDLVFVLAASNLPWELDCAMLRRLEKRILVDLPSREARQAMIYHWLPPVSKSRALELHTELEYSVLSQETEGYSGSDIKLVCREAAMRPVRKIFDALENHQSESSDLPRIQLDIVTTADFLDVLTHTKPSAKNLAQRYSDWQREFESV

SEQ ID NO: 275657 - DNA, 2903 bp, Artificial Sequence
  derived and/or modified sequence
agtaactgactacttttctcccttctctagggtcctagcacagtgtctgatggagctttcctaccagaccctgaaattcacgcatcaggcgcgggaagcgtgcgagatgaggacagaagcacgacgaaaaaatcttctcattttgatttcgcattatttaacacaagaagggtatatcgatacagcaaatgctttggagcaagaaactaaactggggttacgacggtttgaagtttgtgacaacattgatcttgaaactattttgatggaatatgagagttattattttgtaaaatttcagaaataccccaaaattgtcaaaaagtcatcagacacagcagaaaataatttaccgcaaagaagtagagggaagaccagaaggatgatgaacgacagttgtcaaaatcttcccaagatcaatcagcagaggccccggtccaaaaccacagcggggaagacaggggacaccaaatcgctcaataaggagcatcctaatcaggaggtagttgataacactcgcctggaaagtgccaacttcggcctacatatatcaagaatccgtaaagacagtggagaggaaaatgcccacccacgaagaggccaaatcattgacttccaagggctgctcacagatgccatcaagggagcaaccagtgaacttgccttgaacaccttcgaccataatccagacccctcagaacgactgctgaaacctctgagtgcatttattggcatgaacagtgagatgcgagaattggcagccgtggtgagccgggacatttatctccataatccaaacataaagtggaatgacattattggacttgatgcagccaagcagttagtcaaagaagctgttgtgtatcctataaggtatccacagctatttacaggaattctttctccctggaaaggactactgctgtacggccctccaggtacaggaaagactttactggccaaagctgtggccactgaatgtaaaacaaccttctttaacatttctgcatccaccattgtcagcaaatggagaggggattcagaaaaactcgttcgggtgttatttgagcttgcccgctaccacgccccatccacgatcttcctggacgagctggagtcggtgatgagtcagagaggcacagcttctgggggagaacatgaaggaagcctgcggatgaagacagagttactggtgcagatggatgggctggcacgctcagaagatctcgtatttgtcttagcagcttctaacctgccgtgggagctggactgtgccatgttacgccgcctggagaagaggattctggtcgatctccccagccgggaggccaggcaggccatgatctaccactggctgcctcctgtgagcaagagcagggccttggagctgcacacagagctggagtacagtgtgctgagccaggagactgagggctactcaggctcagatattaagctcgtctgcagggaagcagccatgcggcccgtgaggaagatctttgatgcacttgaaaatcaccagtcagaaagcagcgacttacccaggatccagttggatatagtaaccactgccgactttctggatgtgctaactcacaccaagccctccgcaaagaatctggctcagagatactcagactggcaaagagagttcgagtctgtctgaaaccacatttaccctgacctggccacaaaggcaaccacaaagacctcctagtttattaatgtccgtgggagaacaaaatgattggaatggaaaagagaaaattatttttgaagactggattaacttgagccactgtattgttttggatagctgagatatatttattaacttaccattatcgatgtcagcaaaatattgagagtttcagttacatacatatatgtgctattgggtcatacaatggagatttttctgacaattagactccataaaattttaatgaacaattttctgtaatgttactcatttgtaaactttttaagaaaaagatgtacttagaaaagttgtgttggccacacacaggatgaccctgagttggggcagccaagtagaagctaagcttgacaggcactgcccagctgacagtcccagggtgaaggaggacggaagcagggaaggcaatgcagtctgtttctcattccggacaatattctgaatctcatcagctccccctaattctgactccatccagctttgtcagcagcaaacccctcccaaactaagccccactcagaaatgtcactgagcattctgatgctagagctaatagccagggtgactagcacaccatcaccatcagctgccagtctgattgttttgggttctggcccccaataacatcttttcactcttcacacctcacatccggtgtgctctgcccttctctttccattgccgcagcttctcatcagatccaaagcttaggatggggcacctaagcttcgagaacattcatcccaagtcttccctgctcttaggctcttccccctctccttaaggggttataaacaactagacgcatctctctcagaaacccacaatccgaggcatctactttcaacccttgataaattttgaaggcttctactaagtaatgccacttcttttcccccactagaacttacctatgggaaatcaccttcttttctcttccttgccttgtcttcatcatccctgcagacagactcttcaagaggaaaaacctccagaaagagacactttggatagctaagtatcccaaaggattttacccttttaaacaaaaccaaagcatttttttcggtatcgattattttgagattattctcaaatgcctctttaaacatcatttcatggaaaatgtcaaattgaaaatataccttatttaacaaattgaaaataaaaaagatttcatctc

SEQ ID NO: 275658 - protein, 248 aa, Artificial Sequence
  derived and/or modified sequence
MDQRQRRILGQPLSIPTSQPKQKRTSMISFFSKVSWKLRFQKREPLKNVFFILAERARDPSAKKRHMAMRNLGTMAYEAPDKVRKYKKIVLDLLVYGLYDPVNLEVIHESMKTLTVVLGKIQGKGLGSFFIDITLQTRTLLDDENDSLRYSAFVLFGQLAAFAGRKWKKFFTSQVKQTRDSLLIHLQDRNPQVAKACKTTFQACSPYLKLKEEYSFQSEEDQRNTKLYQQLSHYHPEILQFFYANKIL

SEQ ID NO: 275659 - DNA, 747 bp, Artificial Sequence
  derived and/or modified sequence
atggaccaaagacagagaaggattcttgggcaaccactgagcatccccacatcccaaccaaagcagaagcgcacttctatgatttcattcttctccaaggtatcatggaaattacgatttcaaaaacgcgaacccctcaagaacgtatttttcatactcgccgagcgcgcccgcgacccatcagccaagaagcgtcacatggcaatgagaaacctcggcactatggcgtacgaagcaccagacaaagtgcgcaagtataagaaaatcgtgctcgatctgttagtatacggactgtacgatcctgtcaacctggaggtgatccatgaatctatgaaaaccttgacggtggtccttggcaagattcagggaaaggggctggggagcttctttatcgatattaccctgcagaccaggactctgctagatgatgagaacgacagcctcagatacagcgccttcgtgcttttcgggcagctcgctgccttcgccggccgcaaatggaaaaaattctttacttcgcaggtgaagcagactagggatagtttgctgatccacttacaagatcgaaatccccaggtggctaaagcgtgtaaaaccacgttccaagcctgcagcccgtatttgaaactgaaagaggagtacagctttcagtcggaggaagatcagagaaataccaagctttatcagcagctcagccattatcatcccgaaatcctccagttcttttacgccaacaaaatactttag

SEQ ID NO: 275660 - DNA, 747 bp, Artificial Sequence
  derived and/or modified sequence
atggaccagcgccaaaggcgcatactggggcaacccctaagcatccctactagccaaccaaagcagaagaggacctctatgatttcttttttttcaaaagtaagctggaaactcagattccaaaaacgcgaacccctgaagaacgtcttctttatcctcgctgagagggccagggatcctagcgcaaaaaaaagacacatggccatgcgaaatctgggaactatggcctatgaagctcccgacaaggtgaggaaatacaagaagatcgttctggatctgctggtatatgggctctacgatccagtaaacctggaagtgattcatgaaagtatgaagacacttactgtggtgctgggaaaaattcagggcaaaggtctgggatccttctttatagacatcacactacagactagaacacttctggacgacgagaacgattccctgcgctactcggccttcgtactgttcggacagctcgcagcatttgcgggtagaaagtggaagaaattcttcacgagtcaggtgaagcagactcgggacagcctacttatccatctccaggaccggaatcctcaagtggccaaagcctgcaaaacaacctttcaggcctgtagcccctacctgaaactgaaagaggagtacagttttcaatctgaggaggatcagagaaatactaagctctatcagcagcttagccattaccacccggagatattgcagtttttctatgcaaacaaaattctttag

SEQ ID NO: 275661 - DNA, 747 bp, Artificial Sequence
  derived and/or modified sequence
atggaccagaggcagaggcgcatcctgggccagcccctgagcatccccaccagccagcccaagcagaagaggacctccatgatctccttcttcagcaaggtgtcctggaagctgcgcttccagaagcgggagcccctgaagaatgtgttcttcatcctggccgagcgggcccgggaccccagcgccaagaagaggcacatggccatgaggaacctgggcaccatggcctatgaggccccagacaaggtgaggaagtacaagaagatcgtgctggacctgctggtgtatggcctgtatgaccctgtgaacctggaggtgatccacgagagcatgaagaccctgactgtggtgctgggcaagatccagggcaagggcctgggcagcttcttcatcgacatcaccctgcagaccaggaccctgctggatgatgaaaatgacagcctgcgctacagcgcctttgtgctgtttggccagctggccgcctttgctggcaggaagtggaagaagttcttcaccagccaggtgaagcagacccgggacagcctgctgatccacctgcaggacaggaacccccaggtggccaaggcctgcaagaccaccttccaggcctgcagcccctacctgaagctgaaggaggagtacagcttccagagcgaggaggaccagaggaacaccaagctgtaccagcagctgagccactaccaccctgagatcctgcagttcttctacgccaacaagatcctgtag

SEQ ID NO: 275662 - DNA, 1156 bp, Artificial Sequence
  derived and/or modified sequence
attcatattcacccttcatgaggatgagcacagagcaagaagctagccacgctgggctcctcattgcctagctcaggaattcagggctgggaaaatttagccgagtcatcacatttggctactacccgggaaagcagccctcccgagtcaggaacgggctccggttcatcacgtggcagccgcctgcaggagccgcagttccatggaccaaagacagaggagaatcctgggccagcccctttccatccctacttcccagcccaagcagaaaaggacatcaatgatatctttcttttccaaggtctcttggaaactgaggttccagaagcgggagcctctgaagaatgtgtttttcatcttggcagaaagagctcgggaccccagtgctaaaaagcgtcacatggcaatgagaaacttgggaaccatggcctatgaagcccctgacaaggtgagaaagtataagaaaattgtcctcgacctgctggtgtatggactgtatgaccctgtgaatttggaagtcatccatgagagtatgaagactctgaccgtcgttctgggcaagatccaggggaaaggtttgggttccttcttcatagatatcacccttcagaccaggactttattagatgacgagaacgacagtctgagatactcggcctttgttttgtttgggcaattggctgcctttgccgggaggaaatggaaaaaatttttcaccagtcaggttaagcagacacgagattccctcctgatccatttacaggacagaaatccccaggttgccaaggcttgcaaaacaacatttcaagcctgttctccatatctgaaactaaaggaggaatacagcttccagagtgaagaagatcaaaggaacactaagctctaccagcagctgagccactatcatccagagatcctgcagttcttctacgcaaataaaattctgtaagcgcagagcagcagggaaatggttctgtatgagtgcattgctgagccatcatgttcccctgttttatctcactggatgcctcttctcactgcttgcctcttgggattgtaatgggaaagagggtgctgggagagcaatcaaaggcaaaaataatacatggaattgtatgattttatctaaagtaaaattctagactgctttcactta

SEQ ID NO: 275663 - DNA, 5257 bp, Artificial Sequence
  derived and/or modified sequence
aacgggccttggcagggaggttttgtttggtgcagaggaaaggtccccagaattgccatctgcagaatttctgcagaaagtgtcgaccaggctggcatgagggaagaaggaggggaaatcacagcaaggagaaggaaaaacacctcagcatggcgtggggaagcaaaggaattcagggctgggaaaatttagccgagtcatcacatttggctactacccgggaaagcagccctcccgagtcaggaacgggctccggttcatcacgtggcagccgcctgcaggagccgcagttccatggaccaaagacagaggagaatcctgggccagcccctttccatccctacttcccagcccaagcagaaaaggacatcaatgatatctttcttttccaaggtctcttggaaactgaggttccagaagcgggagcctctgaagaatgtgtttttcatcttggcagaaagagctcgggaccccagtgctaaaaagcgtcacatggcaatgagaaacttgggaaccatggcctatgaagcccctgacaaggtgagaaagtataagaaaattgtcctcgacctgctggtgtatggactgtatgaccctgtgaatttggaagtcatccatgagagtatgaagactctgaccgtcgttctgggcaagatccaggggaaaggtttgggttccttcttcatagatatcacccttcagaccaggactttattagatgacgagaacgacagtctgagatactcggcctttgttttgtttgggcaattggctgcctttgccgggaggaaatggaaaaaatttttcaccagtcaggttaagcagacacgagattccctcctgatccatttacaggacagaaatccccaggttgccaaggcttgcaaaacaacatttcaagcctgttctccatatctgaaactaaaggaggaatacagcttccagagtgaagaagatcaaaggaacactaagctctaccagcagctgagccactatcatccagagatcctgcagttcttctacgcaaataaaattctgtaagcgcagagcagcagggaaatggttctgtatgagtgcattgctgagccatcatgttcccctgttttatctcactggatgcctcttctcactgcttgcctcttgggattgtaatgggaaagagggtgctgggagagcaatcaaaggcaaaaataatacatggaattgtatgattttatctaaagtaaaattctagactgctttcacttatttcatttcctccccatacaaatttgatgagcaggtacacactttctttaaaacattccaagtgtatatagattcagtgcttatttctcagctttttctttcttaagttcatctctgtcacctagcttttatttttaatactcaatttctgaggcttaggagaatacttgttaccttaagcgtttttttgtttttttgttgttgttgttttgtttttttttagtgtatttgctattgatactttgctattgatacctttacttgccaagatttatttaaagttggccaagataccaagaaggtggcttgcaggggcatctttggcttctcataattttaaacagtcattgctttcaagatcatgctaaacaagaattaatagagagaaaaaaatctataaagcatgtgttgaaaatcctcaggctcatgataacttacgggataacaatagtaggtaacaccgagtgcttacaattcagtgggcacggtcaaagtgctttttgtaagttctatttaatacttgcgacaaccctgagatagtaagtattattattgttctcattttatagatgagaaagctaacacatagggaaattaggtaactttccccagataactcagtaaacagtggagctggaattcaaacatgtacggtctgacttcttgagcccatactcaataatcatgccatcctgcctttccatggaataactgatggatggttagaaatgttaaaaacaaagcaaatgcaaacatctctgcttctgctcctctactaagcccagttaacttttgattttatatgtactaagtatacatttttattaatttatgtgagctgagtgtttttattaattactttttggctattaatgtcaattattttggtgatcaatcctagttatccaaggagtcacatcactcgtaaaaattacaagaaaaatctctaagtccctctcaccctccctctaaccagattgcatcccaagcttctatagaaactctggtaccacccctgaattcagtatccaggccacacccggagcgttttgttcaagacaatttaaaacacgggggattataaaagctatagctggatcttaagtggcattctgagaatgaggaactcaattttctgctgtagctcccagggacagggtggtgtgacacagatgcggggatgaggagagacctaggcgagatgaggatgtgggagatggcagacagagtggcaagtgccaggcaggaatggattttcttccttcctgttctgaatctgaagaacatgacagcaagagattttaggagggacacaggctcacgagcaaatgggtggttctgagctgtaagccccctgcccctccctagcacccactccccggatgctggcctctttgaaattttgttgcaaggttggtttaaacttgatgcagttccattaagtgatcagtgagtggtctgagaaatggctgcatgtggctggcattcaaaaaggtggggatagggtgagatgggtggggttacgtgctctggagtagaaaaacctatgcagttaatgtccctctgtcggttaaaattgtggaagatgcggttggattatttgactttaagattcaatggtaggcttttattttggtggcccccaatgagtcatgcctcctgatactcatgtctttatttagtcccttctgtttgaatctgggctgcctttgtgacttgctttaatcaggagattgtgataaatggcactgtgccgggcatagaaaccctggcagtttcctcgtttgaattgtgggggaagccagctgccacataaggagttgaactaccaggaacaaatgagagtgcctgagatcaccatgtgaaggagaacggagacacccaacccacagcagagtctgaggcccggacacatgacacaagttgtcccttccagccagacccgagctgttgaagctactccagctgacaccatacggaaaagagacgagcgtctccatcaagcctgtgtcagttgcagaagcatgaacaaagaatcaaatgattgttgttttaagtcattaacctttgggataatttgtcacactgcaataagtaaccagagaagattccttattattaactgttgtcttggctaattttgttttgctcttcataagtcctctttgagtttaaattctatttccagaaatttatgttatcatgaaatttggtggcaagagcaagggactatgtttttttgtttgtttgtttctgtttctcaccatacctaccacagagcctggccatgtgattaaggaacatttgctgaatgactaaatgattccaaattgtagagggaataaagtccaatgtccagtctgccatttcaggctttcaaccttcgttttcttctgttactctctttgcttcagacaagtttgggtcctttctcttctctcaacatgtcttgttctcctataccccctcacctttgctcagtctgctatttctgtgttgagtcccctccctgctcacctgtacacacccacctggaatcacatgcacacacacacacacacatttcacgtgtatctcttatctgtactccaatgcctaggtcaaagtcctgatccccccaatcaggggagagctcaagtctctgaattcccagaacattctagcaatattataccacttatatcttatctgaaaagtttttttttgtatatggctttatgtttttttttttatcctgttagattgaaactacagaaggcagggctgtatcttgtacatcattgtatctccccggtgactgcaaaagtactctgtaaatgaatgttgattagggggaaaaatgtcagaaagtcatctgaagctgtcattccttactgggaggagcccattttgacaaatgagggtcaccaatttcattccttataaccaatgtacaggttacttttatgcttgtgcatttcaagtttccccttccccacgtttatctgaatgccaacccaaaggtaatgttttgacatttcttaattttgaacattaattttgaaccttattgagcagttgaatgaaagaaagaaaaaaggaatgttcaagtgccccgaccctcatgctaagtgcccagggtagagctttgcttggtccctgtgtctctggtgctcatgagataggtctttctttctttatttttatttttgagatggagcctcactctgtcacccaggctggagtgcaatgacacgatctcggctcactgcaacctccacctcctgggttcaagcgattctcctgtctcagcctcctgagtagctgggattacaggtgcctgccaccatggctggctaatttttgtgtttttagtagagacggggtttcaccatgttggccaggctggtctcaaactcctgacctcaagtgatctgctcaccttggtctcccaaagtgctgggattacaggcgtgagccaccgctcctggctgagataggtctttcttaaaggggagagggaagtggtggagagagaggagagaaaatgacaaaggaggaggctgagaatctaacaggtgtgaccaattctgctactgaatgagagcagaagcctgtgaacttccagttaatagaccacttaattgggggaacgcttcacacgttataaaaaagcactagaatgttttgaaagcgagaaacaacagctgtgtagggtagctagcagttagtgttgtacagaagacagatatttgtgcatttctgcattttctaagtttgctgcaatgagcatgtattactttcatagttataaaacacatgcaaaatgcccttttaaaatgaaaaaaaagtccatgagtgtaagtgatatatatgctttggaaagcctgggacggtcattgtttactctcaatagtatgtgtttgcctttgtctttttgagacattttgttttaatctgttgatgacaataacctgttgataatataacttgataacaaataaaatgacttatgattgattatcatttt

SEQ ID NO: 275664 - DNA, 747 bp, Artificial Sequence
  derived and/or modified sequence
atggaccagcggcagcggcggatcctgggccagcccctgagcatccccacttcccaacctaagcaaaaacgcacatccatgattagcttcttctcgaaggtgtcttggaaactcagattccagaagagggagcctctgaaaaacgtgttctttattctggcggagagagctagggatccctcagcgaaaaagcggcatatggccatgagaaacctggggacaatggcttatgaagcgcccgacaaagtccggaaatataaaaagattgttcttgacctgctcgtttatggcctgtacgaccccgtgaaccttgaggtgattcacgagagcatgaaaacacttacggttgtcctcggcaagatccaggggaagggcctcggttcttttttcatcgacattacacttcagacccgtactctgctggatgatgaaaatgactccttgaggtacagcgcattcgtactctttgggcagctggctgctttcgccgggcggaagtggaaaaagttcttcactagtcaggtgaaacagacacgggattcacttttaatccaccttcaggatcgcaacccacaagtagctaaggcatgtaagaccacctttcaggcatgcagtccttatcttaaattgaaagaggaatattcttttcagtcagaagaggaccagagaaataccaagctgtaccaacagctctcccactatcacccagaaatacttcaattcttttatgccaacaagatattgtag

SEQ ID NO: 275665 - DNA, 747 bp, Artificial Sequence
  derived and/or modified sequence
atggaccagcggcagcggcggatcctgggccagcccctgagcatcccgacttcccagccgaagcagaaacggacctcgatgatatcctttttctcaaaagtgtcttggaagttaaggtttcagaaacgggagcccctgaagaacgtgttctttatactggctgaacgtgccagagaccccagtgccaaaaagagacatatggccatgcgaaatctgggtactatggcctacgaggcgcccgacaaagtgagaaagtacaaaaaaatcgtgcttgatctcctcgtctacggactgtatgaccctgttaatctcgaagtgatccacgagagtatgaaaactctgaccgtggtcctcgggaagatacaaggaaaagggctgggcagcttttttattgatatcacactccagactcgcactctacttgatgacgagaacgactctctaagatatagtgccttcgtgttattcggccaactggccgcattcgctggccggaagtggaaaaaattttttacatcacaggtgaagcagacaagagacagcctcttgatccacttacaggatagaaatccgcaggtcgccaaggcgtgcaaaacaacctttcaggcgtgttctccgtatctgaagttaaaagaggagtacagttttcagtcagaggaggatcaacgaaacaccaaactctatcaacaactcagccactatcaccctgaaatcttgcaattcttctacgccaataagattttgtag

SEQ ID NO: 275666 - DNA, 747 bp, Artificial Sequence
  derived and/or modified sequence
atggaccagagacagagacggatcctgggacagccactctctatccctacatcccaacccaaacagaaacgcacttcaatgatttcttttttcagcaaagtaagctggaaattacgctttcagaagcgcgagcctcttaaaaatgtgttttttatactagccgagagggccagggatccctcggctaagaaacgacatatggctatgcgcaacttagggaccatggcttatgaggcccctgacaaagtgaggaagtataaaaaaattgttctcgacctgctcgtgtatggtctctatgaccctgtgaacctggaggtgattcacgagtccatgaaaacgctgactgtggtcttgggcaaaatccagggcaagggcttaggctcatttttcatcgatatcacgctgcagactcggaccctcctcgacgatgagaacgactcattgcggtacagcgcctttgtgctgttcggccagctggctgctttcgccggacgcaaatggaagaagtttttcacatctcaggtaaaacagacaagggatagcctacttattcacctgcaggatagaaatccacaggttgcgaaagcgtgtaaaacaacctttcaagcctgctctccatatttaaagttgaaggaagagtactcctttcaatctgaagaggatcagcgcaatactaaactctatcaacaactgagtcactatcatccagagattctgcaattcttctacgcaaataagattttgtag

SEQ ID NO: 275667 - DNA, 747 bp, Artificial Sequence
  derived and/or modified sequence
atggaccagagacagcgacgcatcctcggacagcccctgtcaataccaacaagccagccaaaacaaaagcgcacttctatgatctctttttttagcaaggtgtcctggaaattgcgcttccagaaacgcgagcccttgaaaaacgtgtttttcattttggcagaaagggcccgtgacccatctgccaagaagaggcacatggcgatgcgcaacctcggcaccatggcctacgaggcgccagacaaagtgcgaaagtacaagaaaatcgtgctggacctgcttgtgtacggtctatacgaccccgtcaacctcgaggtaatacatgaaagcatgaaaaccctgacagtggtgctcgggaaaatacagggtaagggcttaggatcattcttcattgacattactctacagacgaggaccctgctcgacgatgagaacgattctcttcggtattctgcctttgttctgttcggtcagcttgcagcattcgctggtagaaagtggaaaaagttcttcacatcccaagttaagcaaaccagagattccttactcatccacctacaagaccgcaatccccaggtggctaaggcttgtaagactacctttcaagcctgctcgccatatctcaagcttaaggaggagtattcctttcagagtgaagaggatcaacgcaacactaaattgtatcagcaactgtcccattatcaccccgaaattctccagtttttttacgcgaataagatcctatag

SEQ ID NO: 275668 - DNA, 747 bp, Artificial Sequence
  derived and/or modified sequence
atggaccagagacagagaagaatcctgggccagcccctgagcatccccaccagccagcccaagcagaagagaaccagcatgatcagcttcttcagcaaggtgagctggaagctgagattccagaagagagagcccctgaagaacgtgttcttcatcctggccgagagagccagagaccccagcgccaagaagagacacatggccatgagaaacctgggcaccatggcctacgaggcccccgacaaggtgagaaagtacaagaagatcgtgctggacctgctggtgtacggcctgtacgaccccgtgaacctggaggtgatccacgagagcatgaagaccctgaccgtggtgctgggcaagatccagggcaagggcctgggcagcttcttcatcgacatcaccctgcagaccagaaccctgctggacgacgagaacgacagcctgagatacagcgccttcgtgctgttcggccagctggccgccttcgccggcagaaagtggaagaagttcttcaccagccaggtgaagcagaccagagacagcctgctgatccacctgcaggacagaaacccccaggtggccaaggcctgcaagaccaccttccaggcctgcagcccctacctgaagctgaaggaggagtacagcttccagagcgaggaggaccagagaaacaccaagctgtaccagcagctgagccactaccaccccgagatcctgcagttcttctacgccaacaagatcctgtag

SEQ ID NO: 275669 - DNA, 507 bp, Artificial Sequence
  derived and/or modified sequence
atgtgcgtgagaagaagcctggtgggcctgaccttctgcacctgctacctggccagctacctgaccaacaagtacgtgctgagcgtgctgaagttcacctaccccaccctgttccagggctggcagaccctgatcggcggcctgctgctgcacgtgagctggaagctgggctgggtggagatcaacagcagcagcagaagccacgtgctggtgtggctgcccgccagcgtgctgttcgtgggcatcatctacgccggcagcagagccctgagcagactggccatccccgtgttcctgaccctgcacaacgtggccgaggtgatcatctgcggctaccagaagtgcttccagaaggagaagaccagccccgccaagatctgcagcgccctgctgctgctggccgccgccggctgcctgcccttcaacgacagccagttcaaccccgacggctacttctgggccatcatccacctgctgtgcgtggtgaccctgaccagcaacacctag

SEQ ID NO: 275670 - DNA, 507 bp, Artificial Sequence
  derived and/or modified sequence
atgtgtgtgagacgcagcttagttggcctaactttctgtacttgctaccttgcctcttacctgactaataaatacgtactcagcgtcctgaagttcacctacccaacactctttcagggttggcagaccttgatcgggggcctgcttttacacgtctcctggaagttaggatgggttgaaatcaattcaagctcgaggtcccacgtcctggtctggctcccagcatcagtgctatttgtggggataatatacgcggggtcaagagccctttccaggcttgccatacccgtatttctgaccttgcacaatgtggctgaagtaattatctgcgggtatcaaaaatgcttccagaaggagaaaacatcaccagcaaagatatgctcggctcttttgctgctggcagccgcaggctgcctcccgttcaacgattcccagtttaatcctgacggttacttctgggccattatccacctgctttgtgttgtaacgttgactagcaacacgtag

SEQ ID NO: 275671 - DNA, 507 bp, Artificial Sequence
  derived and/or modified sequence
atgtgtgtgcggcgcagcctggtgggcctgaccttctgcacctgctacctggccagctacctgaccaacaagtatgtgctgtctgtgctgaagttcacctaccccaccctcttccagggctggcagaccctgattggaggcctgctgctgcacgtgtcctggaagctgggctgggtggagatcaacagcagcagccgcagccacgtgctggtgtggctgcctgcctctgtgctgtttgtgggcatcatctatgccggcagccgggccctgagccggctggccatccctgtgttcctgaccctgcacaacgtggccgaggtgatcatctgtggctaccagaagtgcttccagaaggagaagaccagccctgccaagatctgcagcgccctgctgctgctggccgccgccggctgcctgcccttcaatgacagccagttcaacccagatggctacttctgggccatcatccacctgctgtgtgtggtgaccctgaccagcaacacctag

SEQ ID NO: 275672 - DNA, 507 bp, Artificial Sequence
  derived and/or modified sequence
atgtgcgtgcggcggagcctggtgggcctgaccttctgcacctgctatctggcctcttatctcactaacaaatatgtgttgtccgtgttgaagttcacgtaccccacactgtttcagggctggcagaccctcattgggggcctgcttctgcacgtttcttggaaactcggatgggtggagattaactcgtctagccgcagccatgtcttagtgtggctgcctgcttctgtgttgttcgtgggaatcatctacgctggatctcgggccctttctcggctggccatccccgtgtttctgacattgcacaacgtagccgaggtgataatttgcggatatcaaaagtgcttccagaaggagaagaccagtcccgccaagatctgttctgcccttcttctcctggccgctgctgggtgcctgccattcaacgacagtcaatttaacccggacggctatttctgggcaatcattcacttactctgcgtggtgaccttgacatctaacacatag

SEQ ID NO: 275673 - DNA, 507 bp, Artificial Sequence
  derived and/or modified sequence
atgtgtgtacggagatccctcgtgggactgactttttgtacgtgctatctggcttcatatctgactaacaagtacgtgttaagcgtacttaagtttacatatcccactctgtttcagggatggcaaacactgatcgggggtctgctgctgcatgtatcgtggaaacttggatgggtcgaaatcaatagttcaagccgctctcacgtcctagtgtggcttccggcttcagttctcttcgtggggatcatctatgctggttcccgtgcgctttctcgcctcgcgatccctgtcttcctgacactgcataacgttgctgaagtgatcatttgcggatatcagaaatgtttccaaaaggagaaaacctcccctgcaaaaatctgctctgcccttcttctgttggccgcagctggctgcctccctttcaacgactcacagttcaacccggacggctacttttgggcaatcatccatcttctgtgcgtggtgacgttaacatccaacacctag

SEQ ID NO: 275674 - protein, 396 aa, Artificial Sequence
  derived and/or modified sequence
RNLNNMVSSFRVSELQVLLGFAGRNKSGRKHDLLMRALHLLKSGCSPAVQIKIRELYRRRYPRTLEGLSDLSTIKSSVFSLDGGSSPVEPDLAVAGIHSLPSTSVTPHSPSSPVGSVLLQDTKPTFEMQQPSPPIPPVHPDVQLKNLPFYDVLDVLIKPTSLVQSSIQRFQEKFFIFALTPQQVREICISRDFLPGGRRDYTVQVQLRLCLAETSCPQEDNYPNSLCIKVNGKLFPLPGYAPPPKNGIEQKRPGRPLNITSLVRLSSAVPNQISISWASEIGKNYSMSVYLVRQLTSAMLLQRLKMKGIRNPDHSRALIKEKLTADPDSEIATTSLRVSLMCPLGKMRLTIPCRAVTCTHLQCFDAALYLQMNEKKPTWICPVCDKKAAYESLILD

SEQ ID NO: 275675 - DNA, 1191 bp, Artificial Sequence
  derived and/or modified sequence
cggaacttgaacaatatggtatctagttttcgggtttcagaactacaggtgttgctcgggtttgcagggcggaacaaaagcggtagaaaacacgacctgttaatgcgggcgctccacctactcaagagtgggtgcagccccgccgttcagataaagatccgggagttgtatcggaggagatatccacggaccctggagggactcagcgatttgagcactatcaagtcaagtgtgtttagtctcgatggcggtagctctcctgtggaaccggacctggctgtcgcagggatccactctttgccctccactagtgtgactccgcattcacccagctctccggtggggagtgttctactgcaggacacaaaacctaccttcgagatgcagcagccgtcccctccaattccacccgttcaccctgacgttcaactaaaaaacctccccttttatgacgtgctagatgttcttataaagcccactagcctggtacagtcatctatccaaagattccaggaaaagttttttatctttgcactgaccccacaacaagtgcgcgagatttgcatctccagagacttcctccccggcggtagaagggactataccgtgcaggtacagttgaggctgtgtctagccgagacatcttgcccccaggaggacaactaccccaattctttgtgtataaaagtgaacggcaagctgttccccctgccaggatacgccccaccaccgaagaatgggatcgagcaaaagagacccggaagacccctaaatattacctcgcttgtgagactgtccagcgctgttcccaatcagatctccatcagctgggcaagtgagatcggaaaaaattattctatgtccgtttacttagttaggcagcttacaagcgctatgctcctgcagagacttaagatgaaggggatcaggaatccagaccactcccgcgcccttataaaggaaaaactgaccgctgaccccgacagcgagattgcgactaccagcctgagggtgtccttgatgtgccctctgggaaaaatgaggctgacgatcccctgccgcgccgttacatgcacacatctgcaatgcttcgacgccgccttgtatctgcagatgaacgagaaaaaaccaacctggatttgccctgtgtgtgacaagaaagcagcatatgagtctctgattctcgattag

SEQ ID NO: 275676 - DNA, 1191 bp, Artificial Sequence
  derived and/or modified sequence
agaaacctgaacaacatggtgtcctccttccgggtgtctgagctgcaggtgctgctgggctttgctggcaggaacaagagcggcaggaagcatgacctgctgatgagggccctgcacctgctgaagagcggctgcagccctgctgtgcagatcaagatccgggagctgtacagaagacgctaccccaggaccctggagggcctgagtgacctgagcaccatcaagagctctgtgttcagcctggatggcggcagcagccctgtggagccagacctggccgtggccggcatccacagcctgcccagcacctctgtgaccccccacagccccagcagccctgtgggctctgtgctgctgcaggacaccaagcccacctttgagatgcagcagcccagcccccccatcccccctgtgcacccagatgtgcagctgaagaacctgcccttctatgatgtgctggatgtgctgatcaagcccaccagcctggtgcagagcagcatccagcgcttccaggagaagttcttcatctttgccctgaccccccagcaggtgcgggagatctgcatcagccgggacttcctgcccggcggccggcgggactacacagtgcaggtgcagctgcggctgtgcctggccgagaccagctgcccccaggaggacaactaccccaacagcctgtgcatcaaggtgaatggcaagctgttccccctgcccggctacgcccccccacccaagaatggcatcgagcagaagaggcctggccggcccctgaacatcaccagcctggtgcggctgagcagcgctgtgcccaaccagatcagcatctcctgggccagcgagatcggcaagaactacagcatgtctgtgtacctggtgcggcagctgaccagcgccatgctgctgcagaggctgaagatgaagggcatccggaacccagaccacagccgggccctgatcaaggagaagctgacagctgaccctgattctgaaattgccaccaccagcctgcgggtgtccctgatgtgccccctgggcaagatgaggctgaccatcccctgcagagctgtgacctgcacccacctgcagtgctttgatgctgccctgtacctgcagatgaatgagaagaagcccacctggatctgccctgtgtgtgacaagaaggccgcctatgagagcctcatcctggactag

SEQ ID NO: 275677 - DNA, 1191 bp, Artificial Sequence
  derived and/or modified sequence
cggaacctgaacaacatggtgagcagcttccgggtgagcgagctgcaagttctcctcgggtttgctggccgcaacaagtcagggaggaaacacgacttgttgatgcgggcgctgcaccttctgaaatcaggctgctcccctgccgttcagataaagatcagagaactctaccggaggagatatccccgaacactcgaggggctgtccgacctgtcgactattaagtcctctgtcttttccctggacggcggttcgtctcccgtggagcctgacctcgctgtggcaggaattcattctctccccagcacaagtgtcacacctcattcaccaagcagtccagtggggagcgtcttgcttcaggacaccaaacctactttcgaaatgcaacagccttctccgcctatcccacctgttcaccctgacgtacagctcaagaacctaccattttacgatgtgctcgacgtgctcatcaaacctacttcactggtgcagagtagcatccagcggttccaggagaagttctttatctttgccttgacaccccagcaagtcagagagatatgtatttcacgcgacttccttccgggtggacgccgagattatacggtgcaggtacaactgcgcctatgcctggccgaaacctcttgtccccaagaggacaattatccgaatagcctctgcatcaaagtaaatggaaagctttttcctctgcctggatatgccccacctccaaaaaatggcatcgaacagaaacgacccggcagacctctgaatatcacgagtctggttcgcctaagcagcgctgtcccaaaccagattagcatctcctgggctagcgagattgggaagaattatagtatgtcggtgtatttggtgcgacagctaacgtcagccatgttgcttcagcgcttgaaaatgaagggcatccgaaaccccgatcattcccgtgcacttatcaaggagaaactgacagccgatcctgactctgaaatcgccaccacatcactgagagtcagcttaatgtgccccctcggaaaaatgagactcaccataccctgtcgggccgtgacgtgtacccaccttcagtgcttcgatgcagccttatacctgcagatgaacgaaaagaagcccacatggatttgccccgtctgtgataagaaagccgcttatgagtccctgatactagattag

SEQ ID NO: 275678 - DNA, 1191 bp, Artificial Sequence
  derived and/or modified sequence
cgaaacctcaacaatatggtgtccagtttccgagtgtcagagctgcaggtgctactgggctttgctggtcgtaataaatctgggcgtaagcacgatctgttgatgagggccctacatctgctgaaaagtggatgcagtccggctgtacaaatcaaaattagggaactttacaggcggaggtacccgaggacccttgagggcctgtccgatctgagtacgatcaaatccagtgtttttagtctagatggaggctcttccccagtggagcctgacctcgccgtcgcgggtattcattccctaccatcaacatctgttacacctcacagtccctcctcgccagtgggcagcgtgctgttgcaggacaccaaacctaccttcgaaatgcaacagcctagtccccctattcctcccgtccatcctgacgttcaactgaaaaatcttccattctacgatgtcctcgatgtgctgatcaagcctacatcattggttcagtccagcatccaacgcttccaggagaagttttttattttcgccttgacaccccagcaggtgagagaaatctgtatatcaagggactttctgcccggtgggagaagggactacactgtgcaagtgcaattacgcctatgtctggccgaaacgtcttgcccacaggaagacaactatccaaactctctgtgcatcaaagttaacgggaaacttttccccctcccagggtatgctccaccccctaaaaatggcatcgaacagaagaggcctgggcgtcccttgaacattacatctctcgtgaggctgtccagtgccgtgcccaatcagatcagtatcagctgggctagcgagattggtaaaaattacagcatgtctgtgtatttggtgaggcagctgacctcagctatgctgctgcagcggctcaaaatgaaggggattaggaatcccgaccacagcagggctctgattaaagaaaaactcacagccgacccagattctgagatcgccaccacttccctgcgcgtgtctttgatgtgcccactaggtaaaatgaggcttaccatcccgtgcagagcggtgacatgcacccatctacagtgctttgacgctgcgctgtatctccagatgaacgagaaaaagcccacctggatctgccctgtgtgcgacaagaaggcagcatatgagagtttgatacttgattag

SEQ ID NO: 275679 - DNA, 1191 bp, Artificial Sequence
  derived and/or modified sequence
agaaacctgaacaacatggtgagcagcttcagagtgagcgagctgcaggtgctgctgggcttcgccggcagaaacaagagcggcagaaagcacgacctgctgatgagagccctgcacctgctgaagagcggctgcagccccgccgtgcagatcaagatcagagagctgtacagaagaagataccccagaaccctggagggcctgagcgacctgagcaccatcaagagcagcgtgttcagcctggacggcggcagcagccccgtggagcccgacctggccgtggccggcatccacagcctgcccagcaccagcgtgaccccccacagccccagcagccccgtgggcagcgtgctgctgcaggacaccaagcccaccttcgagatgcagcagcccagcccccccatcccccccgtgcaccccgacgtgcagctgaagaacctgcccttctacgacgtgctggacgtgctgatcaagcccaccagcctggtgcagagcagcatccagagattccaggagaagttcttcatcttcgccctgaccccccagcaggtgagagagatctgcatcagcagagacttcctgcccggcggcagaagagactacaccgtgcaggtgcagctgagactgtgcctggccgagaccagctgcccccaggaggacaactaccccaacagcctgtgcatcaaggtgaacggcaagctgttccccctgcccggctacgcccccccccccaagaacggcatcgagcagaagagacccggcagacccctgaacatcaccagcctggtgagactgagcagcgccgtgcccaaccagatcagcatcagctgggccagcgagatcggcaagaactacagcatgagcgtgtacctggtgagacagctgaccagcgccatgctgctgcagagactgaagatgaagggcatcagaaaccccgaccacagcagagccctgatcaaggagaagctgaccgccgaccccgacagcgagatcgccaccaccagcctgagagtgagcctgatgtgccccctgggcaagatgagactgaccatcccctgcagagccgtgacctgcacccacctgcagtgcttcgacgccgccctgtacctgcagatgaacgagaagaagcccacctggatctgccccgtgtgcgacaagaaggccgcctacgagagcctgatcctggactag

SEQ ID NO: 275680 - DNA, 2802 bp, Artificial Sequence
  derived and/or modified sequence
aaaacaaattcccggctgttaggagatgcgggagaggattgagtccctcgcggatgttgtgactttaattttgaggtccctgtcgtaactccgaagtaacgacgcggggcggaggatggcaatgatagcgaccaacgcgtcccgagcgctggtcacgagcgggtttacacacggaacgcgcaccatcttcataccacccgaggagtgcaaacgctatttccaccctgctttatttttaacagatgaggaaagggagacgcaatggggttgagtaacttaccctgggtcacggagcgagtggcagggctcccgcaggctgcgtgactgtcattgctctcacagtagacgattgatctggatactattgatgtaagcaacctcaacagacagtttttgtttcaaaagaaacatgttggaagatcaaaggcacaggttgccaaggaaagtgtactgcagttttacccgaaagctaatatcgttgcctaccatgacagcatcatgaaccctgactataatgtggaatttttccgacagtttatactggttatgaatgctttagataacagagctgcccgaaaccatgttaatagaatgtgcctggcagctgatgttcctcttattgaaagtggaacagctgggtatcttggacaagtaactactatcaaaaagggtgtgaccgagtgttatgagtgtcatcctaagccgacccagagaacctttcctggctgtacaattcgtaacacaccttcagaacctatacattgcatcgtttgggcaaagtacttgttcaaccagttgtttggggaagaagatgctgatcaagaagtatctcctgacagagctgaccctgaagctgcctgggaaccaacggaagccgaagccagagctagagcatctaatgaagatggtgacattaaacgtatttctactaaggaatgggctaaatcaactggatatgatccagttaaactttttaccaagctttttaaagatgacatcaggtatctgttgacaatggacaaactatggcggaaaaggaaacctccagttccgttggactgggctgaagtacaaagtcaaggagaagaaacgaatgcatcagatcaacagaatgaaccccagttaggcctgaaagaccagcaggttctagatgtaaagagctatgcacgtcttttttcaaagagcatcgagactttgagagttcatttagcagaaaagggggatggagctgagctcatatgggataaggatgacccatctgcaatggattttgtcacctctgctgcaaacctcaggatgcatattttcagtatgaatatgaagagtagatttgatatcaaatcaatggcagggaacattattcctgctattgctactactaatgcagtaattgctgggttgatagtattggaaggattgaagattttatcaggaaaaatagaccagtgcagaacaatttttttgaataaacaaccaaacccaagaaagaagcttcttgtgccttgtgcactggatcctcccaaccccaattgttatgtatgtgccagcaagccagaggtgactgtgcggctgaatgtccataaagtgactgttctcaccttacaagacaagatagtgaaagaaaaatttgctatggtagcaccagatgtccaaattgaagatgggaaaggaacaatcctaatatcttccgaagagggagagacggaagctaataatcacaagaagttgtcagaatttggaattagaaatggcagccggcttcaagcagatgacttcctccaggactatactttattgatcaacatccttcatagtgaagacctaggaaaggacgttgaatttgaagttgttggtgatgccccggaaaaagtggggcccaaacaagctgaagatgctgccaaaagcataaccaatggcagtgatgatggagctcagccctccacctccacagctcaagagcaagatgacgttctcatagttgattcagatgaagaagattcttcaaataatgccgacgtcagtgaagaagagagaagccgcaagaggaaattagatgagaaagagaatctcagtgcaaagaggtcacgtatagaacagaaggaagagcttgatgatgtcatagcattagattgaacagaaatgcctctaaacagaaccctcttactatttagtttatctgggcagaaccagattgttatgtcctttgttccaaagggaaaaaattgacagcagtgacttgaaaatgattctgctccctttgaaagcattcattttgctagaactgttagacacattgcagtatgctgtattgaaagtaggaatatagttttaaaaaccctttgaacaaagtgtgtgcataaccagtcatgagataaaacaacacaatgcatgttgcctttttaatgtaaatacccgtaggtatcattaatagtttcaaaatattgtggtttagtaaagttgatacctggttataaatattatgcctttatttttggctagaagaagaattatttttagcctagatctaaccattttcatactcttaactgattgaaacagattcaaagaagtatcgagtgctatgcattgaaacttgtttttaaatgttagatggcactatgtatattaatgtaaaacaatgttaatttactcaagttttcagtttgtaccgcctggtatgtctgtgtaagaagccaatttttgtgtattgttacagtttcaggttatttatattcgatgttttgtaaaactcaaataacgactatacttatggaccaaataaatggcatctgcattcttgtt

SEQ ID NO: 275681 - protein, 418 aa, Artificial Sequence
  derived and/or modified sequence
MVGQLAARRAAGVVLEMIREGKIAGRAVLIAGQPGTGKTAIAMGMAQALGPDTPFTAIAGSEIFSLEMSKTEALTQAFRRSIGVRIKEETEIIEGEVVEIQIDRPATGTGSKVGKLTLKTTEMETIYDLGTKMIESLTKDKVQAGDVITIDKATGKISKLGRSFTRARDYDAMGSQTKFVQCPDGELQKRKEVVHTVSLHEIDVINSRTQGFLALFSGDTGEIKSEVREQINAKVAEWREEGKAEIIPGVLFIDEVHMLDIESFSFLNRALESDMAPVLIMATNRGITRIRGTSYQSPHGIPIDLLDRLLIVSTTPYSEKDTKQILRIRCEEEDVEMSEDAYTVLTRIGLETSLRYAIQLITAASLVCRKRKGTEVQVDDIKRVYSLFLDESRSTQYMKEYQDAFLFNELKGETMDTS

SEQ ID NO: 275682 - protein, 122 aa, Artificial Sequence
  derived and/or modified sequence
MDVRRLKVNELREELQRRGLDTRGLKAELAERLQAALEAEEPDDERELDADDEPGRPGHINEEAELQPATLQPGRLQPGLHSPTASTSTTTCLQLWELRRLQPGPLYPTATPHCTDLPSAQL

SEQ ID NO: 275683 - DNA, 87 bp, Artificial Sequence
  derived and/or modified sequence
atgaggcccccccagtgcctccttcatacaccttctctcgccagccccctgcttctcttactgctgtggcttctcggggggggctag

SEQ ID NO: 275684 - protein, 752 aa, Artificial Sequence
  derived and/or modified sequence
MDVRRLKVNELREELQRRGLDTRGLKAELAERLQPPPPGLQPHAEPGGYSGPDGHYAMDNITRQNQFYDTQVIKQENESGYERRPLEMEQQQAYRPEMKTEMKQGAPTSFLPPEASQLKPDRQQFQSRKRPYEENRGRGYFEHREDRRGRSPQPPAEEDEDDFDDTLVAIDTYNCDLHFKVARDRSSGYPLTIEGFAYLWSGARASYGVRRGRVCFEMKDFECGNDVELSFTKNGKWMGIAFRIQKEALGGQALYPHVLVKNCAVEFNFGQRAEPYCSVLPGFTFIQHLPLSERIRGTVGPKSKAECEILMMVGLPAAGKTTWAIKHAASNPSKKYNILGTNAIMDKMRVMGLRRQRNYAGRWDVLIQQATQCLNRLIQIAARKKRNYILDQTNVYGSAQRRKMRPFEGFQRKAIVICPTDEDLKDRTIKRTDEEGKDVPDHAVLEMKANFTLPDVGDFLDEVLFIELQREEADKLVRQYNEEGRKAGPPPEKRFDNRGGGGFRGRGGGGGFQRYENRGPPGGNRGGFQNRGGGSGGGGNYRGGFNRSGGGGYSQNRWGNNNRDNNNSNNRGSYNRAPQQQPPPQQPPPPQPPPQQPPPPPSYSPARNPPGASTYNKNSNIPGSSANTSTPTVSSYSPPQSFGFFPSTFQPSYSQPPYNQGGYSQGYTAPPPPPPPPPAYNYGSYGGYNPAPYTPPPPPTAQTYPQPSYNQYQQYAQQWNQYYQNQGQWPPYYGNYDYGSYSGNTQGGTSTQ

SEQ ID NO: 275685 - DNA, 2259 bp, Artificial Sequence
  derived and/or modified sequence
atggatgtgcggcgcctgaaggtgaacgagctgcgggaggagctgcagagacggggtctggataccagagggctcaaagcggagctagcagagcgcctccagccaccgcctcctgggctccagccccatgctgaaccaggtggctacagtgggccagacggacactacgctatggataacatcactcggcaaaaccagttctacgatactcaagtgatcaaacaggagaatgagtctggatatgagcgccgaccactggagatggagcaacagcaggcttaccgaccagaaatgaaaactgagatgaaacagggtgctccaacctcatttcttccaccggaggcctcccagctgaagcccgaccgtcagcagttccagagccgcaaacggccatatgaagaaaatagaggaagaggctattttgagcatcgtgaagatcgacgtggccggtcacctcagccaccggccgaagaggacgaggatgatttcgatgatactctggtggccattgacacatataactgcgatctacacttcaaagttgccagagacaggtcaagcggttatcccctgaccatcgaggggttcgcctacctctggtccggcgcacgagcatcctacggcgttcgccgcgggagggtctgtttcgagatgaaagattttgagtgcggaaatgacgttgagctcagcttcacaaaaaacggaaaatggatgggcatcgctttccgcatacagaaagaggccttggggggccaggcactttatcctcatgtgctggtcaagaactgtgccgtagagttcaactttggacagagggccgagccgtattgttcggtcctgccagggtttacgttcatccagcacctgccccttagcgagcgaatacggggcacagtgggcccgaagtcaaaagcagagtgcgagattctgatgatggtgggcctgccagcagccggcaagacaacctgggcaatcaagcatgctgctagtaatccctctaagaagtacaatatccttggcactaacgcaatcatggataagatgcgggtgatgggcctacggagacaacggaattatgccgggcgttgggacgttctgattcagcaggccacacaatgcctgaaccgactcattcaaattgctgctcgaaagaaacgaaactatattcttgatcaaaccaacgtttacgggtctgctcagcggcgaaaaatgagaccatttgagggctttcagcgcaaggcaattgtaatctgcccaacagacgaagatctaaaagaccgcactattaaaagaaccgatgaggaaggcaaagacgtgcccgatcatgccgttctggagatgaaggctaatttcaccctccccgatgtcggtgattttctggacgaagtacttttcatcgagctgcagcgggaagaggcagacaagctggtgagacagtacaatgaagagggcaggaaagcaggacctcctcctgagaaacgtttcgacaatagaggtgggggagggttccgggggcggggaggaggcggcgggtttcaacggtatgagaaccgggggccccctggcggcaaccgcggaggctttcagaatagaggcggcgggagcggcggggggggaaactatagaggaggctttaaccgcagtgggggtggtggctattctcagaatcgctggggcaacaataatagagataataacaactccaataaccgaggcagctacaacagggccccccaacagcagccaccaccccaacagccccctccaccgcagcccccgccccaacagccaccacctccaccctcatattctcccgctcgcaatcccccaggtgcttccacatacaacaagaatagcaacatacctggctctagcgcaaacacatcaacacccactgtgtcctcctattcacctccacagagctttggcttcttccctagtactttccagccaagctatagccagccgccttacaaccagggaggatattctcaggggtatacagccccgcccccaccgcccccacctcctcctgcctacaactacggctcatacggcgggtacaaccccgccccatacacccccccaccaccacccacggcccagacgtacccacagcccagttataaccaatatcagcaatacgcccagcaatggaatcagtattaccagaaccagggccagtggccaccttactacggcaattacgactatgggtcctactctgggaatacccaagggggcactagcacccagtag

SEQ ID NO: 275686 - DNA, 3600 bp, Artificial Sequence
  derived and/or modified sequence
atggatgtgcgccgtctgaaggtgaacgaacttcgcgaggagctgcagcgccgcggcctggacactcgaggcctcaaggccgagcttgctgagcggctgcagccaccgccgcccgggctgcagccgcacgcggagcccggcggctactcggggccggacggacattatgccatggacaatattaccaggcagaaccaattctacgatacccaagtcatcaaacaagaaaacgagtcaggctacgagaggagaccactggaaatggagcagcagcaggcctatcgtccagaaatgaagacagagatgaagcaaggagcacccaccagcttcctcccgcctgaagcttctcaactcaagccagacaggcagcaattccagagtcgaaagaggccttatgaagaaaaccggggacgggggtactttgagcaccgagaggataggaggggccgctctcctcagcctcctgctgaagaggatgaagatgactttgatgatacccttgttgctattgacacctataactgcgacctccacttcaaggtggcccgagatcggagtagtggctatccgctcacaattgagggctttgcatacctgtggtcaggagcccgtgccagctatggggtcagaaggggccgtgtatgcttcgagatgaaggattttgaatgtggaaatgacgtggaactgtcttttaccaagaatggaaagtggatgggcattgctttccgaatccagaaggaagccttggggggtcaggccctctatcctcatgtcctggtgaagaattgcgcagtggagttcaacttcggacagagagcagagccctactgttctgtcctcccggggtttaccttcatccagcaccttccccttagtgagcgtatccggggcaccgttggaccaaagagcaaggcagaatgtgagattctgatgatggtgggcctgcctgctgctggcaagaccacatgggccatcaaacatgcagcctccaacccttccaagaagtacaacatcctgggtaccaatgccatcatggataagatgcgggtgatgggcctacgccggcagcggaactatgctggccgctgggatgtcctgatccagcaggccacccagtgcctcaaccgcctcatccagattgctgcccgcaagaaacgcaactatatcctagatcagacaaatgtttatgggtcagcccagagacgaaaaatgagaccatttgaaggcttccagcgcaaagctattgtaatttgtcccactgacgaggacctaaaagaccgaacaataaagcgaaccgacgaggaagggaaggatgtcccagatcatgcggtcttagaaatgaaagccaacttcacgttgccagatgttggggacttcctggatgaggttctgttcattgagctgcagcgggaggaagcggacaagctagtgaggcagtacaacgaggaaggccgcaaggctgggccaccccctgaaaagcgctttgacaaccgaggtggtggtggcttccggggccgcgggggtggtggtggcttccagcgctatgaaaaccgaggaccccctggaggcaaccgtggcggcttccagaaccgagggggaggcagcggtggaggaggcaactaccgaggaggtttcaaccgcagcggaggtggtggctatagccagaaccgctggggtaacaacaaccgggataacaacaactccaacaacagaggcagctacaaccgggctccccagcaacagccgccaccacagcagcctccgccaccacagccaccaccccagcagccaccgccaccacccagctacagccctgctcggaaccccccaggggccagcacctacaataagaacagcaacatccctggctcaagcgccaataccagcacccccaccgtcagcagctacagccctccacagagctttggcttttttccctccactttccagccgagttacagccagccaccctacaaccagggaggttacagccagggctacacagccccaccgcctccacctccaccaccacctgcctacaactatgggagctacggcggttacaacccggccccctataccccaccgccaccccccactgcacagacctaccctcagcccagctataaccagtatcagcagtatgcccagcagtggaaccagtactatcagaaccagggccagtggccgccatactacgggaactacgactacgggagctactccgggaacacacagggtggcacaagtacacagtagccagtgtgacccagaggctcccggaggcccctgccggcttcctccaccagcgcctgcctcggcccctcctctgcccccgccagatcccgtggtgctggggatggggtcatcccagggctgcctccctccagcccactgcctcccctctgaggggcttccttcccctccatagggccaggcatttttttctggattcaaacaggcaacaatgaccttttattttctgtttgtccccacctccccagccttccacctcctgttcttcctaccttcttcctttttgactaaataatccccacctcccttgatcatacagtgaggctacagtgactgaggggagaatcccctcctgttcactctcccaaccctgctccagcccctcagcttcccagaccctcatgcagttggttgtaaattctcccaggagctgttttactgtctacttttcaggattaaaaaaaaaatcaaaacttaaaaaaaaaaaagtttaaaaagcaaaatggggagggggaggaagcagtgacttttttttggtaattatgcgcttttttttaatttttagaatttgtctttttactgtgggtgggctgttgatatttcatcaagataagcatttctttcctgagttcaggtgactgaggaagagccacaaaacaaaacacaacaaaaccaaaccacagaatcatctttaacccaactttttatacgatgccccagttccccataactttgcacacaagcttctgtgttcagttgaattgtaactgctttttgtatttggagagagtgactattgaacttgaaaccttttattccgggcgtcttggtagtttctggtgggattcagtgggtgagagggaagaaggggaggttggggggctccttcccttcagaacttgaagtttctcccactgcctcctctccagtggtctcccaggtgccagacccaaaagcttttcctacagtgataccctttatttttacttccccttgactcatatgttttaacatgattttaacaaactgcacttattaagaaatgtgtttgccctgttttgtttggtttcgttttgttttctttgaataaatgacatggcacctcctagcaggaaggaagcagggttgaaaccctgaagtgttactgcagttggccgttaattggggtgggggcctctttaaagggaaattatttactcattcattaaacaacttaactgagggattcatgtgcctggccccgattttggtgctaaaaatgcacgcttaaacaagggtccctggtttaaaatccactagttcatttttaaagtgcttctcttgttctctacctctcacagtcta

SEQ ID NO: 275687 - DNA, 2259 bp, Artificial Sequence
  derived and/or modified sequence
atggatgtgcggcggctgaaggtgaatgagctgcgggaggagctgcagaggcggggcctggacacccggggcctgaaggccgagctggccgagcggctgcagcccccacctcctggcctgcagccccacgccgagcccggcggctacagcggcccagatggccactacgccatggacaacatcacccggcagaaccagttctatgacacccaggtgatcaagcaggagaatgaaagtggctatgaaagaagacccctggagatggagcagcagcaggcctacagacctgagatgaagacagagatgaagcagggcgcccccaccagcttcctgcccccagaggccagccagctgaagccagaccggcagcagttccagagcaggaagaggccctatgaggagaacagaggccggggctactttgagcacagagaagatagaagaggccgcagcccccagcccccagctgaggaggatgaagatgactttgatgacaccctggtggccatcgacacctacaactgtgacctgcacttcaaggtggcccgggacaggagcagcggctaccccctgaccatcgagggctttgcctacctgtggagcggggcccgggccagctatggagtgcggcggggccgggtgtgctttgagatgaaggactttgaatgtggaaatgatgtggagctgtccttcaccaagaatggcaagtggatgggcatcgccttccgcatccagaaggaggccctgggcggccaggccctgtacccccacgtgctggtgaagaactgtgctgtggagttcaactttggccagagagctgagccctactgcagcgtgctgcccggcttcaccttcatccagcacctgcccctgtctgagcgcatccggggcaccgtgggccccaagagcaaggccgagtgtgagatcctgatgatggtgggcctgcctgctgctgggaagaccacctgggccatcaagcacgccgccagcaaccccagcaagaagtacaacatcctgggcaccaatgccatcatggacaagatgagggtgatgggcctgcggcggcagagaaattatgccggccgctgggatgtgctgatccagcaggccacccagtgcctgaacagactcatccagattgctgccaggaagaagaggaactacatcctggaccagaccaacgtgtatggcagcgcccagaggaggaagatgaggccctttgagggcttccagaggaaggccatcgtcatctgccccacagatgaggacctgaaggacaggaccatcaagaggacagatgaggagggcaaggatgtgcctgaccatgctgtgctggagatgaaggccaacttcaccctgcctgatgtgggggacttcctggatgaggtgctcttcatcgagctgcagcgggaggaggccgacaagctggtgcggcagtacaatgaggagggcaggaaggccggccccccacctgagaagagatttgacaacagaggaggcggcggcttccggggccggggcggcggcggcggcttccagagatatgagaacagaggccccccaggcggcaacagaggaggcttccagaacagaggaggcggcagcggcggcggcggcaactacagaggaggcttcaacagaagtggcggcggcggctacagccagaaccgctggggcaacaacaacagagacaacaacaacagcaacaacagaggcagctacaacagagccccccagcagcagcccccaccccagcagcccccaccaccccagcccccaccccagcagcccccacctccacccagctacagccctgccagaaatcctcctggggccagcacctacaacaagaacagcaacatccctggcagcagcgccaacaccagcacccccaccgtgtcctcctacagccccccccagagctttggcttcttccccagcaccttccagcccagctacagccagcccccctacaaccagggcggctacagccagggctacacagcccctcctcctcctcctcctcctcctccagcctacaactacggcagctatggaggctacaacccagccccctacaccccacctcctccacccacagcccagacctacccccagcccagctacaaccagtaccagcagtatgcccagcagtggaaccagtactaccagaaccagggccagtggccaccctactacggcaactatgactatggcagctacagcggcaacacccagggcggcaccagcacccagtag

SEQ ID NO: 275688 - DNA, 2259 bp, Artificial Sequence
  derived and/or modified sequence
atggacgtgcggcggctgaaggtgaacgagctgcgggaggagctgcagcggaggggtttggatacacgaggactcaaagctgaactggctgaacggcttcagcctccaccgccaggtctacagcctcacgctgagccaggcggatacagcggacctgacggccactatgcgatggacaatattacacgccagaatcagttttacgacacgcaggtgattaaacaggagaatgaatccggctacgaacggcgcccacttgagatggaacagcaacaagcatatcgaccggaaatgaagaccgaaatgaagcagggcgctccaaccagctttctccctcctgaagccagccaactcaaaccggataggcagcaatttcagagcagaaagagaccctacgaggagaatcggggacgcgggtatttcgaacaccgcgaagatcgccgcgggcgttcacctcagccccccgcagaggaagatgaggatgacttcgatgacaccctcgtcgccattgatacatataactgtgatctgcacttcaaggttgctcgggatagatccagtgggtatccactgacaatcgagggcttcgcttacctctggagcggggccagagcaagttatggcgtccgtcgtggccgggtgtgtttcgagatgaaagacttcgagtgcggtaatgacgtggaactgtccttcacaaagaacgggaagtggatggggattgcatttagaatccagaaagaagctctgggtggtcaggccctgtaccctcacgttcttgtgaaaaattgcgccgttgagtttaactttgggcagcgggcagagccttattgcagtgtcctcccggggtttacctttatccagcacttgcctctcagcgagaggattcggggcacagtggggcccaagtcaaaagccgaatgtgaaatcctgatgatggtcggattacccgcagcgggaaagacgacctgggcaatcaagcacgcggcatccaaccccagcaaaaagtacaatatactgggaacgaacgccattatggacaagatgagagtgatgggcctgaggaggcagagaaattatgccggtcgctgggacgttctgatccaacaggcaacacaatgtttgaatcgactcatccaaatcgctgctcgtaagaaacgcaactatatcctcgatcaaacaaacgtttatggtagtgcacagcgtcgcaagatgcgcccttttgaggggtttcaacgaaaagccatcgtgatctgccctaccgatgaggaccttaaagatcgtaccatcaagcgcaccgacgaggaaggcaaggacgtgccagatcacgctgtgctggaaatgaaggccaacttcaccctgcccgatgtgggcgacttcctggacgaggtgcttttcattgagctgcaacgcgaagaggccgataaattggtgcgacagtacaatgaggagggccggaaagcaggccccccacccgagaagcggtttgacaatcggggaggtgggggatttagaggacggggcggcggtggggggttccagcgctatgaaaacagggggccacctgggggcaatcgcggcggttttcagaaccgtggaggtggttccggcggcggagggaattaccggggtggatttaataggagtggaggaggcggatactctcagaacagatggggcaacaacaatagagataataacaactccaacaatcgcggttcatataaccgggctcctcagcagcagccacctccgcagcagccacctccaccacagcccccacctcagcagcctccacctccaccctcctacagtccagcccgtaacccccctggggccagtacttataataaaaacagcaatatacccggcagctcagcaaacaccagcaccccgactgtgtcctcttattcccctcctcagtcatttggctttttccctagtaccttccagccttcttactcccaaccaccctacaatcagggaggttattcgcagggatataccgcccctcctcctccccctcctcccccccccgcgtataactacggatcttatggaggatataatccggcaccctatacacctcccccaccaccaacggcccagacatacccacagccttcatataaccaataccaacagtacgcccagcagtggaaccagtattaccagaatcagggccaatggccaccatattacggaaactacgactacgggtcgtactccggcaacacccagggaggcacaagcactcagtag

SEQ ID NO: 275689 - DNA, 2259 bp, Artificial Sequence
  derived and/or modified sequence
atggacgtgagacggctgaaggtaaatgagctccgagaggaactgcagaggagaggactggacacccgaggcctcaaagctgagctggcagagcgactgcaaccacccccaccagggcttcagccacacgccgagccaggcggttactccggcccagatggccattacgccatggataacatcactcgccagaaccaattttacgacacacaggtgatcaaacaggagaatgagtccgggtatgaacgtaggcctctcgagatggagcaacaacaggcctataggcctgagatgaaaactgagatgaaacagggcgctcccactagcttcctacctccggaagcaagtcagctgaagccagacagacagcagtttcagtctaggaagaggccctacgaagagaatcggggtcgcggatactttgagcatcgcgaagatagacggggtagatctccacaaccccctgccgaagaagatgaagatgatttcgacgatacattggtggccatcgacacctataactgcgacctgcactttaaggtcgcgagggaccggtcctctggataccccctgactattgagggtttcgcctatctgtggtctggtgccagggcttcctatggggtgagacggggacgagtgtgttttgagatgaaagattttgaatgtggtaacgatgtggagctgagctttacaaagaatggtaagtggatgggcattgcattcagaattcagaaagaagcgctgggagggcaggcactgtaccctcatgtacttgtcaagaactgcgcagtggaatttaactttggtcagcgcgcagagccctactgtagcgtcctgccaggctttactttcattcagcatctcccattgagcgaaaggatacgtggtactgttggccctaagagcaaggccgaatgcgagatccttatgatggtaggtcttcccgcagctggaaagacaacgtgggccataaagcatgctgcatcgaatccaagcaaaaagtacaacatactgggaacaaatgccattatggacaagatgagagttatgggactgcgcaggcagcgtaattatgcgggtcgttgggacgtcctgatccaacaagccacccaatgcctcaacagattgatacagatcgcagcgagaaaaaaacggaactacattctcgatcagacaaatgtctacggcagtgcccagcgaagaaagatgagaccatttgaagggttccaacggaaggctattgtgatatgccccactgatgaggatctcaaggatcgcaccatcaagcgcaccgatgaagaagggaaagatgtacctgatcatgccgttctagaaatgaaggccaactttacactgcccgatgtgggggatttcctcgacgaagttttgttcatagaactgcaaagagaagaagctgacaaattggtccgccaatataacgaagaagggaggaaagcgggacccccacccgaaaaaagattcgacaatcggggagggggagggttcaggggaagggggggaggcggtggctttcaaaggtacgagaacagagggcctcccggaggaaacagagggggatttcaaaacagaggtggaggctcaggcggaggaggcaactaccgcggaggctttaatagaagcggagggggaggatatagccaaaatcgatggggtaataataacagagataataacaatagcaacaatcgtggctcatacaatcgggcaccacagcagcagccaccaccccagcagcccccacctccacagcctccccctcagcagcccccaccacctccatcttacagtccggctagaaatcctcccggtgcctccacatacaataagaactctaacatcccaggaagcagtgccaatacatctactcctactgtgtcgagttatagtccaccccagtcgttcggtttcttccccagcacctttcagccttcttattcgcagcccccatacaaccaaggaggttatagtcagggctatactgcccctccgcctccgcctccacctccccctgcctataattacggatcatacggcggatataatccagctccttatacccctccgcctccaccgacagcacagacctacccacaaccctcatacaaccagtaccagcagtacgcccaacaatggaaccaatactaccagaatcagggacaatggcctccatattatggaaactatgattatggcagctactcgggaaacacccagggcggaacatctacccagtag

SEQ ID NO: 275690 - DNA, 2259 bp, Artificial Sequence
  derived and/or modified sequence
atggacgtgagaagactgaaggtgaacgagctgagagaggagctgcagagaagaggcctggacaccagaggcctgaaggccgagctggccgagagactgcagccccccccccccggcctgcagccccacgccgagcccggcggctacagcggccccgacggccactacgccatggacaacatcaccagacagaaccagttctacgacacccaggtgatcaagcaggagaacgagagcggctacgagagaagacccctggagatggagcagcagcaggcctacagacccgagatgaagaccgagatgaagcagggcgcccccaccagcttcctgccccccgaggccagccagctgaagcccgacagacagcagttccagagcagaaagagaccctacgaggagaacagaggcagaggctacttcgagcacagagaggacagaagaggcagaagcccccagccccccgccgaggaggacgaggacgacttcgacgacaccctggtggccatcgacacctacaactgcgacctgcacttcaaggtggccagagacagaagcagcggctaccccctgaccatcgagggcttcgcctacctgtggagcggcgccagagccagctacggcgtgagaagaggcagagtgtgcttcgagatgaaggacttcgagtgcggcaacgacgtggagctgagcttcaccaagaacggcaagtggatgggcatcgccttcagaatccagaaggaggccctgggcggccaggccctgtacccccacgtgctggtgaagaactgcgccgtggagttcaacttcggccagagagccgagccctactgcagcgtgctgcccggcttcaccttcatccagcacctgcccctgagcgagagaatcagaggcaccgtgggccccaagagcaaggccgagtgcgagatcctgatgatggtgggcctgcccgccgccggcaagaccacctgggccatcaagcacgccgccagcaaccccagcaagaagtacaacatcctgggcaccaacgccatcatggacaagatgagagtgatgggcctgagaagacagagaaactacgccggcagatgggacgtgctgatccagcaggccacccagtgcctgaacagactgatccagatcgccgccagaaagaagagaaactacatcctggaccagaccaacgtgtacggcagcgcccagagaagaaagatgagacccttcgagggcttccagagaaaggccatcgtgatctgccccaccgacgaggacctgaaggacagaaccatcaagagaaccgacgaggagggcaaggacgtgcccgaccacgccgtgctggagatgaaggccaacttcaccctgcccgacgtgggcgacttcctggacgaggtgctgttcatcgagctgcagagagaggaggccgacaagctggtgagacagtacaacgaggagggcagaaaggccggccccccccccgagaagagattcgacaacagaggcggcggcggcttcagaggcagaggcggcggcggcggcttccagagatacgagaacagaggcccccccggcggcaacagaggcggcttccagaacagaggcggcggcagcggcggcggcggcaactacagaggcggcttcaacagaagcggcggcggcggctacagccagaacagatggggcaacaacaacagagacaacaacaacagcaacaacagaggcagctacaacagagccccccagcagcagccccccccccagcagcccccccccccccagccccccccccagcagcccccccccccccccagctacagccccgccagaaacccccccggcgccagcacctacaacaagaacagcaacatccccggcagcagcgccaacaccagcacccccaccgtgagcagctacagccccccccagagcttcggcttcttccccagcaccttccagcccagctacagccagcccccctacaaccagggcggctacagccagggctacaccgcccccccccccccccccccccccccccccgcctacaactacggcagctacggcggctacaaccccgccccctacacccccccccccccccccaccgcccagacctacccccagcccagctacaaccagtaccagcagtacgcccagcagtggaaccagtactaccagaaccagggccagtggcccccctactacggcaactacgactacggcagctacagcggcaacacccagggcggcaccagcacccagtag

SEQ ID NO: 275691 - DNA, 1446 bp, Artificial Sequence
  derived and/or modified sequence
atgctgctgctgcccctgctgctgcccgtgctgggcgccggcagcctgaacaaggaccccagctacagcctgcaggtgcagagacaggtgcccgtgcccgagggcctgtgcgtgatcgtgagctgcaacctgagctaccccagagacggctgggacgagagcaccgccgcctacggctactggttcaagggctggaccagccccaagaccggcgcccccgtggccaccaacaaccagagcagagaggtggagatgagcaccagagacagattccagctgaccggcgaccccggcaagggcagctgcagcctggtgatcagagacgcccagagagaggacgaggcctggtacttcttcagagtggagagaggcagcagagtgagacacagcttcgtgaacaacctgttcagcgtgagcgcccccgccctgacccagaagcccgacgtgtacatccccgagaccctggagcccggccagcccgtgaccgtgatctgcgtgttcaactgggccttcaagaagtgccccgcccccagcttcagctggaccggcgccgccctgagccccagaagaaccagacccagcaccagccacttcagcgtgctgagcttcacccccagcccccaggaccacgacaccgacctgacctgccacgtggacttcagcagaaagggcgtgagcgcccagagaaccgtgagactgagagtggccagcctggagctgcagggcaacgtgatctacctggaggtgcagaagggccagttcctgagactgctgtgcgccgccgacagccagccccccgccaccctgagctgggtgctgcaggacagagtgctgagcagcagccacccctggggccccagaaccctgggcctggagctgagaggcgtgagagccggcgacagcggcagatacacctgcagagccgagaacagactgggcagccagcagagagccctggacctgagcgtgcagtacccccccgagaacctgagagtgatggtgagccaggccaacagaaccgtgctggagaacctgagaaacggcaccagcctgagagtgctggagggccagagcctgagactggtgtgcgtgacccacagcagcccccccgccagactgagctggaccagatggggccagaccgtgggccccagccagcccagcgaccccggcgtgctggagctgcccagagtgcagatggagcacgagggcgagttcacctgccacgccagacaccccctgggcagccagagagtgagcctgagcttcagcgtgcactgcaagagcggccccatgaccggcgtggtgctggtggccgtgggcgaggtggccatgaagatcctgctgctgtgcctgtgcctgatcctgctgagagtgagaagctgcagaagaaaggccgccagagccgccctgggcatggaggccgccgacgccgtgaccgactag

SEQ ID NO: 275692 - DNA, 1446 bp, Artificial Sequence
  derived and/or modified sequence
atgctgctgctaccactcttgttacccgtacttggcgccggtagcctgaacaaagacccctcctacagcctgcaggttcagaggcaggtaccagtcccagagggactgtgcgtcatcgtgagctgtaatctatcttatccccgagatgggtgggatgagtctacagctgcatacggatattggttcaagggctggacctcacccaaaactggcgccccggttgccactaacaatcagtccagagaagtcgagatgagcactagggatcggttccaattaactggcgatccaggcaagggctcctgtagcctcgtgatccgggacgctcagcgcgaggacgaggcatggtattttttcagagtggagagaggctctagagtcaggcatagcttcgtaaacaatctgttctcggtgagcgcacccgcccttacacagaagcccgatgtctacatcccagaaaccctcgagccaggacaacccgtgactgttatttgcgtgtttaattgggctttcaaaaagtgtcctgccccgtcgttcagttggaccggcgcagctctgtccccaagacgcacacggccttcgacaagccacttctccgtgctttcatttactccctcccctcaagatcatgatacagacttaacgtgtcatgtagacttcagtagaaagggagtgtccgcacaacggacggtccgtctcagagtggcttcattggaattgcagggaaacgtaatatacctggaggtgcagaaagggcagtttctccgcctgctttgtgcagccgacagtcagccccccgccacgttgtcctgggttctccaggatagggtcctgtcctcttcacacccttgggggcctcgcacactggggctggaactgagaggagtgcgggcgggtgactcaggccgctacacatgtcgcgccgagaacaggctcgggtctcagcagagagccttggacctcagtgtgcagtatcctcccgagaatcttcgcgtgatggtgagccaggccaacaggactgtcctcgagaacctccgtaacggtactagcctgcgcgtactggaggggcaatctcttagattggtctgcgtaactcactccagcccccccgcccgcttgagttggaccagatgggggcagaccgtcggtccgagccaacctagcgacccaggcgttctcgagctcccccgcgtgcagatggaacacgaaggagaatttacttgccatgcaagacatccactcggaagccaacgagtgagtctgagttttagtgtccactgcaagagcggccctatgacaggggtggtgcttgtggccgtgggcgaggtcgctatgaaaattctgctgttgtgcctctgcctgatactgctcagggtgcggagctgtagacgcaaagccgcgcgcgctgcactcggcatggaggccgccgacgcagtcacagattag

SEQ ID NO: 275693 - DNA, 1446 bp, Artificial Sequence
  derived and/or modified sequence
atgctgctgctgcccctgctgctgcctgtgctgggcgccggcagcctgaacaaggaccccagctacagcctgcaggtgcagaggcaggtgcctgtgcctgagggcctgtgtgtgattgtgtcctgcaacctgagctaccccagagatggctgggatgagagcacagctgcctacggctactggttcaagggctggaccagccccaagacaggagcccctgtggccaccaacaaccagagccgggaggtggagatgagcacccgggaccgcttccagctgaccggggaccccgggaagggcagctgcagcctggtgatcagagatgcccagcgggaggatgaggcctggtacttcttccgggtggagcggggcagccgggtgcgccacagctttgtgaacaacctcttctctgtgtctgccccagccctgacccagaagccagatgtgtacatccctgagaccctggagcccggccagcctgtgaccgtcatctgtgtgttcaactgggccttcaagaagtgcccagcccccagcttctcctggacaggagctgccctgagccccaggaggacccggcccagcaccagccacttctctgtgctgtccttcacccccagcccccaggaccatgacacagacctgacctgccacgtggacttcagcaggaaaggagtgtctgcccagaggacagtgcggctgcgggtggccagcctggagctgcagggcaatgtcatctacctggaggtgcagaagggccagttcctgcggctgctgtgtgccgctgacagccagcccccagccaccctgtcctgggtgctgcaggacagagtgctgagcagcagccacccctggggccccaggaccctgggcctggagctgcggggcgtgcgggccggggacagcggccgctacacctgcagagcagaaaatcggctgggcagccagcagagggccctggacctgtctgtgcagtacccacctgagaacctgcgggtgatggtgtcccaggccaacagaacagtgctggagaacctgagaaatggcaccagcctgcgggtgctggagggccagagcctgcggctggtgtgtgtgacccacagcagccccccagcccggctgtcctggacccgctggggccagacagtgggccccagccagcccagcgaccccggggtgctggagctgccccgggtgcagatggagcacgagggggagttcacctgccacgcccggcaccccctgggcagccagagggtgtccctgtccttctctgtgcactgcaagagcggccccatgactggagtggtgctggtggccgtgggggaggtggccatgaagatcctgctgctgtgcctgtgcctgatcctgctgcgggtgcgcagctgcaggaggaaggccgcccgggccgccctgggcatggaggccgcagatgctgtgacagactag

SEQ ID NO: 275694 - DNA, 1446 bp, Artificial Sequence
  derived and/or modified sequence
atgctgctgctgcccctgctgctgcccgtgctgggcgccggcagcctcaacaaggatccctcatattctcttcaagtccagaggcaggtaccggtgccggaggggctttgcgtcattgtgagctgcaatctgagctatccccgcgatggctgggacgagagcactgctgcctacggctattggtttaaaggatggacctctcctaagactggcgcaccagtggccactaacaatcagtctagggaggttgagatgtccacgagggatcgatttcagttaaccggtgacccgggcaagggctcctgcagcttagtcatccgcgatgcccagcgagaagatgaagcatggtatttctttcgcgtggaacgcggtagtagggtgcgccacagcttcgttaataatttgttttcagtgtcggccccagccctgacccagaagcccgacgtgtacatccctgaaacgctcgaaccaggacagcccgtcaccgtcatttgcgtgtttaactgggctttcaaaaaatgcccagcacccagcttcagctggactggcgccgccctatcccctaggaggaccaggccctccacctctcacttcagtgtgctgagctttactccctccccccaggaccacgacacagacctgacctgtcatgtggacttttctcgcaagggggtgtctgcccaacgtacagtgcggctgcgggtggccagcctggaactacaaggcaatgtgatttatttagaagtccagaagggtcaattccttcgcctactctgcgcagccgactcgcagccgcccgctactttaagctgggtcctgcaggacagagtgctgtcttcgtctcacccttgggggcctcgcaccctgggcctggaactgcgcggagtgagagcaggagactcaggtcgttatacttgcagggctgagaatcgtctgggatcccagcagagggccctggatttgtccgtccaatacccacctgagaatctgcgcgtgatggtaagccaggccaatcggaccgttctggagaatttgaggaatggtactagcctcagggtcctggagggtcagtcacttcgactggtttgtgtgacgcactcatcacctcccgcccggctgagctggactcgttggggccagacagtcgggccatcccaaccatcggaccccggagtattagaactccctcgggtgcaaatggagcacgaaggggaattcacctgccacgcaaggcatccattggggagtcagagagtcagcctttcttttagtgtccactgtaagtccggtcccatgaccggtgtagtgcttgtggctgtgggagaagtcgcgatgaaaatcttgctgctgtgcctttgccttatccttcttcgggtgcgttcctgcaggagaaaagccgcacgggccgctctcgggatggaggcagcagatgcggtgacagactag

SEQ ID NO: 275695 - DNA, 1446 bp, Artificial Sequence
  derived and/or modified sequence
atgcttctgctccccctcttgctccccgtgctcggggctgggtcactgaataaagatccgtcttattcgctccaggttcaacggcaggtgccagtcccggagggcttgtgcgtgatcgtctcatgcaacctgagttatcctcgtgacggatgggacgagtctaccgctgcctacggttactggtttaaaggctggacttcacctaaaactggtgcacccgtcgccactaacaatcaatctagggaggtcgagatgtcgacgcgagaccgcttccagctcaccggggaccccggaaaaggctcctgtagtctagtgatcagagatgcgcagagggaagacgaggcttggtatttcttcagggtggagaggggcagccgtgtgcgacatagttttgtcaataaccttttttctgttagcgcacccgcactaacacagaagcccgacgtgtatataccggagacacttgagcctggccagcctgtaacagttatttgtgtatttaactgggctttcaaaaaatgtcctgcaccctcgttttcctggactggcgctgcactttcgccaagaaggactagaccttccaccagccatttctctgtgctttccttcaccccgtcacctcaggatcatgatacggatctgacctgtcacgttgacttttctcgcaagggcgtgtccgctcagaggaccgttagactcagagtggccagcttagagctgcagggcaacgtcatttacctggaagtgcagaaggggcagtttcttagactgctttgtgctgcagacagccagccacccgctaccctgtcctgggtcttacaggaccgggttctcagcagttcccacccatggggtccccgaaccctaggactggaactgcgcggagtcagggcaggagattctgggcgatacacttgccgtgccgagaaccgtctcggatcacagcaacgtgcgctggacctgtctgtccagtatccgcctgaaaatctgagggtcatggtgagtcaggccaaccgtaccgtgcttgaaaatttgcgcaacggcacgtcactccgcgtgctcgagggccagagcctgcgtctggtctgcgtgacacatagctcccccccagctcgcttatcctggacccggtggggacagacggttggaccaagccaacccagcgacccgggtgttttggaactgcctcgagttcagatggagcacgaaggcgaatttacatgccacgcccgtcaccccctggggagtcagagagtttcactgagtttttcagtgcactgtaaaagcggacccatgaccggcgtggtcttggtcgctgtaggggaagtcgctatgaagattctgctgctatgtctgtgtttaattctcttaagagtcaggtcgtgtcgtaggaaggccgctcgcgcagccctcggcatggaggcagctgatgcggtaactgactag

SEQ ID NO: 275696 - DNA, 1882 bp, Artificial Sequence
  derived and/or modified sequence
actgcccctccaccaggcttcctgctggaggagtttccttcccagccaggccggcccagaagccagatggtcccgggacaggcccagccccagagcccagagatgctgctgctgcccctgctgctgcccgtgctgggggcggggtccctgaacaaggatcccagttacagtcttcaagtgcagaggcaggtgccggtgccggagggcctgtgtgtcatcgtgtcttgcaacctctcctacccccgggatggctgggacgagtctactgctgcttatggctactggttcaaaggatggaccagcccaaagacgggtgctcctgtggccactaacaaccagagtcgagaggtggaaatgagcacccgggaccgattccagctcactggggatcccggcaaagggagctgctccttggtgatcagagacgcgcagagggaggatgaggcatggtacttctttcgggtggagagaggaagccgtgtgagacatagtttcgtgaacaatttgttctcggtctctgccccagccctgactcagaagcctgatgtctacatccccgagaccctggagcccgggcagccggtgacggtcatctgtgtgtttaactgggctttcaagaaatgtccagccccttctttctcctggacgggggctgccctctcccctagaagaaccagaccaagcacctcccacttctcagtgctcagcttcacgcccagcccccaggaccacgacaccgacctcacctgccatgtggacttctccagaaagggtgtgagcgcacagaggaccgtccgactccgtgtggcctccctggaactccagggaaacgtcatatatctggaagttcagaaaggccagttcctgcggctcctctgtgctgctgacagccagccccctgccacgctgagctgggtcctgcaggacagagtcctctcctcgtcccacccctggggccccagaaccctggggctggagctgcgtggggtaagggccggggattcagggcgctacacctgccgagcggagaacaggcttggctcccagcagcgagccctggacctctctgtgcagtatcctccagagaacctgagagtgatggtttcccaagcaaacaggacagtcctggaaaacctgaggaacggcacatccctccgggtcctggagggccaaagcctgcgtctggtctgtgtcacacacagcagccccccagccaggctgagctggacccggtggggacagaccgtgggcccctcccagccctcagaccctggggtcctggagctgcctcgggttcaaatggagcacgaaggagagttcacctgccacgctcggcacccgctgggctcccagcgcgtctctctcagcttctccgtgcactgcaaatcagggcccatgacgggggtggttctggtggctgttggggaggtggctatgaagatcctgcttctctgcctctgcctcatcctcctcagagtgaggtcttgcaggaggaaggcagcaagggcagcattgggcatggaggctgcagacgctgtcacggactaatctccagactccagactgcttccagatgcctcctcatccagttcctccacagtctgagcggccgtgtttcctctgcaggctttgcatggtctgtcccctgctggactctcctgatccctcctttccctgtcacccaacatctccccaaaccctccgggccaaggactctgcggctcttgacactttgcacgtgtagtttcttctcctgaaacacccttccctccagcctgggcgacagagcaagactgtctcaaaaactaaaacaaaaaaacaccaccaccaccaccaatgtctgattaaatctaagccacggttccattttggggcaaggggc

SEQ ID NO: 275697 - DNA, 1365 bp, Artificial Sequence
  derived and/or modified sequence
atggtgcccggccaggcccagccccagagccccgagatgctgctgctgcccctgctgctgcccgtgctgggcgccggcagcctgaacaaggaccccagctacagcctgcaggtgcagagacaggtgcccgtgcccgagggcctgtgcgtgatcgtgagctgcaacctgagctaccccagagacggctgggacgagagcaccgccgcctacggctactggttcaagggctggaccagccccaagaccggcgcccccgtggccaccaacaaccagagcagagaggtggagatgagcaccagagacagattccagctgaccggcgaccccggcaagggcagctgcagcctggtgatcagagacgcccagagagaggacgaggcctggtacttcttcagagtggagagaggcagcagagtgagacacagcttcgtgaacaacctgttcagcgtgagcgcccccgccctgacccagaagcccgacgtgtacatccccgagaccctggagcccggccagcccgtgaccgtgatctgcgtgttcaactgggccttcaagaagtgccccgcccccagcttcagctggaccggcgccgccctgagccccagaagaaccagacccagcaccagccacttcagcgtgctgagcttcacccccagcccccaggaccacgacaccgacctgacctgccacgtggacttcagcagaaagggcgtgagcgcccagagaaccgtgagactgagagtggcctacgcccccaaggacctgatcatcagcatcagccacgacaacaccagcgccctggagctgcagggcaacgtgatctacctggaggtgcagaagggccagttcctgagactgctgtgcgccgccgacagccagccccccgccaccctgagctgggtgctgcaggacagagtgctgagcagcagccacccctggggccccagaaccctgggcctggagctgagaggcgtgagagccggcgacagcggcagatacacctgcagagccgagaacagactgggcagccagcagagagccctggacctgagcgtgcagtacccccccgagaacctgagagtgatggtgagccaggccaacagaaccgtgctggagaacctgagaaacggcaccagcctgagagtgctggagggccagagcctgagactggtgtgcgtgacccacagcagcccccccgccagactgagctggaccagatggggccagaccgtgggccccagccagcccagcgaccccggcgtgctggagctgcccagagtgcagatggagcacgagggcgagttcacctgccacgccagacaccccctgggcagccagagagtgagcctgagcttcagcgtgcactag

SEQ ID NO: 275698 - DNA, 1365 bp, Artificial Sequence
  derived and/or modified sequence
atggtgccaggccaggctcaaccacagtctccagagatgctgctcctgcctttattgctgccagtgctgggagcgggcagtttgaataaagatccttcttacagtttacaggttcaacgccaggtgcccgttccagaagggttatgcgtgattgtgagctgcaacctttcttacccaagggacggctgggacgagtccacagctgcatatggctactggtttaaggggtggacttcaccaaaaactggtgctcctgtagccacaaacaaccaatctagagaggtggaaatgtctaccagagaccgctttcagctgaccggcgatccaggtaagggcagttgctctttggtgattagagatgcacaacgcgaagatgaggcctggtatttttttagagtggagaggggatcccgggtgaggcactcgtttgttaacaacttattctcagtaagcgcgccggcccttacccagaaacctgacgtctatatccctgagaccctagagcccggacagcctgtcaccgtcatttgtgttttcaattgggcatttaaaaagtgccccgctccttctttctcctggaccggcgcggctctgtccccaagaagaacaagacccagcacttctcacttttctgtgctcagcttcactccttctccacaggatcatgatacagacctcacgtgtcacgtggacttttctcggaagggagtgagcgcgcaacgcacagtgagattgagagtagcgtacgcgccaaaggacctgatcatctccattagtcatgacaatacttcagctctggagttgcagggcaacgtgatttacttggaggtgcagaaagggcaattcctgcggctgctatgtgctgccgatagtcagccacctgccacattgtcatgggttctacaggatcgagtgctttcctcctcccacccgtgggggcctcggacactgggtctggagctacggggggtgcgggccggtgactccggacgctacacatgccgcgccgaaaaccggctgggttcccagcagagggccttagacctgtccgtgcagtacccccccgaaaacttacgcgtcatggtatctcaggccaataggaccgtgctcgagaatctgcggaacggtaccagccttcgggtactcgagggtcagtccctgcgcctggtttgtgtaactcattcctctcccccggctaggctgtcttggacccggtggggccaaactgttggtccctctcagccctcagaccccggtgtgctcgagctgccgcgggtccagatggaacatgagggggagtttacatgtcacgctcggcaccctcttggatcccagagagtatcactctcgttttcagtccactag

SEQ ID NO: 275699 - DNA, 1365 bp, Artificial Sequence
  derived and/or modified sequence
atggtgcccggccaggcccagccccagagccctgagatgctgctgctgcccctgctgctgcctgtgctgggcgccggcagcctgaacaaggaccccagctacagcctgcaggtgcagaggcaggtgcctgtgcctgagggcctgtgtgtgattgtgtcctgcaacctgagctaccccagagatggctgggatgagagcacagctgcctacggctactggttcaagggctggaccagccccaagacaggagcccctgtggccaccaacaaccagagccgggaggtggagatgagcacccgggaccgcttccagctgaccggggaccccgggaagggcagctgcagcctggtgatcagagatgcccagcgggaggatgaggcctggtacttcttccgggtggagcggggcagccgggtgcgccacagctttgtgaacaacctcttctctgtgtctgccccagccctgacccagaagccagatgtgtacatccctgagaccctggagcccggccagcctgtgaccgtcatctgtgtgttcaactgggccttcaagaagtgcccagcccccagcttctcctggacaggagctgccctgagccccaggaggacccggcccagcaccagccacttctctgtgctgtccttcacccccagcccccaggaccatgacacagacctgacctgccacgtggacttcagcaggaaaggagtgtctgcccagaggacagtgcggctgcgggtggcctatgcccccaaggacctgatcatcagcatcagccatgacaacaccagcgccctggagctgcagggcaatgtcatctacctggaggtgcagaagggccagttcctgcggctgctgtgtgccgctgacagccagcccccagccaccctgtcctgggtgctgcaggacagagtgctgagcagcagccacccctggggccccaggaccctgggcctggagctgcggggcgtgcgggccggggacagcggccgctacacctgcagagcagaaaatcggctgggcagccagcagagggccctggacctgtctgtgcagtacccacctgagaacctgcgggtgatggtgtcccaggccaacagaacagtgctggagaacctgagaaatggcaccagcctgcgggtgctggagggccagagcctgcggctggtgtgtgtgacccacagcagccccccagcccggctgtcctggacccgctggggccagacagtgggccccagccagcccagcgaccccggggtgctggagctgccccgggtgcagatggagcacgagggggagttcacctgccacgcccggcaccccctgggcagccagagggtgtccctgtccttctctgtgcactag

SEQ ID NO: 275700 - DNA, 1365 bp, Artificial Sequence
  derived and/or modified sequence
atggtgcccggccaggcccagccccagagccccgagatgctgctgcttcccctactgctccccgtcctgggcgcggggtcattaaacaaggaccctagctacagtctacaggtgcaaaggcaagtgccggttccggaaggcctgtgtgttatcgtctcatgtaaccttagctacccccgagatggttgggatgaatccaccgcagcctacgggtactggttcaagggctggacaagtcccaaaactggggcccctgtcgccacaaataaccagtcccgggaggtggagatgtccactcgcgataggtttcaacttacaggggacccggggaaaggtagctgctctttagtaattagggacgcacagcgggaggacgaggcctggtatttttttagggtcgagcgcgggagtagagtccgacactctttcgtgaataacctgttttccgtgtcggctccggccctgacacagaagccagatgtgtatatcccagagaccctggaacccggccagcctgtcaccgttatctgcgtcttcaactgggcattcaaaaagtgtcccgccccaagtttcagttggaccggggctgccctgtctccccgcaggacaagaccttcgacctctcactttagcgtccttagcttcactcctagcccccaagaccacgatacggacctgacttgccacgtggatttcagtcgaaagggcgtgagtgctcagagaactgtcagactgagagtcgcctacgctccaaaggacctgatcataagcattagtcacgacaacactagcgccttggagcttcagggcaatgtcatatacctagaggtgcagaaaggccaattcttacgcttactgtgcgctgcggatagtcagccacccgccactcttagttgggtgctgcaagacagagttctttccagctcgcacccgtggggcccacgcacgctcggtttagagctgcgcggggtgcgggccggggactcgggacgatatacgtgtcgtgccgagaatcggctggggagccagcagagagcccttgatctgagcgtccaataccctccagaaaatctaagggttatggtgagccaggcaaacaggactgtcttggagaatttgcgaaacggtacctccctacgggtgttggagggccagtctcttcgtctggtctgcgtgacacactcctccccaccagcccgtctgtcttggacccggtggggtcagaccgttggaccctctcagccttcagatcctggagtcctagagctgccacgggtccagatggagcacgaaggcgaatttacctgccacgcccgccaccccttgggatcacagagagtgtcactgtcgttcagtgttcactag

SEQ ID NO: 275701 - DNA, 1365 bp, Artificial Sequence
  derived and/or modified sequence
atggttcccggacaggcacagcctcagtctcctgagatgctgctgctccccctccttctgccagtgctcggagccggatcactgaacaaagatcccagttactctctccaggtgcagagacaggtgccagtgccggagggtctgtgtgtgatagtgtcctgcaatttaagctacccgcgtgatggatgggacgaaagcaccgccgcttacggttattggttcaaggggtggacctcccccaagaccggagccccagtcgcgaccaacaatcaatccagggaggtggaaatgtccactagggatcgttttcagctaaccggggacccaggcaaggggagctgtagtctcgtcattcgggacgcacagagagaagatgaagcgtggtacttttttagggtggaacggggatcacgggtcagacatagcttcgtgaataatttgttctcggtcagcgcaccggctttgacccaaaaaccggatgtttacatccctgagacactggagccagggcaacctgtaaccgtgatttgcgtgtttaattgggcgttcaaaaaatgtcccgctcccagcttctcctggacaggggctgccctgtcccccaggcgaaccagaccaagcacctctcatttctctgtactgagttttacaccgagccctcaggatcacgatactgatctcacctgccacgtagattttagtcgcaagggagtatcagctcagcgaacggtgcgtttacgcgtggcttatgcccctaaggacttaattatttcaatatctcacgacaacacatctgctctggagctacaaggtaatgtaatttacctggaggttcaaaaaggccagtttttgagattattgtgcgcggcagatagccagccacctgcgactctgagctgggtacttcaagaccgggtcctcagcagcagccatccgtggggccctagaacgctcggcttagagctgaggggagttcgcgctggagacagcgggcgttacacttgccgggctgagaaccgacttgggtcacagcagcgggctctggacctctctgtgcagtatccaccagaaaacttaagagtgatggtatcccaggccaatagaacagttcttgagaatttgcgtaacggcacatcactgcgtgtgttagaagggcagagcctgaggcttgtgtgcgtaacgcattcatcccctcctgctcggttatcgtggaccagatggggacagaccgttggcccttctcagcccagcgacccgggtgttctggagcttccgagagtacagatggaacacgaaggcgagttcacatgccacgcccgtcacccgctaggcagccaaagggtttcattgagcttttctgtgcattag

SEQ ID NO: 275702 - DNA, 1029 bp, Artificial Sequence
  derived and/or modified sequence
atgagaagccacaccggcgagaagccctacaagtgcgacaagtgcggcaaggccttcagccagttcagcatgctgatcatccacgtgagaatccacaccggcgagaagccctacgagtgcaacgagtgcggcaaggccttcagccagagcagcgccctgaccgtgcacatgagaagccacaccggcgagaagccctacgagtgcaaggagtgcagaaaggccttcagccacaagaagaacttcatcacccaccagaagatccacaccagagagaagccctacgagtgcaacgagtgcggcaaggccttcatccagatgagcaacctggtgagacaccagagaatccacaccggcgagaagccctacatctgcaaggagtgcggcaaggccttcagccagaagagcaacctgatcgcccacgagaagatccacagcggcgagaagccctacgagtgcaacgagtgcggcaaggccttcagccagaagcagaacttcatcacccaccagaaggtgcacaccggcgagaagccctacgactgcaacgagtgcggcaaggccttcagccagatcgccagcctgaccctgcacctgagaagccacaccggcgagaagccctacgagtgcgacaagtgcggcaaggccttcagccagtgcagcctgctgaacctgcacatgagaagccacaccggcgagaagccctacgtgtgcaacgagtgcggcaaggccttcagccagagaaccagcctgatcgtgcacatgagaggccacaccggcgagaagccctacgagtgcaacaagtgcggcaaggccttcagccagagcagcagcctgaccatccacatcagaggccacaccggcgagaagcccttcgactgcagcaagtgcggcaaggccttcagccagatcagcagcctgaccctgcacatgagaaagcacaccggcgagaagccctaccactgcatcgagtgcggcaaggccttcagccagaagagccacctggtgagacaccagagaatccacacccactag

SEQ ID NO: 275703 - DNA, 1029 bp, Artificial Sequence
  derived and/or modified sequence
atgaggtctcacaccggggaaaaaccgtacaagtgtgacaagtgtggaaaggccttcagccagttttccatgctgatcatccacgtgcgcatccacaccggcgaaaagccctacgagtgtaacgagtgtggcaaggccttctcccagagcagtgccttgacagtccatatgcggagtcacaccggtgagaaaccatatgagtgcaaagaatgtcgaaaagcctttagccacaaaaagaattttattactcaccaaaaaatacatacacgtgagaaaccttacgaatgtaatgaatgtggaaaggcgttcatccagatgagtaatcttgtccggcaccaacgaatacatacgggcgaaaagccttacatttgcaaggagtgtggtaaagcttttagccagaagagcaacctcatagcgcatgagaaaattcattctggagagaaaccatacgaatgcaacgagtgtggcaaagccttctctcaaaaacaaaattttataacccaccagaaagtgcacaccggagagaagccttacgattgtaatgaatgcggaaaggcctttagccagattgccagtcttacactccacctgcgttctcataccggcgagaagccttatgagtgcgataagtgcggcaaggcattcagccagtgttccctgctcaatcttcatatgcgtagtcacacgggagagaaaccgtatgtttgcaacgaatgtggaaaagcgttcagccagcgaacatcactgatagttcacatgagggggcacactggcgaaaagccgtacgagtgtaataagtgtggtaaggccttctctcagtcttctagtttgactatccacatccggggccacacgggagaaaaacctttcgactgctcaaaatgcggtaaggccttcagccagatctcctcgctgactcttcacatgagaaaacacactggggagaaaccctaccactgcatcgaatgtggaaaggcgtttagccagaagagccatcttgtccggcatcaaaggattcacacacattag

SEQ ID NO: 275704 - DNA, 1029 bp, Artificial Sequence
  derived and/or modified sequence
atgaggagccacactggagagaagccctacaagtgtgacaagtgtgggaaggccttcagccagttctccatgctgatcatccacgtgcgcatccacactggagagaagccctatgaatgtaatgaatgtgggaaggccttcagccagagcagcgccctgactgtgcacatgaggagccacactggagagaagccctatgagtgcaaggagtgcaggaaggccttcagccacaagaagaacttcatcacccaccagaagatccacacccgggagaagccctatgaatgtaatgaatgtgggaaggccttcatccagatgagcaacctggtgcgccaccagaggatccacactggagagaagccctacatctgcaaggaatgtgggaaggccttcagccagaagagcaacctgattgcccacgagaagatccacagcggggagaagccctatgaatgtaatgaatgtgggaaggccttcagccagaagcagaacttcatcacccaccagaaggtgcacactggagagaagccctatgactgcaatgaatgtgggaaggccttcagccagatcgccagcctgaccctgcacctgcggagccacactggagagaagccctatgaatgtgacaagtgtgggaaggccttcagccagtgcagcctgctgaacctgcacatgaggagccacactggagagaagccctacgtgtgcaatgaatgtgggaaggccttcagccagaggaccagcctcatcgtgcacatgaggggccacactggagagaagccctatgagtgcaacaagtgtgggaaggccttcagccagagcagcagcctgaccatccacatccggggccacactggagagaagccctttgactgcagcaaatgtgggaaggccttcagccagatcagcagcctgaccctgcacatgaggaagcacactggagagaagccctaccactgcattgaatgtgggaaggccttcagccagaagagccacctggtgcgccaccagaggatccacacccactag

SEQ ID NO: 275705 - DNA, 1029 bp, Artificial Sequence
  derived and/or modified sequence
atgcggagccacaccggcgagaagccctacaagtgcgacaagtgcggaaaggcttttagtcagttctctatgctgattatccacgttcgcattcataccggcgagaagccttatgagtgtaacgagtgtggtaaggcattttcacagagctcagcacttacagtgcatatgaggtcacatacaggggaaaagccttacgaatgcaaagagtgtagaaaggcattcagccacaagaaaaacttcattactcatcagaagattcatacgagggagaagccgtacgagtgtaatgagtgcggcaaagctttcattcagatgtcaaatctggttcgccatcagcggattcacaccggtgaaaagccatacatttgcaaggagtgtggaaaggcgttttcgcaaaaatctaacctaatagctcatgagaaaatccatagtggcgagaaaccttatgagtgtaatgagtgcggaaaggcattctcccagaagcagaactttataacacatcaaaaagtccacaccggcgaaaagccatacgattgcaacgaatgcggcaaagccttcagccagattgccagcctaacactgcacctcaggtctcacactggagaaaaaccgtacgagtgcgacaagtgcggcaaagccttttcacaatgtagtctgctcaatctgcacatgaggtctcatactggggagaaaccgtatgtctgcaacgagtgcggaaaagctttctcacagcggacatcgctcattgtgcacatgcggggacacaccggcgagaagccttacgaatgcaataaatgcggcaaggcttttagccaatctagtagtctcacaatccacattcgcgggcacactggggaaaaacccttcgactgtagcaagtgtgggaaggccttctctcagatcagctcgctgacactccacatgaggaaacataccggagaaaagccctatcactgcatcgagtgtgggaaggcattcagtcaaaaatcacatctggtccgccatcagaggattcatacacattag

SEQ ID NO: 275706 - DNA, 1029 bp, Artificial Sequence
  derived and/or modified sequence
atgaggagccatacaggagagaaaccatataaatgtgacaaatgtggcaaagccttcagtcagttttcgatgctaattatccatgtgcgcatccataccggtgaaaaaccttatgagtgcaacgagtgcgggaaagccttttcacagtccagtgcacttacagtacacatgaggtcccatacaggggagaagccgtatgagtgcaaggaatgcaggaaggccttctctcacaagaagaactttattacccaccagaagattcacacacgagaaaagccctatgagtgcaacgaatgtgggaaggcatttatccagatgagtaacctcgtgcgccatcagcggatccatactggagagaaaccatacatatgcaaagagtgcggtaaggccttttcacagaagagtaacttaatcgcacatgaaaagattcattccggggaaaaaccctacgagtgcaatgaatgcggcaaggcttttagtcagaaacagaacttcatcacacaccagaaggtgcacactggcgagaagccctacgactgcaacgagtgcggcaaggccttcagtcagattgcatcattaacattgcacttgagatcacacactggtgagaaaccctatgaatgtgataagtgcgggaaggcgttctcccaatgcagcctgctgaacctgcacatgcggagccataccggggaaaaaccgtacgtttgtaacgaatgcggtaaggctttttctcagaggacatccctaattgtacacatgagaggccacactggggagaagccttacgaatgtaataaatgcgggaaagcgtttagtcaatctagctcactgactatccacatccgcggtcataccggcgagaagccctttgattgcagcaaatgtgggaaggcattctctcaaatcagcagcctaacgctgcatatgaggaaacatacaggtgaaaaaccctatcactgtattgaatgcggcaaggccttttcgcaaaagtcccatctggtccggcaccagcgaattcatacccactag

SEQ ID NO: 275707 - protein, 323 aa, Artificial Sequence
  derived and/or modified sequence
MDPGKDKEGVPQPSGPPARKKFVIPLDEDEVPPGVAKPLFRSTQSLPTVDTSAQAAPQTYAEYAISQPLEGAGATCPTGSEPLAGETPNQALKPGAKSNSIIVSPRQRGNPVLKFVRNVPWEFGDVIPDYVLGQSTCALFLSLRYHNLHPDYIHGRLQSLGKNFALRVLLVQVDVKDPQQALKELAKMCILADCTLILAWSPEEAGRYLETYKAYEQKPADLLMEKLEQDFVSRVTECLTTVKSVNKTDSQTLLTTFGSLEQLIAASREDLALCPGLGPQKVRALGKNPRSWGKERAPNKHNLRPQSFKVKKEPKTRHSGFRL

SEQ ID NO: 275708 - protein, 39 aa, Artificial Sequence
  derived and/or modified sequence
MDPGKDKEGVPQPSGPPARKKFVIPLDEDEVPPGVSKPL

SEQ ID NO: 275709 - DNA, 972 bp, Artificial Sequence
  derived and/or modified sequence
atggaccccggcaaggacaaggagggcgtgccccagcccagcggcccccccgccagaaagaagttcgtgatccccctggacgaggacgaggtgccccccggcgtggccaagcccctgttcagaagcacccagagcctgcccaccgtggacaccagcgcccaggccgccccccagacctacgccgagtacgccatcagccagcccctggagggcgccggcgccacctgccccaccggcagcgagcccctggccggcgagacccccaaccaggccctgaagcccggcgccaagagcaacagcatcatcgtgagccccagacagagaggcaaccccgtgctgaagttcgtgagaaacgtgccctgggagttcggcgacgtgatccccgactacgtgctgggccagagcacctgcgccctgttcctgagcctgagataccacaacctgcaccccgactacatccacggcagactgcagagcctgggcaagaacttcgccctgagagtgctgctggtgcaggtggacgtgaaggacccccagcaggccctgaaggagctggccaagatgtgcatcctggccgactgcaccctgatcctggcctggagccccgaggaggccggcagatacctggagacctacaaggcctacgagcagaagcccgccgacctgctgatggagaagctggagcaggacttcgtgagcagagtgaccgagtgcctgaccaccgtgaagagcgtgaacaagaccgacagccagaccctgctgaccaccttcggcagcctggagcagctgatcgccgccagcagagaggacctggccctgtgccccggcctgggcccccagaaggtgagagccctgggcaagaaccccagaagctggggcaaggagagagcccccaacaagcacaacctgagaccccagagcttcaaggtgaagaaggagcccaagaccagacacagcggcttcagactgtag

SEQ ID NO: 275710 - DNA, 972 bp, Artificial Sequence
  derived and/or modified sequence
atggaccccggaaaggataaggaaggcgtgccacagccatctggacctcccgctcggaaaaaatttgtcattccactcgacgaggatgaggtgcctcctggtgtggcaaaaccgctgttcaggtccactcaatccctgccgactgtggatacgtctgcccaagccgcaccacagacctacgctgagtacgctatctcacagcccctggagggcgccggggccacatgtccgaccggatctgagcccctggccggggaaacaccgaatcaggcgctgaaacctggcgctaagtctaactcaatcatagtaagcccacggcaacgagggaatcccgtcctgaaattcgtgaggaacgtcccttgggaatttggcgatgtcattcccgactatgtactcgggcagtccacctgcgccttgttcttatcactgcgctaccacaatttacaccctgactacatccacggcagactgcaatctctggggaagaattttgccctacgagtactgctcgtgcaagtggatgtgaaggaccctcagcaggctttgaaagagctcgccaaaatgtgcattcttgcagactgtactctcattctcgcatggtctccagaagaagccggtagatatcttgagacttacaaagcctatgagcagaagccggcagatcttctcatggagaagcttgaacaggatttcgtgtcccgggtgaccgagtgtctcaccactgtgaagagcgtaaataaaacagattcccagacactgcttacgacgttcggtagcctcgagcagctcatcgccgcgtctcgcgaggacttagccctctgccctggactgggacctcaaaaggtgcgggctctgggcaaaaatcctcggtcttggggcaaggagagggccccgaacaaacataacctgaggccgcagagctttaaggtaaaaaaggagcctaagactaggcactccgggttccgactgtag

SEQ ID NO: 275711 - DNA, 1273 bp, Artificial Sequence
  derived and/or modified sequence
gagccgaaggtggaggtcaaaggggcgtggcgttacagagcctctagcgctgggtgttggggacctgacgctatggagctctcggagttttgtgggggacggctgtgagtggggggttcctgctgcgggatgagaacgtagacgccagtggctcactcgctcctggcaccttccctttcaggctccagatggaccctgggaaggacaaagagggggtgccccagccctcagggccgccagcaaggaagaaatttgtgatacccctcgacgaggatgaggtccctcctggagtggccaagcccttattccgatctacacagagccttcccactgtggacacctcggcccaggcggcccctcagacctacgccgaatatgccatctcacagcctctggaaggggctggggccacgtgccccacagggtcagagcccctggcaggagagacgcccaaccaggccctgaaacccggggcaaaatccaacagcatcattgtgagccctcggcagaggggcaatcccgtactgaagttcgtgcgcaatgtgccctgggaatttggcgacgtaattcccgactatgtgctgggccagagcacctgtgccctgttcctcagcctccgctaccacaacctgcacccagactacatccatgggcggctgcagagcctggggaagaacttcgccttgcgggtcctgcttgtccaggtggatgtgaaagatccccagcaggccctcaaggagctggctaagatgtgtatcctggccgactgcacattgatcctcgcctggagccccgaggaagctgggcggtacctggagacctacaaggcctatgagcagaaaccagcggacctcctgatggagaagctagagcaggacttcgtctcccgggtgactgaatgtctgaccaccgtgaagtcagtcaacaaaacggacagtcagaccctcctgaccacatttggatctctggaacagctcatcgccgcatcaagagaagatctggccttatgcccaggcctgggccctcagaaagtaagagctctgggaaagaacccaaggagttgggggaaggagagagccccaaataaacacaacctgagaccccaaagttttaaggtgaaaaaagaaccaaagaccagacacagtggcttccgcctgtaatcccaacattttgggaggccaaggcgggaggactgcttgaggccagaagttggagaccagcctgggcaagtggacacctcatttttactaaaaataaaaaaaactagctgggc

SEQ ID NO: 275712 - DNA, 972 bp, Artificial Sequence
  derived and/or modified sequence
atggaccccgggaaggacaaggagggcgtgccccagcccagcggccccccagccaggaagaagtttgtgatccccctggatgaagatgaggtgcccccaggagtggccaagcccctcttccgcagcacccagagcctgcccaccgtggacaccagcgcccaggccgccccccagacctatgcagaatatgccatcagccagcccctggagggcgctggggccacctgccccaccggcagcgagcccctggccggggagacccccaaccaggccctgaagccaggggccaagagcaacagcatcatcgtgagcccccggcagaggggcaaccctgtgctgaagtttgtgagaaatgtgccctgggagtttggagatgtgatcccagactatgtgctgggccagagcacctgtgccctcttcctgagcctgcgctaccacaacctgcacccagactacatccacggccgcctgcagagcctgggcaagaactttgccctgcgggtgctgctggtgcaggtggatgtgaaggacccccagcaggccctgaaggagctggccaagatgtgcatcctggccgactgcaccctcatcctggcctggagccctgaggaggccggccgctacctggagacctacaaggcctatgagcagaagccagctgacctgctgatggagaagctggagcaggactttgtgtcccgggtgacagaatgtctgaccaccgtgaagtctgtgaacaagacagacagccagaccctgctgaccaccttcggcagcctggagcagctgattgctgccagccgggaggacctggccctgtgccccggcctgggcccccagaaggtgcgggccctgggcaagaaccccaggtcctggggcaaggagcgggcccccaacaagcacaacctgcggccccagagcttcaaggtgaagaaggagcccaagaccaggcacagcggcttccggctgtag

SEQ ID NO: 275713 - DNA, 972 bp, Artificial Sequence
  derived and/or modified sequence
atggaccccggcaaggacaaggagggcgtgccccagcccagcggccctcccgcgagaaagaaattcgtgatccctctcgacgaggacgaggtgccacccggagtggctaaacccctttttcgatctacccaatcactgccaaccgtggatacctctgctcaggccgctccccagacctatgccgaatacgctatttcgcagcctctcgagggcgcaggcgccacttgtcccactggatctgagcccctcgcaggagagacacccaaccaagccctgaaacctggggccaagtccaattctattatcgtttcccccagacaacgaggtaaccctgtgctgaaattcgtgcgaaatgtgccttgggagttcggagatgtgatccctgattacgtgctagggcagtctacctgtgccctatttctttctctaaggtaccacaatctgcatcccgactacatacatggacggctgcagagcttagggaagaactttgcactgcgcgttttgcttgttcaagtggacgtcaaggacccccagcaggcgctcaaagagctggcaaaaatgtgtattctcgctgactgcacgttgattctagcctggtctccggaggaggctggcaggtacctggagacctacaaggcttacgagcagaagccggccgatctcctgatggagaaacttgaacaggacttcgtgtcaagggtgacagaatgtcttactacggtgaaaagcgtgaacaaaactgattcccagaccctactgacgacattcggcagcctggagcagttgatagccgcatccagagaggatctggccctatgccccgggctgggcccacagaaggtcagggcactgggcaaaaaccctcggagctggggaaaggagcgcgctccgaataagcataacttacgcccccagagttttaaagtcaagaaggaacctaaaacacggcattcagggttccgcctgtag

SEQ ID NO: 275714 - DNA, 972 bp, Artificial Sequence
  derived and/or modified sequence
atggaccccggaaaagacaaggagggcgttccccaaccctccggcccacccgcaagaaaaaagtttgtcatacctctcgacgaggacgaggtcccgcctggcgtggccaaaccgttgtttcggtcaacccagagtctgcctacggtcgacacctctgctcaggctgcgcctcagacttacgctgagtatgcaatttcccaaccactagaaggagccggtgcaacgtgtccaacaggaagcgagcccttggcgggtgaaacccccaatcaggctcttaagccaggggcaaagagcaactcaataatcgtgtcccccaggcaacgaggcaacccagtccttaaatttgtccgcaacgtgccctgggaattcggagatgtcatcccagactacgtcctggggcaatccacctgtgccttgtttctaagtctgcggtaccacaaccttcatcccgactatattcacggacggctgcagagcttgggaaaaaactttgctctccgagtcctgcttgtgcaggtggatgtaaaggacccacagcaggccttaaaagagcttgcaaaaatgtgcattctggctgattgtaccttaatcctggcctggagcccggaggaagctggtcgctatctggaaacctacaaagcatacgagcagaagcctgcagaccttttgatggagaagctcgagcaggatttcgtgagcagagtcaccgaatgcctgaccaccgtcaaatctgtcaataaaactgatagtcagaccctgctcaccacctttggctccctcgaacaactcattgccgcttcacgagaggatctggctttatgtcccggactcgggcctcagaaagttcgcgcactaggcaagaatcccagaagctggggcaaggagcgcgctcctaataaacataacctgcgaccacagtcttttaaggttaagaaagaacccaaaacccgccactccggcttccgactgtag

SEQ ID NO: 275715 - DNA, 972 bp, Artificial Sequence
  derived and/or modified sequence
atggacccggggaaggacaaagagggtgtgccccagccctcaggacctcccgccagaaaaaagttcgttatcccactcgatgaggacgaagtccctccaggcgttgccaaacccttattcagatcgacacagagccttcccactgtggatacttccgcacaagcggcacctcagacctacgccgagtacgcaatctcccagccactggaaggagctggagccacttgccctacaggatcagagccccttgctggggaaacaccaaatcaggcactgaagcctggcgccaaatcgaatagcatcattgtgtcacccaggcaacgcggcaaccccgtgctgaaatttgtacgcaacgtcccctgggagtttggagatgtaataccagattacgtcctcgggcagagcacatgcgcactctttctctccctgcggtaccacaacctgcaccctgactatatccatggccgtctccagtcactcggcaagaacttcgccttacgagtgttacttgtgcaagtggatgttaaagaccctcagcaggcacttaaggaactggcaaagatgtgtattcttgcagactgcacactcattctcgcatggtctcctgaggaagccggcagatacctagagacttataaagcttacgagcagaaacccgccgatctgctcatggagaaactggaacaggatttcgtgagccgcgtgaccgagtgtttgacaactgtgaaaagcgtcaacaagactgatagccagacactgcttactacatttggatccttagaacagctgatcgcagcgtctagagaagacttggcactctgtccaggactcggcccacagaaagtcagagccctcggtaagaacccccgttcctggggaaaggaacgagcgcccaacaagcataacctacgacctcagtcctttaaggtgaaaaaagagccaaaaacacgacattccgggttccgcctgtag

SEQ ID NO: 275716 - DNA, 972 bp, Artificial Sequence
  derived and/or modified sequence
atggatcccggtaaagacaaagaaggtgtccctcagcctagcggaccacctgctcgcaaaaagttcgtcatccctctcgatgaagacgaagtcccacccggcgttgcaaaacccctcttcagatccacccagtcactacctacagtggatacatcggcccaagctgctcctcaaacctatgctgagtacgccatcagccagcccttggaaggggcgggcgctacttgcccaactggctccgagcctctcgcaggcgaaactcccaaccaagccttaaagcctggagctaaatccaactccataatcgtgtcccctcgccagcgtgggaacccggtgctaaagttcgttcgtaacgtcccttgggagtttggcgacgtcattccggactacgttctcggccagtcaacgtgtgcccttttcctctccctcaggtatcataacctacatcccgactatatccatggcagactacaatccttaggaaaaaatttcgcccttcgcgtgcttctggtccaagttgatgtaaaagatccccagcaggcccttaaggaacttgcaaagatgtgcatcctggctgattgcaccttgattcttgcctggtctcctgaggaagccggcagatacctagagacttataaagcttacgagcagaaacccgccgatctgctcatggagaaactggaacaggatttcgtgagccgcgtgaccgagtgtttgacaactgtgaaaagcgtcaacaagactgatagccagacactgcttactacatttggatccttagaacagctgatcgcagcgtctagagaagacttggcactctgtccaggactcggcccacagaaagtcagagccctcggtaagaacccccgttcctggggaaaggaacgagcgcccaacaagcataacttgcggcctcagtcattcaaggtaaaaaaagaacccaaaactcgtcactccggctttagactttag

SEQ ID NO: 275717 - RNA, 972 nt, Artificial Sequence
  derived and/or modified sequence
auggacccggggaaggacaaagagggugugccccagcccucaggaccucccgccagaaaaaaguucguuaucccacucgaugaggacgaagucccuccaggcguugccaaacccuuauucagaucgacacagagccuucccacuguggauacuuccgcacaagcggcaccucagaccuacgccgaguacgcaaucucccagccacuggaaggagcuggagccacuugcccuacaggaucagagccccuugcuggggaaacaccaaaucaggcacugaagccuggcgccaaaucgaauagcaucauugugucacccaggcaacgcggcaaccccgugcugaaauuuguacgcaacguccccugggaguuuggagauguaauaccagauuacguccucgggcagagcacaugcgcacucuuucucucccugcgguaccacaaccugcacccugacuauauccauggccgucuccagucacucggcaagaacuucgccuuacgaguguuacuugugcaaguggauguuaaagacccucagcaggcacuuaaggaacuggcaaagauguguauucuugcagacugcacacucauucucgcauggucuccugaggaagccggcagauaccuagagacuuauaaagcuuacgagcagaaacccgccgaucugcucauggagaaacuggaacaggauuucgugagccgcgugaccgaguguuugacaacugugaaaagcgucaacaagacugauagccagacacugcuuacuacauuuggauccuuagaacagcugaucgcagcgucuagagaagacuuggcacucuguccaggacucggcccacagaaagucagagcccucgguaagaacccccguuccuggggaaaggaacgagcgcccaacaagcauaaccuacgaccucaguccuuuaaggugaaaaaagagccaaaaacacgacauuccggguuccgccuguag

SEQ ID NO: 275718 - RNA, 972 nt, Artificial Sequence
  derived and/or modified sequence
auggaucccgguaaagacaaagaaggugucccucagccuagcggaccaccugcucgcaaaaaguucgucaucccucucgaugaagacgaagucccacccggcguugcaaaaccccucuucagauccacccagucacuaccuacaguggauacaucggcccaagcugcuccucaaaccuaugcugaguacgccaucagccagcccuuggaaggggcgggcgcuacuugcccaacuggcuccgagccucucgcaggcgaaacucccaaccaagccuuaaagccuggagcuaaauccaacuccauaaucguguccccucgccagcgugggaacccggugcuaaaguucguucguaacgucccuugggaguuuggcgacgucauuccggacuacguucucggccagucaacgugugcccuuuuccucucccucagguaucauaaccuacaucccgacuauauccauggcagacuacaauccuuaggaaaaaauuucgcccuucgcgugcuucugguccaaguugauguaaaagauccccagcaggcccuuaaggaacuugcaaagaugugcauccuggcugauugcaccuugauucuugccuggucuccugaggaagccggcagauaccuagagacuuauaaagcuuacgagcagaaacccgccgaucugcucauggagaaacuggaacaggauuucgugagccgcgugaccgaguguuugacaacugugaaaagcgucaacaagacugauagccagacacugcuuacuacauuuggauccuuagaacagcugaucgcagcgucuagagaagacuuggcacucuguccaggacucggcccacagaaagucagagcccucgguaagaacccccguuccuggggaaaggaacgagcgcccaacaagcauaacuugcggccucagucauucaagguaaaaaaagaacccaaaacucgucacuccggcuuuagacuuuag

SEQ ID NO: 275719 - DNA, 438 bp, Artificial Sequence
  derived and/or modified sequence
taacgaaggggcgccggcgttcgcagcgggtgtgcgtctagggcctgcagtggcgccttggggggacgtgggccaggggaaagtctctttgcacagtatccccgccgggccgagggcaggagagaaaagcaacaagtcactgagcagaggaatggctggccttcccaaagctggtcctgctgctgttcaacttgtagccccaacaaatgtagctatattttaatgacccagtgcattggaagtcgcgagatggagctcagcgctgaatggccgggatgcagcgttaatatgaaggcaacaaaaactgcaagaggctcagagctcatactttccctcggaagctttagtgggcgggccggccagcggcggcgtccaccccccggacaccaagacggcagtgatacccggggcctccgccgcgttcagctggccctgtag

SEQ ID NO: 275720 - protein, 291 aa, Artificial Sequence
  derived and/or modified sequence
MFQAFPGDYDSGSRCSSSPSAESQYLSSVDSFGSPPTAAASQECAGLGEMPGSFVPTVTAITTSQDLQWLVQPTLISSMAQSQGQPLASQPPVVDPYDMPGTSYSTPGMSGYSSGGASGSGGPSTSGTTSGPGPARPARARPRRPREETLTPEEEEKRRVRRERNKLAAAKCRNRRRELTDRLQAETDQLEEEKAELESEIAELQKEKERLEFVLVAHKPGCKIPYEEGPGPGPLAEEVQVLGDPFPVVNPSYTSSFVLTCPEVSAFAGAQRTSGSDQPSDPLNSPSLLAL

SEQ ID NO: 275721 - DNA, 3612 bp, Artificial Sequence
  derived and/or modified sequence
cattcataagactcagagctacggccacggcagggacacgcggaaccaagacttggaaacttgattgttgtggttcttcttgggggttatgaaatttcattaatctttttttttccggggagaaagtttttggaaagattcttccagatatttcttcattttcttttggaggaccgacttactttttttggtcttctttattactcccctccccccgtgggacccgccggacgcgtggaggagaccgtagctgaagctgattctgtacagcgggacagcgctttctgcccctgggggagcaacccctccctcgcccctgggtcctacggagcctgcactttcaagaggtacagcggcatcctgtgggggcctgggcaccgcaggaagactgcacagaaactttgccattgttggaacgggacgttgctccttccccgagcttccccggacagcgtactttgaggactcgctcagctcaccggggactcccacggctcaccccggacttgcaccttacttccccaacccggccatagccttggcttcccggcgacctcagcgtggtcacaggggcccccctgtgcccagggaaatgtttcaggctttccccggagactacgactccggctcccggtgcagctcctcaccctctgccgagtctcaatatctgtcttcggtggactccttcggcagtccacccaccgccgccgcctcccaggagtgcgccggtctcggggaaatgcccggttccttcgtgcccacggtcaccgcgatcacaaccagccaggacctccagtggcttgtgcaacccaccctcatctcttccatggcccagtcccaggggcagccactggcctcccagcccccggtcgtcgacccctacgacatgccgggaaccagctactccacaccaggcatgagtggctacagcagtggcggagcgagtggcagtggtgggccttccaccagcggaactaccagtgggcctgggcctgcccgcccagcccgagcccggcctaggagaccccgagaggagacgctcaccccagaggaagaggagaagcgaagggtgcgccgggaacgaaataaactagcagcagctaaatgcaggaaccggcggagggagctgaccgaccgactccaggcggagacagatcagttggaggaagaaaaagcagagctggagtcggagatcgccgagctccaaaaggagaaggaacgtctggagtttgtgctggtggcccacaaaccgggctgcaagatcccctacgaagaggggcccgggccgggcccgctggcggaggaagttcaagtcctcggcgaccccttccccgttgttaacccttcgtacacttcttcgtttgtcctcacctgcccggaggtctccgcgttcgccggcgcccaacgcaccagcggcagtgaccagccttccgatcccctgaactcgccctccctcctcgctctgtgaactctttagacacacaaaacaaacaaacacatgggggagagagacttggaagaggaggaggaggaggagaaggaggagagagaggggaagagacaaagtgggtgtgtggcctccctggctcctccgtctgaccctctgcggccactgcgccactgccatcggacaggaggattccttgtgttttgtcctgcctcttgtttctgtgccccggcgaggccggagagctggtgactttggggacagggggtgggaaggggatggacacccccagctgactgttggctctctgacgtcaacccaagctctggggatgggtggggaggggggcgggtgacgcccaccttcgggcagtcctgtgtgaggattaagggacgggggtgggaggtaggctgtggggtgggctggagtcctctccagagaggctcaacaaggaaaaatgccactccctacccaatgtctcccacacccaccctttttttggggtgcctaggttggtttcccctgcactcccgaccttagcttattgatcccacatttccatggtgtgagatcctctttactctgggcagaagtgagccccccccttaaagggaattcgatgcccccctagaataatctcatccccccacccgacttcttttgaaatgtgaacgtccttccttgactgtctagccactccctcccagaaaaactggctctgattggaatttctggcctcctaaggctccccaccccgaaatcagcccccagccttgtttctgatgacagtgttatcccaagaccctgccccctgccagccgaccctcctggccttcctcgttgggccgctctgatttcaggcagcaggggctgctgtgatgccgtcctgctggagtgatttatactgtgaaatgagttggccagattgtggggtgcagctgggtggggcagcacacctctggggggataatgtccccactcccgaaagcctttcctcggtctcccttccgtccatcccccttcttcctcccctcaacagtgagttagactcaagggggtgacagaaccgagaagggggtgacagtcctccatccacgtggcctctctctctctcctcaggaccctcagccctggcctttttctttaaggtcccccgaccaatccccagcctaggacgccaacttctcccaccccttggcccctcacatcctctccaggaagggagtgaggggctgtgacatttttccggagaagatttcagagctgaggctttggtacccccaaacccccaatatttttggactggcagactcaaggggctggaatctcatgattccatgcccgagtccgcccatccctgaccatggttttggctctcccaccccgccgttccctgcgcttcatctcatgaggatttctttatgaggcaaatttatattttttaatatcggggggtggaccacgccgccctccatccgtgctgcatgaaaaacattccacgtgccccttgtcgcgcgtctcccatcctgatcccagacccattccttagctatttatccctttcctggtttccgaaaggcaattatatctattatgtataagtaaatatattatatatggatgtgtgtgtgtgcgtgcgcgtgagtgtgtgagcgcttctgcagcctcggcctaggtcacgttggccctcaaagcgagccgttgaattggaaactgcttctagaaactctggctcagcctgtctcgggctgacccttttctgatcgtctcggcccctctgattgttcccgatggtctctctccctctgtcttttctcctccgcctgtgtccatctgaccgttttcacttgtctcctttctgactgtccctgccaatgctccagctgtcgtctgactctgggttcgttggggacatgagattttattttttgtgagtgagactgagggatcgtagatttttacaatctgtatctttgacaattctgggtgcgagtgtgagagtgtgagcagggcttgctcctgccaaccacaattcaatgaatccccgacccccctaccccatgctgtacttgtggttctctttttgtattttgcatctgaccccggggggctgggacagattggcaatgggccgtcccctctccccttggttctgcactgttgcc

SEQ ID NO: 275722 - DNA, 876 bp, Artificial Sequence
  derived and/or modified sequence
atgttccaggcctttcctggcgactacgatagtggttcaaggtgttctagctccccttcagcggagtcccagtacctgtccagcgttgattctttcgggtctccaccgacagcagctgcttcccaagaatgcgctggacttggcgagatgccagggtcatttgtgcctactgttaccgccataactacttcacaggatcttcagtggcttgttcagcctactcttatcagttctatggcgcagtctcagggtcaacccctcgcctcgcagccacccgtggtggatccctatgacatgccggggactagctattccacccccggaatgtccggttactcgtccggtggagcgtcaggctctgggggaccaagcacctcaggaactacttctggccccgggcctgcccgtccggctagagcccggcccaggagacccagggaggaaaccctgactcctgaagaggaagagaagaggcgcgtgcgacgagagcgaaacaaattggccgccgctaagtgcagaaacagacggagggagctaactgatcgccttcaggcagagacagaccagctggaagaagaaaaagcagagctggaatccgaaattgctgaactgcagaaagagaaggaacggctggaattcgtgctcgtagcacataaacctggttgtaaaattccctacgaggagggccctggccccggcccgctagctgaggaagtgcaggttctgggggatcccttccctgtggtgaacccaagctacaccagctcctttgtgcttacttgtcctgaagtgagcgcctttgctggcgctcagcgaactagcggttccgatcaaccctctgatcctctgaattcccccagcttgctcgccctatag

SEQ ID NO: 275723 - DNA, 876 bp, Artificial Sequence
  derived and/or modified sequence
atgttccaggccttccctggggactatgattctggcagccgctgcagcagcagccccagcgctgagagccagtacctgagctctgtggacagctttggcagccccccaacagctgctgccagccaggagtgtgccggcctgggggagatgcctggcagctttgtgcccaccgtgacagccatcaccaccagccaggacctgcagtggctggtgcagcccaccctcatcagctccatggcccagagccagggccagcccctggccagccagccccctgtggtggacccctatgacatgcctggcaccagctacagcaccccaggcatgagcggctacagcagcggcggggccagcggcagcggcggccccagcaccagcggcaccaccagcggccctggccctgcccggcctgcccgggcccggccccggcggccccgggaggagaccctgaccccagaggaggaggagaagagaagagtgagaagagagaggaacaagctggccgccgccaagtgcaggaacagaagaagagagctgacagaccggctgcaggccgagacagaccagctggaggaggagaaggccgagctggagagcgagattgctgagctgcagaaggagaaggagcggctggagtttgtgctggtggcccacaagccaggctgcaagatcccctatgaggagggccctggccctggccccctggccgaggaggtgcaggtgctgggggaccccttccctgtggtgaaccccagctacaccagcagctttgtgctgacctgcccagaggtgtctgcctttgctggggcccagaggaccagcggcagtgaccagcccagcgaccccctgaacagccccagcctgctggccctgtag

SEQ ID NO: 275724 - DNA, 876 bp, Artificial Sequence
  derived and/or modified sequence
atgttccaggccttccccggcgactacgacagcggcagccggtgcagttctagtccatctgcagagtcacagtacttatccagtgtagactccttcggcagcccacccactgcagcagcctcccaggagtgcgccggtcttggcgaaatgcccgggtcgtttgtgcctacggtaacggctattacaaccagccaggatctccagtggctggtccaaccaacgctaatatcatccatggcacagtctcagggccagccactggcatctcaaccaccggtggtggacccatacgacatgccgggtacctcctattctacccccggaatgtcaggttattcatcagggggggcgagtggatccggtggtccctctacgagcggtacgacctcaggacccgggcccgcacggcccgccagggctaggccaaggcgcccgcgcgaggagactttgacacctgaggaggaggagaagcgccgtgtgaggagggagagaaataagctggctgccgccaagtgccgcaatcggaggcgcgaactgaccgacaggcttcaggcagagacggaccagctggaggaggaaaaggcagagttagagagcgaaatcgcagaactccagaaggaaaaggagcgacttgaattcgtgttggtagcccataagccaggctgcaagatcccatacgaagaagggcccgggcccgggcctctcgccgaggaggtgcaggtgctgggggacccattcccagtggtaaacccaagttacacttcaagttttgtcctgacgtgtccggaagtctccgcgttcgccggcgcccagaggaccagtggatccgaccagcctagcgatcccctgaactctccctcattactcgccctctag

SEQ ID NO: 275725 - DNA, 876 bp, Artificial Sequence
  derived and/or modified sequence
atgtttcaggctttcccgggagattatgatagtggcagcaggtgcagcagcagtccctctgccgaatcccagtacctgtctagtgtagattctttcggctccccgcctaccgccgcagcaagtcaggaatgtgccggacttggggaaatgccgggttctttcgtgccaaccgtgactgccataaccacaagccaggacttgcagtggctcgtccagccgacgctgatctcgtccatggctcagtctcagggtcagccactcgccagccaaccgccagtggtggacccttacgatatgcccggaacctcatattccactcctggcatgtcaggctattcctctggcggagcctccgggagtggcggaccttctacatcaggaacgacctctggcccaggacctgcacggcctgctcgcgcacgtccacggaggccaagagaggaaacgttaacacctgaggaagaagagaagaggagggtacgtagggagagaaataagttggcagcggcaaagtgcagaaatagacgcagagagttaacagacagactacaggcagagacagatcagctcgaggaggaaaaggcagagcttgaaagtgagatagccgagttacagaaagagaaggagcgcctcgagtttgtgttggtggctcataaacccggatgtaagattccctacgaggaggggcctgggcctggtccactggccgaggaggtgcaggtcctgggcgatcctttcccagtcgtgaacccttcttacacatcctcttttgtgctgacctgccccgaggtttccgcttttgctggtgctcagagaacgagtggttcagaccaaccaagcgatcccctgaatagcccttccctgctggccctgtag

SEQ ID NO: 275726 - DNA, 876 bp, Artificial Sequence
  derived and/or modified sequence
atgttccaggccttccccggcgactacgacagcggcagcagatgcagcagcagccccagcgccgagagccagtacctgagcagcgtggacagcttcggcagcccccccaccgccgccgccagccaggagtgcgccggcctgggcgagatgcccggcagcttcgtgcccaccgtgaccgccatcaccaccagccaggacctgcagtggctggtgcagcccaccctgatcagcagcatggcccagagccagggccagcccctggccagccagccccccgtggtggacccctacgacatgcccggcaccagctacagcacccccggcatgagcggctacagcagcggcggcgccagcggcagcggcggccccagcaccagcggcaccaccagcggccccggccccgccagacccgccagagccagacccagaagacccagagaggagaccctgacccccgaggaggaggagaagagaagagtgagaagagagagaaacaagctggccgccgccaagtgcagaaacagaagaagagagctgaccgacagactgcaggccgagaccgaccagctggaggaggagaaggccgagctggagagcgagatcgccgagctgcagaaggagaaggagagactggagttcgtgctggtggcccacaagcccggctgcaagatcccctacgaggagggccccggccccggccccctggccgaggaggtgcaggtgctgggcgaccccttccccgtggtgaaccccagctacaccagcagcttcgtgctgacctgccccgaggtgagcgccttcgccggcgcccagagaaccagcggcagcgaccagcccagcgaccccctgaacagccccagcctgctggccctgtag

SEQ ID NO: 275727 - protein, 257 aa, Artificial Sequence
  derived and/or modified sequence
MSDEGSRGSRLPLALPPASQGCSSGGGGGGSSAGGSGNSRPPRNLQGLLQMAITAGSEEPDPPPEPMSEERRQWLQEAMSAAFRGQREEVEQMKSCLRVLSQPMPPTAGEAEQAADQQEREGALELLADLCENMDNAADFCQLSGMHLLVGRYLEAGAAGLRWRAAQLIGTCSQNVAAIQEQVLGLGALRKLLRLLDRDACDTGVRECREPELGLEELLRHRCQLLQQHEEYQEELEFCEKLLQTCFSSPADDSMDR

SEQ ID NO: 275728 - protein, 721 aa, Artificial Sequence
  derived and/or modified sequence
MLFGLVRQGLKCDGCGLNYHKRCAFSIPNNCSGARKRRLSSTSLASGHSVRLGTSESLPCTAEELSRSTTELLPRRPPSSSSSSSASSYTGRPIELDKMLLSKVKVPHTFLIHSYTRPTVCQACKKLLKGLFRQGLQCKDCKFNCHKRCATRVPNDCLGEALINGDVPMEEATDFSEADKSALMDESEDSGVIPGSHSENALHASEEEEGEGGKAQSSLGYIPLMRVVQSVRHTTRKSSTTLREGWVVHYSNKDTLRKRHYWRLDCKCITLFQNNTTNRYYKEIPLSEILTVESAQNFSLVPPGTNPHCFEIVTANATYFVGEMPGGTPGGPSGQGAEAARGWETAIRQALMPVILQDAPSAPGHAPHRQASLSISVSNSQIQENVDIATVYQIFPDEVLGSGQFGVVYGGKHRKTGRDVAVKVIDKLRFPTKQESQLRNEVAILQSLRHPGIVNLECMFETPEKVFVVMEKLHGDMLEMILSSEKGRLPERLTKFLITQILVALRHLHFKNIVHCDLKPENVLLASADPFPQVKLCDFGFARIIGEKSFRRSVVGTPAYLAPEVLLNQGYNRSLDMWSVGVIMYVSLSGTFPFNEDEDINDQIQNAAFMYPASPWSHISAGAIDLINNLLQVKMRKRYSVDKSLSHPWLQEYQTWLDLRELEGKMGERYITHESDDVRWEQFAAEHPLPGSGLPTDRDLGGACPPQDHDMQGLAERISVL

SEQ ID NO: 275729 - DNA, 2166 bp, Artificial Sequence
  derived and/or modified sequence
atgctgtttggattggtgcggcaggggctgaaatgtgacgggtgcggtctcaattaccataaaaggtgcgcctttagtatcccgaataattgctcaggcgctcggaagaggagattgtcgtctacatccctcgcctcagggcatagcgtgagattaggaacatctgagtcactgccttgtactgctgaggagttgagcaggtccacaacagaattattaccacggagacccccgtcctctagcagttcctcctctgcttcaagctacactggcagacctatcgaactcgacaagatgttgctctctaaggtaaaggtgccccatacttttcttattcactcatacacacgtccaacagtctgtcaggcttgtaagaagctgctgaaaggattattccggcaaggcttgcagtgcaaagactgtaaatttaattgccacaaacgctgcgccacacgagttcctaacgactgcctgggagaggccctgatcaacggagacgtgccaatggaggaagccacagacttctcggaggcagacaagagcgccctgatggatgagtcagaggactccggcgtgatccccggttcccacagcgagaatgcactacatgcttctgaggaagaagagggcgaaggcgggaaggctcaaagctccctgggatacatccctctgatgagggtggtgcagtctgtcaggcacacaactcgcaagtctagcactacactgagggagggctgggtggtccactactccaacaaagatacgttgagaaaacggcattactggcggctcgactgtaagtgtatcaccctgttccaaaacaataccacaaatcgctattacaaggagattcccttgagtgaaatcctaaccgttgagtctgcacagaacttttcattggtgcctccaggcactaatccccactgcttcgaaattgtgacagcgaacgccacgtacttcgtgggcgagatgccagggggaacccccggggggcccagtgggcagggagccgaggctgcacgcggttgggaaactgccattcggcaggctctcatgcccgtgatcctgcaagatgcaccctcggctccagggcacgccccacaccgacaggcaagtctgtctattagtgtgtctaatagtcagatacaggagaacgtggacatcgccacagtgtaccagatctttccagacgaagtccttggatcaggccagttcggggtcgtgtatggcggcaagcacaggaagactggaagggatgttgccgtcaaggtcattgacaagctgcgattccccaccaagcaggagtcccagctgcggaatgaagtagccatcctccagagtcttcgccatcccggtatcgtcaaccttgagtgtatgttcgaaactcctgaaaaggtcttcgtggttatggaaaaattgcacggcgacatgctagaaatgatcttatcctccgagaagggccgtctccccgagcggttaaccaagttcttaatcactcagatcctggtggcgctccgtcacctgcactttaaaaatattgttcactgcgaccttaaaccggagaacgtattgctggccagcgcagatcctttccctcaagttaaactctgcgactttgggttcgcgagaattataggagaaaagtcttttcgacggtctgtcgtgggtaccccggcgtatctggccccggaggtcctcttaaatcagggctacaataggtcactggacatgtggtctgtgggagtgatcatgtacgtgagcctctctggaacctttccttttaatgaggatgaagacattaatgaccagattcagaatgctgcattcatgtacccagcttctccatggtcccacatatccgcaggagcaatagacctcataaataacctcttgcaagttaagatgcgcaaacgttactctgtggacaaaagcctgagccatccctggttgcaggaataccaaacgtggctggatctgagggaacttgaaggtaaaatgggagagcgctacatcactcacgaaagtgatgacgtgaggtgggaacagtttgccgctgaacaccccctgcccggctctggcctccccacagaccgagatctaggtggcgcctgtccccctcaagatcacgacatgcaggggctcgccgagaggatttccgtgctttag

SEQ ID NO: 275730 - DNA, 2166 bp, Artificial Sequence
  derived and/or modified sequence
atgctgtttggcctggtgcggcagggcctgaagtgtgatggctgcggcctgaactaccacaagagatgtgccttcagcatccccaacaactgcagcggggccaggaagaggcggctgagcagcaccagcctggccagcggccacagcgtgcggctgggcaccagcgagagcctgccctgcacagctgaggagctgagccgcagcaccacagagctgctgcccaggaggcctcccagcagcagcagcagcagcagcgccagcagctacacaggccggcccatcgagctggacaagatgctgctgagcaaggtgaaggtgccccacaccttcctgatccacagctacacccggcccaccgtgtgccaggcctgcaagaagctgctgaagggcctcttccggcagggcctgcagtgcaaggactgcaagttcaactgccacaagagatgtgccaccagggtgcccaatgactgcctgggggaggccctgatcaatggagatgtgcccatggaggaggccacagacttcagcgaggccgacaagagcgccctgatggatgaaagtgaggacagcggggtcatccctggcagccacagtgaaaatgccctgcacgccagcgaggaggaggagggggagggcggcaaggcccagagcagcctgggctacatccccctgatgagggtggtgcagagcgtgcgccacaccaccaggaagagcagcaccaccctgcgggagggctgggtggtgcactacagcaacaaggacaccctgaggaagaggcactactggaggctggactgcaagtgcatcaccctcttccagaacaacaccaccaaccgctactacaaggagatccccctgtctgagatcctgactgtggagagcgcccagaacttcagcctggtgcccccaggcaccaacccccactgctttgagatcgtgacagccaatgccacctactttgtgggggagatgcctgggggcaccccaggcggccccagcggccagggcgctgaggccgcccggggctgggagacagccatccggcaggccctgatgcctgtgatcctgcaggatgcccccagcgcccctggccacgccccccaccggcaggccagcctgagcatctctgtgagcaacagccagatccaggagaatgtggacatcgccaccgtgtaccagatcttcccagatgaggtgctgggcagcggccagtttggagtggtgtatggaggcaagcacaggaagacaggaagagatgtggccgtgaaggtgattgacaagctgcgcttccccaccaagcaggagagccagctgagaaatgaggtggccatcctgcagagcctgcggcaccctggcatcgtgaacctggagtgcatgtttgagaccccagagaaggtgtttgtggtgatggagaagctgcacggggacatgctggagatgatcctgagcagcgagaagggccgcctgcctgagcggctgaccaagttcctgatcacccagatcctggtggccctgcggcacctgcacttcaagaacatcgtgcactgtgacctgaagccagaaaatgtgctgctggccagcgctgaccccttcccccaggtgaagctgtgtgactttggatttgcccgcatcattggagagaagagcttcagaagatctgtggtgggcaccccagcctacctggcccctgaggtgctgctgaaccagggctacaacagaagcctggacatgtggagcgtgggcgtcatcatgtatgtgtccctgagcggcaccttccccttcaatgaagatgaggacatcaatgaccagatccagaatgctgccttcatgtacccagccagcccctggagccacatctctgctggggccatcgacctgatcaacaacctgctgcaggtgaagatgaggaagcgctacagcgtggacaagagcctgagccacccctggctgcaggagtaccagacctggctggacctgcgggagctggagggcaagatgggagagcgctacatcacccatgaaagtgatgatgtgcgctgggagcagtttgctgctgagcaccccctgcccggcagcggcctgcccacagaccgggacctgggcggggcctgccccccccaggaccatgacatgcagggcctggccgagcgcatctctgtgctgtag

SEQ ID NO: 275731 - DNA, 2166 bp, Artificial Sequence
  derived and/or modified sequence
atgctgttcggcctggtgcggcagggcctgaagtgcgacggctgcgggctgaattatcataaacggtgcgccttttctatccccaacaattgttccggagccaggaagcgccggctgagttccacctccctagcgagcggtcattcagttcgcctgggcacatccgagtcactgccctgcacagcagaggaactaagccgatcaacaactgaactgctgccgaggaggccccccagtagttctagtagttctagcgcgtccagttatacgggacgacctatagagctggataagatgttactgtctaaagtcaaggttccccatacattcttgatacacagctacactagacctaccgtgtgccaggcctgtaagaaactgttgaagggactctttcggcaaggtctgcagtgcaaggactgcaagttcaactgtcataagcgttgtgctacacgcgtgcccaacgactgtctcggggaggcacttatcaacggggacgtacctatggaggaggcgaccgacttcagcgaggcggacaagagtgcattaatggacgagtcggaggatagcggcgttataccaggcagccactccgaaaatgctcttcatgcctcggaggaagaggagggcgagggcgggaaggcccagtcatccttgggatatattcccctgatgcgtgtggttcaaagcgtgcgacacactacccgtaagagtagtacaacgttacgcgagggctgggtggtccactacagcaataaagataccctccggaagcgtcattactggaggctcgattgtaagtgcattacgctgtttcaaaacaacaccaccaaccgctactataaagagattcctcttagcgagatcctgaccgtcgaatccgcccaaaacttcagtctcgtgccccccggcaccaatccacactgttttgagatcgttactgccaatgcgacatatttcgtcggagaaatgcctggcggcaccccaggcgggccaagtgggcagggtgcagaggctgctcgaggctgggaaacagccatccgccaagcactgatgcccgtgatcctacaggatgctccctctgctcctggacacgccccccatcgccaggctagtctatctatcagtgtgagcaatagccagattcaagagaatgtggatattgccacagtgtaccagatcttcccggatgaggtgctggggagtggccagttcggcgtggtgtacggtgggaaacacagaaagacaggtagggacgtcgccgtgaaggtgattgacaaattgagattccccacaaagcaggagagtcaattgcgcaacgaagtcgccattcttcagtccctgagacatccaggcatcgtcaacttggaatgcatgtttgagaccccagagaaagtgttcgtggtgatggagaagctgcacggggacatgttagagatgatactgtcaagtgagaaaggacgcctgccagagcgactcaccaaatttctgattacacagatacttgtagccctgagacatctgcacttcaagaacattgtacattgtgacctgaaacccgagaacgtgctacttgctagtgccgatccgtttcctcaggtcaagctgtgtgattttggttttgcgagaataatcggcgaaaagagcttcaggaggtctgtcgtcggcacccccgcctatctggctcccgaggttttgctcaaccaagggtacaatcgatcccttgatatgtggtcagtgggcgtgatcatgtatgtgtcactctccgggacatttccgtttaatgaggatgaagacattaacgaccagattcagaatgcagcgttcatgtacccagccagtccatggtcacatatctctgcgggagcgattgacctcataaacaacctgctgcaggtgaaaatgcgaaagaggtatagcgtggacaaatccctctctcacccctggttgcaggagtatcagacctggctcgacctcagagagctcgaaggcaaaatgggcgagcgctacattactcatgaaagtgacgacgtgcgctgggagcagtttgccgccgaacatcctctgccaggaagcgggctgcctaccgatcgagaccttggcggtgcatgcccaccgcaggatcacgacatgcaggggctcgccgaacgtatatccgtgctttag

SEQ ID NO: 275732 - DNA, 2166 bp, Artificial Sequence
  derived and/or modified sequence
atgctctttgggctggtgaggcagggtttaaaatgtgatggctgcggcttgaactaccacaagcgctgcgctttttctatacctaacaattgtagtggggctagaaagcggagactgagttctacctccttagcgtcaggccattctgtccggttgggcactagtgagtccctaccatgcacggccgaagagctctcccggtcgaccacggagctcttgccgagaaggcctccaagcagctcaagctcctcatctgcgtcaagttataccggcagaccaatcgaattagacaagatgctgctttctaaggtaaaggtgccgcatacgtttctgattcattcctacactcgccctaccgtatgccaggcctgtaagaagctgctgaaaggcttatttcggcagggcctgcagtgtaaggattgcaaattcaattgccacaagaggtgcgcaacccgcgtgcctaatgattgtctcggcgaggctctcatcaatggcgacgtccctatggaggaagccaccgacttcagcgaagctgataagtcagcgttgatggacgagtcagaggactccggcgtcataccaggaagccactctgagaatgccctgcacgcgtccgaggaagaagaaggtgaagggggtaaggcccagtcttcccttgggtacatcccgctaatgagggtggtgcaaagcgtgcggcataccacccgcaagtcttcgactaccttgcgggagggatgggtagttcactatagcaacaaagacacgctgagaaaacgtcattattggagactggattgtaagtgtattaccttgtttcaaaataatactaccaaccggtactacaaggaaattcccctgtcagagatcctgaccgtagagagcgctcaaaacttctccttggtgccaccgggaaccaatccccattgttttgagatcgtgacagctaatgccacctactttgtcggcgaaatgccagggggtacacctggcggtccttccggccaaggggcagaggcagctcgcggttgggagaccgctatcagacaggccctcatgcctgtgatactgcaggacgctcctagtgctccaggacacgccccacaccgccaggcctccctgtccattagtgtctctaatagccagatacaggagaacgtcgatattgccacagtctaccagattttccccgatgaagtgctcggaagcggccaattcggggtggtgtacggaggtaagcacagaaagactggaagggatgtcgcagtcaaggtgatagataagctgcgttttcctacaaagcaggagtctcagttgcggaatgaggtggcaatacttcagtcgctgcgccacccaggaattgtgaacctggagtgtatgttcgaaaccccggaaaaggtgttcgtcgtgatggagaagctccatggggacatgctggagatgatactgagctcagaaaaaggtaggttaccagaaaggttgaccaaattcctgattacgcagattctggtggccctgcgacatctgcacttcaagaacatcgttcattgcgacctgaaaccagagaacgtgctgctagccagtgccgaccccttcccgcaggtgaagctttgtgatttcggctttgccaggatcattggcgaaaaatcattcaggcgctccgtcgtgggcacacctgcctatctggctcccgaagtgctcctgaatcaaggctacaaccgatcgctggacatgtggagcgtgggagtgatcatgtatgtttctctgagcggaaccttcccttttaatgaggacgaggacatcaacgaccagattcagaacgcagcattcatgtaccctgcttccccctggtcccatatttcagcaggcgcaatcgatttaatcaataacctcctgcaagttaagatgcggaagcggtacagtgttgacaaatcactgagccatccctggctccaggagtaccagacatggttagacctgagggagctcgagggaaaaatgggcgagagatatattactcacgagtctgacgatgtaaggtgggaacagtttgcagctgaacaccctctgccaggttcaggcctgcccactgatcgggatcttggcggagcctgcccccctcaggaccacgacatgcaaggcttggcagaacgaatatcagttctctag

SEQ ID NO: 275733 - DNA, 2166 bp, Artificial Sequence
  derived and/or modified sequence
atgctgttcggcctggtgagacagggcctgaagtgcgacggctgcggcctgaactaccacaagagatgcgccttcagcatccccaacaactgcagcggcgccagaaagagaagactgagcagcaccagcctggccagcggccacagcgtgagactgggcaccagcgagagcctgccctgcaccgccgaggagctgagcagaagcaccaccgagctgctgcccagaagaccccccagcagcagcagcagcagcagcgccagcagctacaccggcagacccatcgagctggacaagatgctgctgagcaaggtgaaggtgccccacaccttcctgatccacagctacaccagacccaccgtgtgccaggcctgcaagaagctgctgaagggcctgttcagacagggcctgcagtgcaaggactgcaagttcaactgccacaagagatgcgccaccagagtgcccaacgactgcctgggcgaggccctgatcaacggcgacgtgcccatggaggaggccaccgacttcagcgaggccgacaagagcgccctgatggacgagagcgaggacagcggcgtgatccccggcagccacagcgagaacgccctgcacgccagcgaggaggaggagggcgagggcggcaaggcccagagcagcctgggctacatccccctgatgagagtggtgcagagcgtgagacacaccaccagaaagagcagcaccaccctgagagagggctgggtggtgcactacagcaacaaggacaccctgagaaagagacactactggagactggactgcaagtgcatcaccctgttccagaacaacaccaccaacagatactacaaggagatccccctgagcgagatcctgaccgtggagagcgcccagaacttcagcctggtgccccccggcaccaacccccactgcttcgagatcgtgaccgccaacgccacctacttcgtgggcgagatgcccggcggcacccccggcggccccagcggccagggcgccgaggccgccagaggctgggagaccgccatcagacaggccctgatgcccgtgatcctgcaggacgcccccagcgcccccggccacgccccccacagacaggccagcctgagcatcagcgtgagcaacagccagatccaggagaacgtggacatcgccaccgtgtaccagatcttccccgacgaggtgctgggcagcggccagttcggcgtggtgtacggcggcaagcacagaaagaccggcagagacgtggccgtgaaggtgatcgacaagctgagattccccaccaagcaggagagccagctgagaaacgaggtggccatcctgcagagcctgagacaccccggcatcgtgaacctggagtgcatgttcgagacccccgagaaggtgttcgtggtgatggagaagctgcacggcgacatgctggagatgatcctgagcagcgagaagggcagactgcccgagagactgaccaagttcctgatcacccagatcctggtggccctgagacacctgcacttcaagaacatcgtgcactgcgacctgaagcccgagaacgtgctgctggccagcgccgaccccttcccccaggtgaagctgtgcgacttcggcttcgccagaatcatcggcgagaagagcttcagaagaagcgtggtgggcacccccgcctacctggcccccgaggtgctgctgaaccagggctacaacagaagcctggacatgtggagcgtgggcgtgatcatgtacgtgagcctgagcggcaccttccccttcaacgaggacgaggacatcaacgaccagatccagaacgccgccttcatgtaccccgccagcccctggagccacatcagcgccggcgccatcgacctgatcaacaacctgctgcaggtgaagatgagaaagagatacagcgtggacaagagcctgagccacccctggctgcaggagtaccagacctggctggacctgagagagctggagggcaagatgggcgagagatacatcacccacgagagcgacgacgtgagatgggagcagttcgccgccgagcaccccctgcccggcagcggcctgcccaccgacagagacctgggcggcgcctgccccccccaggaccacgacatgcagggcctggccgagagaatcagcgtgctgtag

SEQ ID NO: 275734 - protein, 209 aa, Artificial Sequence
  derived and/or modified sequence
MDSDETGFEHSGLWVSVLAGLLLGACQAHPIPDSSPLLQFGGQVRQRYLYTDDAQQTEAHLEIREDGTVGGAADQSPESLLQLKALKPGVIQILGVKTSRFLCQRPDGALYGSLHFDPEACSFRELLLEDGYNVYQSEAHGLPLHLPGNKSPHRDPAPRGPARFLPLPGLPPALPEPPGILAPQPPDVGSSDPLSMVGPSQGRSPSYAS

SEQ ID NO: 275735 - DNA, 630 bp, Artificial Sequence
  derived and/or modified sequence
atggacagcgacgagaccggcttcgagcacagcggcctgtgggtgagcgtgctggccggcctgctgctgggcgcctgccaggcccaccccatccccgacagcagccccctgctgcagttcggcggccaggtgagacagagatacctgtacaccgacgacgcccagcagaccgaggcccacctggagatcagagaggacggcaccgtgggcggcgccgccgaccagagccccgagagcctgctgcagctgaaggccctgaagcccggcgtgatccagatcctgggcgtgaagaccagcagattcctgtgccagagacccgacggcgccctgtacggcagcctgcacttcgaccccgaggcctgcagcttcagagagctgctgctggaggacggctacaacgtgtaccagagcgaggcccacggcctgcccctgcacctgcccggcaacaagagcccccacagagaccccgcccccagaggccccgccagattcctgcccctgcccggcctgccccccgccctgcccgagccccccggcatcctggccccccagccccccgacgtgggcagcagcgaccccctgagcatggtgggccccagccagggcagaagccccagctacgccagctag

SEQ ID NO: 275736 - DNA, 630 bp, Artificial Sequence
  derived and/or modified sequence
atggactcggatgagaccgggttcgaacatagcggcctctgggtaagtgtgctcgctggattgttactcggtgcctgccaagcacaccctattcctgactcttcaccactgcttcagtttgggggccaggtcagacagaggtatctctacaccgatgacgcgcagcagaccgaggctcacctggaaattagggaggatggaacggtcgggggtgctgccgatcaaagcccagagtctcttctccagttgaaagctttaaaacccggggtcatccagatcctgggagttaaaacatcaagattcttgtgtcaacggccggatggcgctctgtacgggagtctgcattttgaccccgaagcttgttccttcagagagctgctgttggaagatggatataacgtgtaccagtcagaggcccacggcctcccgttgcacctgcccggaaacaagtccccgcatcgtgacccggctccacggggtcctgcccgatttctgccactaccggggctgcctcccgcattgccagagcctcctggtatcctggccccacaaccacccgacgtcgggagctctgaccctctgtcaatggtcggccccagtcaaggcagaagcccttcctacgctagttag

SEQ ID NO: 275737 - DNA, 630 bp, Artificial Sequence
  derived and/or modified sequence
atggacagtgatgagaccggctttgagcacagcggcctgtgggtgtctgtgctggccggcctgctgctgggcgcctgccaggcccaccccatcccagacagcagccccctgctgcagtttggaggccaggtgcggcagcgctacctgtacacagatgatgcccagcagacagaggcccacctggagatcagagaagatggcaccgtgggcggcgctgctgaccagagccctgagagcctgctgcagctgaaggccctgaagccaggagtcatccagatcctgggcgtgaagaccagccgcttcctgtgccagaggccagatggagccctgtatggcagcctgcactttgatcctgaggcctgcagcttccgggagctgctgctggaggatggctacaacgtgtaccagagcgaggcccacggcctgcccctgcacctgcccggcaacaagagcccccaccgggaccctgccccccggggccctgcccgcttcctgcccctgcccggcctgcccccagccctgcctgagcccccaggcatcctggccccccagcccccagatgtgggcagcagtgaccccctgtccatggtgggccccagccagggccgcagccccagctatgccagctag

SEQ ID NO: 275738 - DNA, 630 bp, Artificial Sequence
  derived and/or modified sequence
atggacagcgacgagaccggcttcgagcacagcggcctgtgggtgtcagtgcttgccgggcttctgttaggcgcttgtcaggcccatcccattcccgattcctcaccgctcctgcagttcggcggtcaagtgcgccagcgctacctgtacaccgacgatgcacagcagacagaagcccatctggagatccgggaggacgggacggtaggaggggccgccgatcagagtccggagagtctcctccagctaaaggcgttaaagcctggtgtcatacagatcctgggtgtcaagacttctaggttcctgtgccagcgccctgacggggccttatacggttcgctgcacttcgaccccgaagcatgctctttcagagagctgcttttggaggacggatacaacgtttatcagagtgaggcccacggcttgcctctgcacttacccgggaacaagagtccacaccgcgatccagctccacgaggacccgctagattccttccactgcccggcctgcctccggcccttcctgaacccccgggaatcttagctccccagccacccgacgtgggatcatccgacccactgtcaatggtgggcccgagtcagggcaggtccccctcctatgcctcttag

SEQ ID NO: 275739 - DNA, 630 bp, Artificial Sequence
  derived and/or modified sequence
atggattctgacgaaaccgggtttgaacactcaggcctgtgggtgagcgtgctggcaggtctcttgcttggcgcatgtcaggcccatccaattccggatagtagtccactgctacagtttggcggtcaggttagacagaggtacctgtacaccgatgatgcacagcaaacagaggcccacctggagattcgagaggatggaactgtaggaggagccgcagaccagagtcccgaatctctgttgcagctcaaagctctgaaacctggcgtgatccagattcttggagtcaaaacttccaggtttctctgccagcggccagacggggcactgtatgggtccctgcacttcgatcctgaggcctgctcattcagggagctactgctggaggatggctataatgtctatcagtcagaagcacacggactacccctgcatctccccggaaacaaatcaccccatcgggacccagccccaaggggcccagcacggttcctgccattgccgggtttacctccagctttgcccgagcccccaggaattctggctcctcaacctcctgatgtcgggtctagcgatccactgagtatggttggcccaagtcagggccgtagtccttcttatgcctcatag

SEQ ID NO: 275740 - DNA, 627 bp, Artificial Sequence
  derived and/or modified sequence
atggactccgatgaaaccggctttgaacatagcggattgtgggtgtcggtgctcgccggactcctgctgggcgcgtgtcaagcccacccgattccggatagctcgcctctcttgcagttcggtggtcaggtcagacaaaggtatctgtacactgacgatgcccagcagacggaggcacatctcgagattcgcgaagatggcactgtcggaggagcagcggatcaatcaccagaatctctgttgcagctcaaggcactcaagccgggagtgatccaaatccttggagtcaagacttcccgcttcctctgccagaggccggacggggcgctctacggatcactccacttcgaccctgaggcatgcagcttccgcgaactgctgctggaggacggatacaacgtgtaccaatcggaggcgcatggcctcccactgcacctgccgggcaacaaatccccacacagagatccggccccaagggggcctgcccgcttcctgcctctcccgggacttccacctgctctgccggagccaccggggatcctcgctcctcagccgcctgatgtgggatcgtcagatccgctgagcatggtcggaccaagccaaggccggagcccttcgtacgcctcc

SEQ ID NO: 275741 - DNA, 627 bp, Artificial Sequence
  derived and/or modified sequence
atggattcggatgaaaccggttttgaacactctggtctttgggtgtccgtgctcgccggcttgctgcttggagcatgtcaggcccaccctatccctgattcgtctccgcttctgcagtttgggggccaagtgcgtcaacggtatctctacacggacgatgcacaacagactgaagcgcatctggaaattcgagaggatggcactgtcggtggggcagctgaccaaagccctgagagtctcttgcagctgaaggctctgaagccaggtgtgatacaaatacttggagttaagaccagcaggtttctctgtcaacgtccagacggagcgttgtacgggtccttgcattttgaccccgaggcatgcagcttccgggaactccttctggaagatggatacaatgtctaccagtcagaagcccatggactcccactgcatcttccgggcaacaaatcgccccaccgggatccggcacctaggggaccggcgcgattccttccactccctggcctgccacccgcgcttcctgagccaccgggtattcttgcaccgcagccacctgacgtagggagcagtgatcctctttccatggtgggtccatcgcaagggcgctccccatcgtacgcatca

SEQ ID NO: 275742 - DNA, 627 bp, Artificial Sequence
  derived and/or modified sequence
atggactcagacgaaaccggatttgagcactcagggctgtgggtatcagtgcttgccgggcttctgctgggagcgtgccaggcacatcctatcccagattcttcccctcttcttcaattcggaggacaagtgcgtcaacgctacctctacacggacgatgcacagcagaccgaagcacacttggagattcgtgaagatggcaccgtgggaggggcagcagaccaatccccagagtcattgctgcagcttaaggccctgaagccaggagtgattcaaatcctgggtgtcaagacttccaggtttctgtgtcaaaggccggatggtgcgctgtacgggtcgctgcattttgatcctgaagcgtgtagcttcagggagctgttgctcgaagatggttacaacgtgtaccagtccgaagctcatggacttcccttgcacctgccaggcaataagtcgccccacagagatcccgcccctagaggtccggcgcgcttcctgcctcttccaggacttccacccgcactgcctgaaccacctggaatcctggcccctcagcctcctgacgtgggttcgtcggaccccctgagcatggtcggcccttcacaaggaaggagcccatcctatgcatcc

SEQ ID NO: 275743 - DNA, 627 bp, Artificial Sequence
  derived and/or modified sequence
atggatagtgatgaaacgggtttcgaacactcaggcttgtgggtcagcgtgttggccggactgctgctgggcgcatgccaagcacaccctatacccgacagctccccgctgcttcagttcgggggacaagttcgccaacgctacttgtacacggacgatgcgcagcagacagaggcccatctggagattagagaggacgggacagtcggcggggccgcggatcagagcccggagtcgctgctgcaattgaaagccctgaagcccggtgtgatccagatattgggggttaagaccagccgctttttgtgccaacgcccagacggcgctttgtacggtagcctgcatttcgacccggaggcctgctcctttcgagagctgctgctggaagatggatataatgtgtatcagagtgaggctcacggcctgcccctacacctaccgggcaacaagagtccgcatcgcgatcccgcaccacgcggccccgctagatttctgcccctgcccggattgcccccagcattgcctgagcccccaggcatcctggcaccacagccaccggatgttggctcaagcgacccgctgtccatggttggcccgagccaggggcggagccctagctacgcaagc

SEQ ID NO: 275744 - DNA, 627 bp, Artificial Sequence
  derived and/or modified sequence
atggactccgatgaaactggattcgaacactcgggactctgggtgagtgtcctcgctgggctgcttctcggagcctgccaggcccaccctataccagactcttccccgctgctccaatttggcggccaggtgcgccagagatacctgtacacagacgacgcccagcaaactgaggctcatctggaaattcgggaagacgggactgtgggcggcgccgcagatcagagtccggaatccctactccaactcaaggccctgaagcccggggtcatccagatcctcggcgtcaagacaagtcgcttcctctgccagcgaccagacggcgccctatacggttcattgcactttgatcccgaggcatgtagcttcagagagttgttgcttgaggacggctacaatgtatatcagtcagaggctcacggactgccgctgcacctgcccgggaacaaaagtccacatagagatcctgcaccccgagggccagcacgcttcctgccacttcctgggctcccccccgccctgccagagccgccagggattttggcgccgcagccccccgacgtggggtctagcgacccgctgtccatggttggcccctcgcagggcagaagccctagttacgccagt

SEQ ID NO: 275745 - DNA, 627 bp, Artificial Sequence
  derived and/or modified sequence
atggattccgacgagacggggtttgaacactctggtttgtgggtctcggtcctcgctggtttattgttgggtgcatgccaggcacacccgattccggatagctctccacttctgcagtttggtggccaggtgcgccagagatacctgtatacagatgatgctcagcagacggaagcacaccttgaaattagagaagacggtacggtgggcggagcggcggaccagagccctgaatcgctcttgcagctgaaggcgctgaaacccggcgttattcaaatattgggggtcaagacgtcgcgttttctgtgtcaacggccggatggggcactttacggctcattacattttgatccagaggcctgttcatttagagagttactgttggaagacggctataacgtgtaccaatctgaggcacatggacttccgctgcatttgcctgggaataaatcgccgcatcgtgacccggctcctagaggacctgcgagatttcttcccctgccgggcctaccaccggctcttccggaaccgccggggattttggctcctcagccaccggacgtagggagttccgatccattatccatggtgggaccgagccagggtagatcacctagctatgcatca

SEQ ID NO: 275746 - DNA, 627 bp, Artificial Sequence
  derived and/or modified sequence
atggattccgatgaaacgggatttgaacattctggcctgtgggtatcggtccttgcaggacttctgctgggagcatgccaagcacaccctataccggattcgtcccccctgctccagttcggaggacaggtgcggcaacgttacctgtacaccgatgacgcccagcaaactgaagcgcatcttgagattagggaggatggtactgtgggtggggcggcagaccaatcgcccgagtcactgctgcagctcaaggctctgaaaccaggtgtgattcaaatccttggagttaagaccagcaggtttctgtgtcaaaggcccgatggggcattgtacggttcactgcactttgatcctgaagcgtgtagcttccgtgaactgcttcttgaagatgggtacaatgtctaccagtcagaagcacatggacttccgcttcaccttcccggaaacaagtcccctcatcgcgacccagcgcctcgtggcccggcaagatttttgcccttgccagggctcccacctgcattgcctgagccgccaggaatccttgctcctcaacctcccgatgtgggctcgtctgacccactttcaatggtgggaccatcccaggggcgaagcccttcatatgcttca

SEQ ID NO: 275747 - DNA, 627 bp, Artificial Sequence
  derived and/or modified sequence
atggattctgacgagaccggtttcgagcatagtggcttatgggtgagcgtgctcgctggccttttgctaggcgcctgtcaggctcatccaatcccagatagttccccgctgctgcagtttggcggccaggtgcggcaacgctatctttacaccgacgatgctcaacagactgaagctcacctggaaattcgagaagatgggactgtggggggagccgctgatcagagcccagagagtcttctgcagctcaaagctctgaaacctggggtgattcagatccttggtgttaagacttccaggtttttgtgccagcgtcccgacggagccctctatggctccttgcacttcgatcccgaggcatgctccttcagggagctcctgcttgaggacggctacaatgtgtatcagagtgaggcacacggcctgcctctccacctcccggggaacaagagtccgcaccgagatccggccccccgtgggcctgccaggttcctccctctgccaggtttaccgccagcgctaccagagccgccaggaatactggctccacagccccccgacgtgggctcaagcgatcccctcagtatggtgggaccttcccaggggagaagcccatcttacgctagc

SEQ ID NO: 275748 - DNA, 627 bp, Artificial Sequence
  derived and/or modified sequence
atggattcggatgagacggggttcgaacactccggtttgtgggtgtcagtcttggccggattgcttctgggggcctgtcaggcccaccctatcccggactcgtcaccacttctccagtttggcggccaggtcaggcaacggtacctgtacaccgacgatgctcagcaaaccgaagcgcacctcgaaatccgcgaggacggaaccgtggggggcgctgctgaccaatcgccagagtccttgctccagcttaaggcgttgaagccgggagtgatccaaatactgggagtcaaaacttctaggttcctgtgccaacgaccggatggtgccttgtacggctcgctccacttcgatccggaagcatgctcgttccgggaacttttgctggaggacggatacaatgtgtaccagtccgaggcacatggcttgccactgcatttgccgggaaacaagagcccgcatagggacccggcaccgcgcggaccggccagatttctgcccctccccggactcccgccggcgcttccagaacccccagggattctggccccgcagcctccggacgttggatccagcgaccccctctcgatggtgggaccatctcaaggacggtccccctcgtatgcatcc

SEQ ID NO: 275749 - DNA, 627 bp, Artificial Sequence
  derived and/or modified sequence
atggacagcgatgagacaggtttcgaacatagcgggttgtgggtgagcgtattagctgggttactcctaggagcttgccaggcccaccctattcccgactcttctcctctgttacagttcggcggacaggttaggcagaggtatctgtataccgatgatgcacagcagaccgaagctcatctggagattagagaggatgggaccgtcggcggcgccgccgatcagagccccgagtccctattgcagctgaaggcactgaagcctggggtgatccaaattctaggcgtgaaaacttccaggtttttgtgtcagaggcctgatggcgccctgtacggctcacttcacttcgaccctgaggcttgcagcttcagagaactgctcctggaggacggctacaatgtgtaccagtctgaggcccatggcttgccattgcatctgcccggaaacaagtctccacaccgcgaccctgctcctcgaggcccagcgaggtttctccccctcccaggcctgccacctgcccttcccgagccgcctggaatcctggctccccagccccctgatgtcgggtcctctgacccattaagcatggttggaccctcacaaggcagaagcccatcttatgcctca

SEQ ID NO: 275750 - DNA, 627 bp, Artificial Sequence
  derived and/or modified sequence
atggactcggacgagaccggattcgaacactccggattgtgggtctctgtgctggcaggactcctccttggcgcttgccaagctcatcctattcccgactccagcccacttctacagtttgggggacaagttagacaaaggtacctgtacacagatgatgctcagcagactgaagctcatcttgaaattcgggaagacggcacagtagggggtgccgccgatcagtctccagagtccctgctgcagctcaaggctttgaaacccggcgtgatccagattctcggcgtcaagaccagccgcttcctctgccaacggcccgatggcgccctatatggttctttgcatttcgacccagaagcttgcagtttccgggagctcttgctcgaggacgggtacaacgtctatcaatctgaagcccacgggttaccccttcacctgccaggcaataaatcaccccaccgcgaccccgcaccccgcgggcctgctcggtttcttcccctgcctggactgcctcccgctctacccgaaccacccggcattctggcccctcagccccccgatgtcggcagtagcgacccactaagcatggtgggccccagtcaggggagaagtccctcatatgcgagt

SEQ ID NO: 275751 - DNA, 627 bp, Artificial Sequence
  derived and/or modified sequence
atggacagcgacgagactggatttgaacattcagggctctgggtgtcagtcctggccggcctgcttctgggagcgtgtcaagcccacccgattcctgactctagcccactcctgcagttcgggggtcaagtgcgccagcggtatctctacaccgacgatgctcaacagactgaagcacacctcgaaatccgcgaagatggaaccgtgggaggcgctgcagaccagagcccggagtccctgctgcaacttaaggctctgaaaccaggagttatccagatcctcggtgtcaagacctcgcgatttctgtgccagcgaccagatggagctttgtacggctccctgcatttcgaccccgaagcgtgctccttccgtgagctgctgctcgaggacggatacaatgtttaccagtcagaagcccacggattgccgctgcatcttccgggcaacaagagcccacacagagatcccgcccctcggggcccggcacggttcctgcctcttcctggactccccccggccctgccagagcctcctggaatccttgcgcctcagccgccagacgtgggatcaagcgatccattgtcaatggtggggccgagccaggggcgctccccgtcctacgcgagc

SEQ ID NO: 275752 - DNA, 627 bp, Artificial Sequence
  derived and/or modified sequence
atggacagcgatgagacgggcttcgagcactcaggactttgggtgtcagttctagctggcttactgctgggggcgtgccaggcacaccctatccctgatagttctcccttgttgcagttcggtgggcaggtgcggcaacgatacctgtacaccgatgacgctcaacagaccgaggcacacctggagatccgtgaggatggcactgtggggggtgccgctgatcagagtccagagtccctccttcagctaaaggctctaaagcccggggtgattcaaatactgggggtcaagacatctcgcttcctttgccagcggccagatggcgcactctacgggtccctccattttgacccagaggcctgcagtttccgtgagttattgttggaggatggttacaacgtgtaccagagcgaagctcatggcttaccccttcatctgcccgggaacaagagccctcaccgtgatcccgcaccaaggggccccgcccgatttttgcctctgccgggactgcccccggcactccccgaacctcccggcatcctggccccacagcctccagacgttggaagttcggaccctctcagcatggtaggtccatcccagggcaggagtccttcatatgctagt

SEQ ID NO: 275753 - DNA, 627 bp, Artificial Sequence
  derived and/or modified sequence
atggattccgacgaaaccggattcgaacatagcgggctgtgggtgagcgtgctggcagggcttcttctgggtgcatgccaggcacatcctattccagactcaagccctcttctccagtttgggggtcaagtcagacaacgatacctgtacaccgatgatgcacagcagacggaagcacatctcgagatacgtgaagatggtactgtcggtggtgcggcagatcaatcccctgagtcactgctccaacttaaggcactgaagcctggagttatacagattctgggcgtgaaaacgtcccgatttctttgtcaacgcccagatggagccctgtacggatcgctgcactttgatcctgaggcatgttcctttcgggaactgcttcttgaagatggctacaatgtctatcagtcggaagcccatggcctcccactccacctgcctggcaataagtcgccccaccgcgacccagcacctaggggacctgcaagattccttccattgccgggacttccacctgcgctccccgagccccccggtattctcgcccctcagccccccgatgtcggctcgtctgacccactgtccatggtgggtccttcacagggacgttcgccgtcatacgccagc

SEQ ID NO: 275754 - DNA, 627 bp, Artificial Sequence
  derived and/or modified sequence
atggactctgacgagactggattcgagcacagcggcttatgggtctccgttctggctggccttctactgggggcttgtcaagcccaccctatccctgattctagtcctctcttacagttcggcggacaggttcggcaaagatatctgtacaccgatgatgcccagcaaaccgaagcccacctcgaaattcgcgaggatggcaccgtgggcggtgctgccgaccaatcacccgagtccctcctgcagcttaaagccctgaagcctggcgtgattcagatactgggggttaagacctcacgctttctctgccagcgccccgacggtgccttgtacggtagcctgcattttgatcctgaggcttgctcctttagggagctactgctggaggatggctacaatgtgtaccagtcagaagctcacggcttgcctctgcacctaccaggcaataagagtcctcacagagatccagcacctaggggccccgcccggtttctgccactccctggtctgcccccagccctgccggagcctccaggcatactggcccctcaaccacctgatgtgggaagttctgaccccctaagcatggtgggccctagccagggacgctcccctagttatgctagt

SEQ ID NO: 275755 - DNA, 627 bp, Artificial Sequence
  derived and/or modified sequence
atggatagtgatgaaacagggtttgagcactccgggctgtgggtctctgtgcttgccggactgttgctcggagcctgtcaggcccatcccattcccgattcatcacccctacttcagttcggaggacaggttagacagcgctatctgtatactgatgacgctcagcagactgaagcccacttagaaatccgcgaagatggaacagtcgggggggcggccgatcaatctcccgagagtttgcttcaactaaaagcactaaagcccggggtgatccagatcttaggagtgaaaacttcaagatttctatgtcagaggccagatggagcactctacggatctcttcattttgatccagaagcctgttcttttcgggagctattgcttgaggatggatacaatgtgtatcaatccgaagcccacgggctgccactccatcttcccgggaacaaatccccgcatagagatccagcccctagagggccagctaggttcctgcccctccctggactccccccagccctgccagaacctcctggaatactagcaccacagcctccagatgtcgggtcatcagatcctctgtctatggtggggccatctcagggacgatctccttcttacgcatcc

SEQ ID NO: 275756 - DNA, 627 bp, Artificial Sequence
  derived and/or modified sequence
atggactcagacgaaaccggattcgagcactccgggctctgggtgtccgtgctggcagggttgctgctgggagcgtgccaggcacacccaatcccagattcgtccccgctcctccaatttggcggacaggtgagacagaggtatttgtacactgacgatgcgcaacagaccgaggcacatctggaaattcgggaggacggtacggtcggaggagcggctgaccaatcccctgagagcctcctgcagttgaaggccctgaaaccgggagtcattcagatcttgggcgtcaagacctcgaggtttctgtgccagcggccggatggtgctctgtacggttcgctccatttcgatcctgaagcatgttcgttcagggaactgctccttgaagatggttacaacgtataccagagcgaagcccatggtctgcccctccatcttccagggaacaagtcgccgcaccgcgaccccgcaccacgaggcccggcccgcttcctgcctctccctggactgccgccagcactgccagagccgccaggaatcctcgcaccccagccccctgacgtgggaagctcggaccccctgagcatggtgggaccgtcgcaagggaggtcgccgtcgtacgcaagc

SEQ ID NO: 275757 - DNA, 627 bp, Artificial Sequence
  derived and/or modified sequence
atggactcagatgaaaccgggtttgagcattccgggctctgggtgtctgttctggctggcctattgctgggggcgtgtcaggctcacccaattccagacagttcccctctgctgcaattcggtggtcaagtgaggcagagatatctgtataccgatgacgctcagcagaccgaggctcacctcgagattcgcgaagatgggaccgtaggcggagccgctgatcagtccccagaaagcctcctccagctgaaggcattaaagcccggcgtaattcagatacttggcgtcaagactagccggttcctctgccagagacccgatggcgcactgtatggttcacttcactttgaccctgaagcctgcagcttccgggagttgttgctggaggatggctataatgtctaccagtctgaggcccacggactaccactacatctcccaggaaacaaatcacctcatcgggaccccgcaccaagaggaccagcaagattcctgccactcccaggcttgccgcctgccctgcctgaacctcccgggattctagccccccaacctcctgatgtcggaagctccgaccccctgagtatggtcggtccatctcaagggaggtcaccatcttacgcttca

SEQ ID NO: 275758 - DNA, 627 bp, Artificial Sequence
  derived and/or modified sequence
atggacagcgacgagaccgggttcgagcacagtgggctctgggtgtccgtcttggcggggctgctgctgggggcttgtcaggcgcaccccatacctgattcatcccccctgttgcagtttggcgggcaggtcagacagcggtatctgtacactgatgatgctcagcagaccgaagcccacctcgagattcgcgaggatggcacggttgggggcgcggccgatcagtccccggagtccctgctccagctcaaagccctcaagcctggggtaatacagattctcggagttaaaacctctagattcttgtgtcagcgtcctgatggggcactgtacggaagcttgcactttgatcccgaggcttgtagctttcgcgaactgctccttgaagatgggtacaacgtctaccagtccgaagcacacgggcttcccctccatctaccaggaaataagagcccccaccgcgaccccgcaccgcggggtccagcccgctttctccctttgcctggactcccgccagcgctgcctgagcctcccggcattcttgctcctcagccaccagatgtcggttctagcgatcctctgtctatggtggggccttcacaagggaggagtcctagctatgccagt

SEQ ID NO: 275759 - DNA, 627 bp, Artificial Sequence
  derived and/or modified sequence
atggacagcgatgaaaccggcttcgagcattccggactgtgggtgtcagtcctggccggtctgcttttgggagcttgccaggctcacccgatccccgattcctctccgcttctgcaattcggaggtcaggtcagacaacggtacctctacactgatgacgcccagcaaacggaggcacatctcgagatccgggaagatggaaccgtgggtggagccgctgatcaatccccggaatcgctgctgcagctcaaagcgctgaagcctggagtgatccagatcttgggagtcaaaactagccggttcctgtgccagcgcccggacggagcgttgtacggatccctgcattttgatccggaagcctgctccttccgcgagctgctccttgaggacggttacaatgtgtaccagtccgaggctcatggcctgccgctccatttgcctggaaacaaatcgccacaccgggaccccgcgccgcgaggcccggcgagattcctgcctctccccggactgcccccagcgctgcctgagccgccgggaattctggccccgcaacctcccgacgtggggtcgtcggatccgctgtccatggtgggaccgtcgcagggccggtcgccatcctacgcgagc

SEQ ID NO: 275760 - DNA, 627 bp, Artificial Sequence
  derived and/or modified sequence
atggactccgatgagaccgggttcgagcactcaggactttgggtttccgtgttggccgggctactgctgggggcctgccaggcccacccaatccctgatagcagcccgctactccaatttggaggccaggtaagacaacgatacttatataccgatgacgctcagcagactgaagcacatcttgaaattcgagaggatggcacggttgggggcgcagccgatcagtccccggagtccctcttgcagctgaaagccttgaaacctggcgtcattcagattctgggtgtcaagacttctcgattcctttgccagcggccagacggcgcgttatacggtagcctccatttcgatccagaagcctgcagttttagggagttactgttagaggatggttacaatgtttaccagtcagaagcgcatggtctacctctgcatttgcctggcaataagtctccacatagagaccccgccccacggggtccagcgcgatttcttccactcccgggtcttccgcccgctctcccagaaccaccaggaattctggccccacaaccccctgatgtgggcagttccgacccgctgagcatggtgggtccctcacagggtagatcaccatcttatgcaagc

SEQ ID NO: 275761 - DNA, 627 bp, Artificial Sequence
  derived and/or modified sequence
atggacagcgatgagactggatttgaacattcagggctgtgggtgagcgtgcttgcaggtctgctccttggagcctgtcaggcacacccaattccggatagctcgcctcttttgcaattcggaggccaggtcagacagagatacctctacaccgacgatgctcagcagaccgaagcccatctggaaatcagggaggacgggactgtgggtggggcagcagatcaatcgcctgaatccctgttgcaactgaaagcactgaaacccggggtcatccaaattctcggggtgaaaacgagtcggtttttgtgccagaggcccgacggcgcgctgtacggctccctccatttcgatccagaagcatgttcctttcgagaactcttgcttgaggatggctataatgtgtaccagagcgaagcccacgggttgccccttcatttgcctggaaataagtcaccacacagagatcccgcacctcgaggacctgcacggttccttcctttgcctggtctgccccctgcactgccagagccgcccggtatcctggccccacaacccccggacgtcgggtcctcagatccactttcgatggtggggccatcccaaggacgctcaccatcctacgcttca

SEQ ID NO: 275762 - DNA, 627 bp, Artificial Sequence
  derived and/or modified sequence
atggactcagacgagacagggttcgagcactcgggtctgtgggtctccgtcctggcaggactgctgctgggggcttgtcaggcccacccaatacccgacagctcccccctgctgcagtttggcggccaagtgcggcagcggtacctgtataccgatgatgcgcagcagaccgaggctcacctggaaattagggaggacggtactgttggtggagctgccgatcagagtcccgagtcattgctgcagctgaaggccctgaagcccggggttattcagattctgggagttaagacctcacggttcctatgtcagcgcccagacggagctttgtacggaagcttgcatttcgaccctgaagcttgctcctttcgggagctactgctggaagatgggtacaacgtgtaccagtctgaggcccacgggctgcccttgcatctccccggtaacaaaagcccccatagggatccggctcctcggggccccgcaaggttccttcctctgcctggtttgccgccagctctcccagaaccaccaggaatcctggcaccccagcctccagacgtagggtcttctgatccgctgagcatggtgggtccgagccaagggcggtccccaagctatgcctca

SEQ ID NO: 275763 - DNA, 627 bp, Artificial Sequence
  derived and/or modified sequence
atggattcagacgaaacgggattcgagcattcaggactgtgggtgtcggtcctcgccggactgctgctgggggcatgtcaggcccatccaattccggacagcagcccgctgctccagttcgggggacaggttcgacaacggtacctgtacactgatgacgctcagcaaactgaggctcacttggaaatcagagaggacggaaccgtgggtggagccgctgatcagtcgcctgaaagcctgcttcaactgaaggccctcaagcccggtgtgatccagatcctgggggtgaaaacctcgcggttcctctgccaaagaccggatggagcactgtatggatctctgcatttcgacccagaggcctgctcctttcgcgagcttctgcttgaagatggctacaacgtctaccagtcggaagcgcacggtttgcctttgcacctcccgggcaataagtccccgcacagggaccctgcgccgcgcggacccgcgcggtttctcccgctccctggcctgccgccagcgctgcccgaaccgccaggcatcctggccccgcaacctccagacgtgggctccagtgacccactctcgatggtcgggccatcccagggacgctcaccgagctacgcatcc

SEQ ID NO: 275764 - DNA, 627 bp, Artificial Sequence
  derived and/or modified sequence
atggactctgacgagacaggttttgagcattccggattgtgggtcagcgtgctagctggacttttactgggtgcctgccaggctcacccgatcccagactcctcaccgctgctgcaatttggcggccaggtcagacagcgttacctctacacggacgacgcccagcagactgaagctcatttggagattcgagaggatggtactgtgggaggtgctgcggatcagagcccagagtctctattacagcttaaggccctcaaacccggggttatccagatactgggcgtgaagacatcgaggttcctatgccagcgccccgacggggcactgtatggttctttgcatttcgaccctgaggcttgtagtttccgcgagctgctgttagaggacgggtacaacgtataccaatccgaggcccatggactgcctctccatctgcctggcaataaaagcccccaccgggaccccgcgcctcgcggccccgctagattccttccactgccaggcctccccccagcgttgcctgagccccctggaatactggccccccaaccaccggatgtcgggtcatcagaccccctgagtatggtgggcccatcccaggggaggtcaccttcctatgccagc

SEQ ID NO: 275765 - DNA, 627 bp, Artificial Sequence
  derived and/or modified sequence
atggattctgacgaaactggcttcgagcactctggactctgggtgagcgtattggcggggcttctcttgggtgcttgccaggcccacccaatcccagattcgagcccactgctgcagttcggaggacaggtgaggcagcgctatctctacacggatgacgcccagcagactgaggcacatctggaaattagggaggacggcaccgtgggaggagccgcggatcagtcacctgaaagcctgctccagctcaaggccctgaagccgggtgtcatccaaatcctgggcgtgaaaacctcccggttcctgtgtcaacggcctgacggtgcactttacggatctctgcattttgacccggaagcctgctcgttcagagagctgctgcttgaggatggttacaacgtctaccagtcggaagcacatggactcccgttgcacctgcctggcaataagtcgccccatagggaccccgccccgcggggaccggcacgctttctgccacttcctggactcccgccggctctgccggagcccccgggaatcctcgctccgcagcctccggacgttggctcctccgatccgctgtccatggtgggaccctcccaaggtagaagcccaagctatgcctcc

SEQ ID NO: 275766 - DNA, 627 bp, Artificial Sequence
  derived and/or modified sequence
atggactccgacgagacaggctttgaacattccggactgtgggtgtccgtgctggctggacttctgcttggggcttgccaggctcatcccattcccgatagcagccccctgttgcagtttggtgggcaggtgcggcagcgctacctgtacacagacgacgcgcagcagactgaagcccacctggagatcagagaagatgggacagtggggggtgccgccgaccagagccccgagtcccttctacagctcaaagctcttaaacccggtgttattcaaattctgggagtgaaaacatcacgatttttgtgccagcggcccgacggagctctgtacggttcactccattttgacccagaagcgtgctcctttcgcgaactgcttttagaggacggctataatgtctaccagtctgaagcgcatggattgccactgcacctgcccggcaataagtcacctcaccgcgaccccgctccgcgcggccccgctcgctttctaccattgccaggcctgcctcccgcgttgcctgaaccaccaggaattctagctcctcaaccgcctgacgtgggctcaagcgatcccctgagtatggtcggaccgtctcagggcagatccccgtcatacgcatcc

SEQ ID NO: 275767 - DNA, 627 bp, Artificial Sequence
  derived and/or modified sequence
atggacagcgacgagactgggtttgaacatagcggcttgtgggtttcggtcctggcagggctcttgttaggtgcctgtcaggcccatccgatacctgacagctcacccttactgcagttcggcgggcaggtccggcagaggtatctttacacagatgacgcccagcaaacggaggcacatctcgagatcagagaagacggaacagtgggaggtgctgctgatcagtcaccagaaagcctcctacagctgaaggccctgaaaccgggcgtgattcagatcctcggagtgaaaacttcccggttcctttgccaaaggcccgatggagctttgtacggctccctccactttgatcccgaggcttgctccttccgggaattgcttctggaggatggttataatgtctaccagtccgaagcccacggactgcctctccacctgcccggaaacaaaagcccacaccgggacccagccccgaggggtccagctcgatttctacccctgcccggattacctccagctctgccggagccccctggcatcctcgccccccagccacccgatgtcgggtcctctgacccgctgagtatggtaggccccagccaggggcggtctccatcatacgcttca

SEQ ID NO: 275768 - DNA, 627 bp, Artificial Sequence
  derived and/or modified sequence
atggattcggatgaaaccgggtttgagcactctggcctctgggtgtcggtcctggccggtctgcttctgggagcttgtcaggcccaccctattccggactcaagcccacttctgcaatttggaggccaagtgaggcagcggtacctttacaccgatgatgcgcaacaaaccgaggcacatcttgaaataagggaggatggcactgtgggtggggccgcagatcagtcccccgagtcgctccttcaattgaaagcactcaagcctggagtcatccaaatcctcggcgtgaaaacttcgaggtttctttgtcagcgccctgatggggcactctacggctccctgcattttgatccggaagcatgtagcttccgggaactgctcctggaggacgggtacaacgtctatcagagcgaagcccacgggctccccttgcatctgccaggtaataagtcccctcacagggacccagccccaaggggtcctgcgagatttcttccactccctgggcttccccctgcattgcccgaaccaccaggaattctggcaccacagccacccgacgtgggatcgtccgaccccctctcaatggtcggaccctctcagggtagatcgccatcctacgcatcg

SEQ ID NO: 275769 - DNA, 627 bp, Artificial Sequence
  derived and/or modified sequence
atggattccgacgagaccgggttcgaacactccggtttgtgggtgtccgtcctggcgggcctgctgctgggtgcttgccaggcccacccgatcccagattcaagccccctcctacaatttggcgggcaggtcagacagaggtatctctatacagatgatgctcagcaaacggaggcacatctggagatccgggaggacggcacagtaggaggcgcagccgaccagtcaccagaatccttgttgcagctcaaggctttaaagcctggcgtcatccagatcctgggtgtgaagacttctaggttcttgtgccaacggcccgacggcgccctgtatggaagtctgcacttcgatcctgaagcttgtagcttcagggagctgctgctggaggacgggtataatgtctatcaatcggaagctcatggattgccactccacctacctggaaataaatccccccatcgcgaccccgctcccaggggtcctgctcgattcctacctttacctggcctccctccggctttgcctgagccccccggtatcttggcccctcagcctcccgatgttggaagctcagaccctctgtctatggtgggcccctcccaggggcggtcccctagctacgccagc

SEQ ID NO: 275770 - DNA, 627 bp, Artificial Sequence
  derived and/or modified sequence
atggactcagacgagaccggttttgagcatagtgggctgtgggtgagtgtgctggctgggctactgctcggggcgtgtcaggcccatcccatccccgactcctcacccctccttcagttcggagggcaggtgaggcaaagatacttgtatacagacgatgcacaacaaaccgaggcacatctggaaatccgcgaggacggcaccgtagggggcgctgcggaccagagccctgagtcactgctgcaactgaaggcgttgaagcccggcgtcatccagatcctgggggtcaagactagcagattcctgtgtcagcgcccagatggcgcactatacgggagtctgcacttcgacccggaagcctgctcttttcgcgagctactgctggaagatggatataacgtgtatcaatctgaggctcacggcctgccattgcacctgcctgggaataaatctccccatcgtgatcctgcaccccgggggcccgcccgcttccttccactgccaggcctgcctccagcactccccgagccacccgggatcctggccccacaacctcccgatgtcgggtcttctgaccccttgtctatggttgggcccagccagggcaggtctccaagctacgcctca

SEQ ID NO: 275771 - DNA, 627 bp, Artificial Sequence
  derived and/or modified sequence
atggatagtgacgagacagggtttgaacatagtgggctgtgggtaagtgtcctagcagggctcttactaggcgcttgtcaggcgcatcctatacctgatagctctcctcttctccagtttgggggtcaggttcgccaaagatatttatacactgatgacgcgcagcagacagaggctcaccttgaaatcagagaggatggtaccgttggcggcgctgcagatcaaagcccagagtcccttctccagctaaaggctcttaagccaggggttattcagatattaggtgttaagacaagccgtttcctttgccaaaggcccgacggtgctctctatggatctcttcacttcgatcctgaggcttgctcttttagggagttgcttctagaggatggttataatgtctaccagtccgaagcacatggcctcccccttcatctccctggtaacaaaagtcctcatagagaccctgcaccaagaggcccagcaagattcctcccactgcctgggcttcctcctgccttacctgagccacccggaatccttgcgccacaaccgccggatgttggttcgtcagatccgttatcaatggttggaccctcgcaggggcgctccccttcctacgctagt

SEQ ID NO: 275772 - DNA, 627 bp, Artificial Sequence
  derived and/or modified sequence
atggactcagatgagactgggttcgagcactctggactgtgggtcagtgtgctggccgggctgctcctgggcgcctgccaggcacatccaatacccgactcttcacccctgttgcagttcggaggccaggtacgacagcggtacctctatactgacgacgcccagcagaccgaggcccatctggaaatcagggaagatggcaccgtgggcggcgctgccgatcagagccctgagtctcttctccagctcaaggccttgaagccaggagtgatccagatcctcggggttaaaacctcccggttcctgtgtcagcggcccgacggcgcactgtacggatcgctccacttcgaccccgaagcgtgctcttttagggagttactgctcgaggacgggtataacgtgtaccaatccgaagcccatggactcccacttcatttgccaggtaacaaatctcctcacagggatcccgctccccggggacctgcgagattcctacccttgccggggctgccgccagctctgccagagccgccgggtattctcgcaccacagcccccagatgtggggagtagcgaccctctgagcatggtagggccgagccagggcagatccccaagttacgcatcc

SEQ ID NO: 275773 - DNA, 627 bp, Artificial Sequence
  derived and/or modified sequence
atggatagcgacgagacgggctttgaacactcaggcctatgggtttccgtcctggctggcctgctgttaggggcctgccaagcccaccccattcctgactcgagcccgctccttcagttcggagggcaagtcagacagcggtacctgtataccgacgatgcacaacaaactgaggcccaccttgagatccgcgaggatggcacggtcggcggcgctgcggaccagagtcccgagagcctgctgcagttgaaggccctcaagccgggtgtgatccagatccttggcgtgaagacatcgcgcttcttgtgccagcgccccgatggcgctctgtacggttctcttcactttgatccggaggcctgttcgttccgtgaactacttctcgaggatggatacaacgtgtaccagtctgaggcccacggcctccctctacatctgcccggcaacaagagcccgcaccgggatcctgccccccgtggtcctgcgagattccttcccctgcccggccttcctcccgctctccctgaacctcctggaatcctcgctcctcagccacctgatgtgggcagctcggacccgctgtccatggttggaccttcccagggtcgtagcccttcgtacgccagt

SEQ ID NO: 275774 - DNA, 627 bp, Artificial Sequence
  derived and/or modified sequence
atggattccgatgagacaggttttgagcactccgggctgtgggtgtccgtgctggctggactcctgttgggtgcgtgtcaggcacaccccatcccagacagcagccccctgttgcagttcggtgggcaagttcggcagagatatttgtataccgatgatgcgcagcaaactgaagcccacctggaaattagagaggatggtaccgtcggcggtgcagcagatcagtccccagagagcctcctgcagctgaaagcactgaagcccggcgttattcagatcctgggagtgaaaacctctcggttcctctgccagcgccccgacggcgccctctatggctctttgcattttgatcccgaagcatgcagctttcgggagttgctgctcgaggatgggtacaatgtttaccagagtgaggctcatgggctgccccttcaccttccaggtaataagtctcctcatcgggatcccgctcctaggggcccagcccgcttcttgccacttcccggactgcccccggcactgcccgagcctcccggaattctggctccccagccccctgacgtgggaagctctgacccacttagtatggtggggcccagccaggggagaagcccctcttacgcttcc

SEQ ID NO: 275775 - DNA, 627 bp, Artificial Sequence
  derived and/or modified sequence
atggattcggatgaaacgggttttgaacattcgggtttatgggtatcggtactagcgggtctattactaggtgcgtgtcaagcgcatccgataccggattcgtcgccgttattacaatttggtggtcaagtacgtcaacgttatttatatacggatgatgcgcaacaaacggaagcgcatctagaaatacgtgaagatggtacggttggtggtgcggcggatcaatcgccggaatcgttattacaattaaaagcgctaaaaccgggtgtaatacaaatattaggtgtaaaaacgtcgcgatttctatgtcaacgtccggatggtgcgttatatggttcgctacattttgatccggaagcgtgttcgtttcgtgaattactactagaagatggttataatgtatatcaatcggaagcgcatggtctaccgttacatctaccgggtaataaatcgccgcatcgagatccggcgccgcgtggtccggcgcgatttttaccgttaccgggtttaccgccggcgctaccggaaccgccgggtatattagcgccgcaaccgccggatgttggttcgtcggatccgctatcgatggtaggtccgtcgcaaggtcgttcgccgtcgtatgcgtcg

SEQ ID NO: 275776 - DNA, 627 bp, Artificial Sequence
  derived and/or modified sequence
atggatagcgatgaaacaggcttcgagcacagcgggctctgggtctctgtgctggctgggcttctgcttggagcttgccaagctcacccgattcccgattctagccctctcctgcagtttggaggtcaagtgaggcagagatatctgtacactgacgatgcccagcagacagaggcacacttggagataagggaggatggcaccgtcggaggcgctgcagatcagtccccagagagcttgctgcagctgaaagccctgaagcccggcgtgattcagatcctgggcgtcaaaactagtcgatttctctgccagagacctgacggggccctctacgggagcctccacttcgatcccgaagcctgctcattccgcgagctgttgctggaggacggatacaatgtgtaccagagcgaggcccacggactccccctgcacctcccagggaataaatcaccccatcgagatcctgcaccaagaggccctgccagattccttccacttccgggactgcctccagccctgcccgagccccctggaatcctcgccccccagccccccgacgttggctcttctgacccattgtccatggttggacccagccagggcagatctccatcatacgccagc

SEQ ID NO: 275777 - DNA, 627 bp, Artificial Sequence
  derived and/or modified sequence
atggactctgatgaaaccgggttcgagcattcaggactttgggtatctgtcctggccggactcctgcttggagcttgccaggcgcaccctatccccgactcctcccccttattgcagttcgggggacaggtccgccagagatacctgtacaccgacgacgcacagcaaaccgaggctcacctggagatcagagaagatggaacggtcggaggcgccgctgatcaaagccccgagtcactgctccagctgaaagccctcaaaccaggcgtgatacaaatactgggggtcaaaacgagtcgcttcttgtgccaacgaccagacggagccttgtacggaagcctccacttcgaccctgaggcatgcagcttccgggagctgctcctggaagacggctacaacgtgtaccaaagcgaagcccacggcctcccattacatttaccaggaaacaaatcacctcaccgtgacccggccccaaggggacctgcccgcttcctgccgctcccagggttgcccccagcccttcccgaaccgccaggaatactggccccacaacctcctgacgtgggaagttccgaccctctctctatggtcggcccatcacaaggaaggagtccatcttacgccagc

SEQ ID NO: 275778 - DNA, 627 bp, Artificial Sequence
  derived and/or modified sequence
atggatagcgatgaaactggctttgaacattcgggattgtgggtgtcagtgctggccggactgctcctcggtgcatgtcaggcacatcctataccagactcatcccccctgctccagtttggtgggcaggtgcgtcaacgatacctgtataccgatgatgcgcaacaaactgaagctcatctggagattagagaagatggaactgttggtggtgcggctgaccaatcgcccgagagtctgctgcagcttaaggcacttaagcccggcgtaatccagattcttggggtcaagaccagtcgctttctctgtcaacggcccgacggtgcactgtacggttctctccacttcgatcccgaagcctgctcctttcgtgaactgcttcttgaggatggatacaatgtgtaccaatcggaggcacacggacttcccttgcatctgcctggaaacaaatcgccgcatagggatccagcgccacggggccctgccaggttcctcccgctccctggacttcctccagcactccctgaacctccaggtatcctggcacctcaaccgccagacgtcggatccagcgatccactctctatggtcggaccgtcacagggccgctcaccgtcgtacgcaagc

SEQ ID NO: 275779 - DNA, 627 bp, Artificial Sequence
  derived and/or modified sequence
atggacagcgacgagacaggatttgaacattccggcttgtgggtgagcgtgttggccgggctgctgcttggcgcatgccaggcgcatcccataccagattcttctcctctactgcagttcggtggccaggtgagacagagatatctttataccgacgacgcacagcagacggaggcccacctcgagatcagagaggacgggactgtggggggtgctgctgaccaatcgccagaatccttgctgcagctgaaggctctgaagcctggtgtcattcagattctcggtgtgaagacatctaggttcctgtgtcagcggccggacggggccctctacggaagtctgcattttgaccccgaggcctgtagctttcgggaactcctgcttgaagatggttataatgtatatcagtctgaggcccatgggttgccgttacacctgccaggtaacaaatcgcctcaccgggaccctgcccctaggggcccagcaagattcctacccctgccaggactgcctccagctctgccagagcctcccggaatcctagcaccccagcccccagatgtgggctccagcgacccactcagcatggtggggccctcccagggaagatctccaagctatgccagt

SEQ ID NO: 275780 - DNA, 627 bp, Artificial Sequence
  derived and/or modified sequence
atggattcggacgagactggatttgaacacagtggactgtgggtgtccgtgctggcgggtttgctgcttggagcgtgtcaagcgcatccgatcccggactcatcgcctctgctgcagttcgggggtcaagtccggcaaagatacctgtacaccgacgacgcgcagcagacggaggcccatctggagatccgcgaagatggcactgtgggaggggcagctgaccaatcgccagagtcgctgctgcagctgaaagcgcttaagccaggcgtgatccaaatcctgggcgtaaagacttcgagattcctgtgccagcggccagacggcgccttgtacggatccctccacttcgacccggaagcgtgcagctttcgcgaactgctgctggaggatggctacaacgtgtaccagtcggaagcccatggactcccattgcacctgcctggaaataagagcccccatagggacccggcacctcgcggaccggctaggttcctgcctcttcctggactgccaccggcactcccggaaccgcctggaatcctcgccccacaacccccggacgtgggaagctccgatccgttgtcgatggtgggaccttcgcaggggcgctctccctcgtatgcgtca

SEQ ID NO: 275781 - DNA, 627 bp, Artificial Sequence
  derived and/or modified sequence
atggattcagacgaaactggattcgaacactcagggctctgggtgtcggtgctcgctggactgctcctcggcgcatgtcaggcacatcctattcctgatagctccccccttttgcagtttggcgggcaggtgcgccaacggtacctgtataccgacgatgcccagcagaccgaagcccatctggaaattcgagaggacgggactgtgggtggtgccgcagatcaatcacccgaatccctgcttcaactcaaggcacttaaaccaggcgttatccagatcctcggtgtaaagacgtcaagatttctttgccaaagacctgatggagcgctttacggtagcttgcattttgatccagaggcttgttctttcagggaactgcttctggaggacgggtacaatgtctaccagtctgaggcacacggacttcctctgcacctgccgggaaacaagtcgccacatcgggatccagcacctcgcggtccggcaaggtttctgccacttcctggcttgcctccagctctgccggagcctcccggtatactggcaccgcaaccccctgatgtgggcagttcggacccactcagcatggttggaccatctcaaggacgatccccttcgtacgcctct

SEQ ID NO: 275782 - DNA, 627 bp, Artificial Sequence
  derived and/or modified sequence
atggattccgatgaaacgggcttcgaacattccggactctgggtgtccgtgcttgcaggacttctcctcggcgcatgccaagcacatccgattcctgactcatccccccttttgcagtttggagggcaggttagacagcggtacctctacaccgacgacgcacaacaaaccgaagcacacctggagattagagaagatggtaccgtcggcggagccgcagatcaatcgcctgaaagcctgctgcagctgaaagcgctgaagccaggcgtgatacagatccttggtgtgaaaacttcgcggttcctctgtcagcgtccagatggtgcgctgtacggatccctccattttgatcctgaggcgtgcagcttccgggaacttctgctcgaagatggctataatgtgtaccagtcggaagctcatgggcttccgcttcaccttcctgggaacaaatcacctcatcgagatcccgctcccagaggaccagcaaggttcctcccgcttcctggacttccgccagctttgccagagcctccaggaattcttgcaccccagccaccagatgtgggttcgagcgatcctctgtccatggtgggcccctcccagggcaggtccccgtcatacgcatcg

SEQ ID NO: 275783 - DNA, 627 bp, Artificial Sequence
  derived and/or modified sequence
atggattcagatgaaacaggttttgaacattctggtctttgggtttcagttttagcaggtttattgcttggtgcttgtcaagcacacccaattccagattcaagtccactattacaatttggaggtcaagtaagacaaagatatttatacacagatgatgcacaacaaacagaagctcatttggaaattagagaagacgggactgtaggtggagctgcagatcaatcaccagaaagtttacttcaattaaaagcacttaagccaggagtaattcaaattcttggagttaaaacaagtcgttttctttgtcaaagaccagatggtgcattatatggaagtttacatttcgacccagaagcatgtagtttcagggagttacttcttgaagatggttataatgtatatcaaagtgaggcacatggattaccattacatttacctggaaataagtctccacatagagatcctgcaccaagaggacctgcaaggtttttaccattaccaggtcttccaccagcattacctgaaccacctgggattcttgctccacaaccacctgatgttggaagttctgatcctttaagcatggtgggaccaagtcaaggaagatctccaagttatgcttca

SEQ ID NO: 275784 - DNA, 627 bp, Artificial Sequence
  derived and/or modified sequence
atggacagcgacgagactggctttgaacatagtggactgtgggtctccgtccttgcggggctcctacttggagcctgccaagcccacccaatacccgacagctccccactcctccagtttggcggccaggtcaggcaacgatacctttataccgacgacgcccagcagacggaagctcaccttgagattcgggaagacggcacagtggggggcgccgccgaccagtcacctgaaagcctgctccagctcaaggcactgaagccgggcgttatccaaatactcggggtgaagacctcaaggtttttgtgccagcgccccgacggcgccctgtacggttcactgcacttcgacccggaagcctgcagtttccgggaactgttgctggaagacgggtataacgtttatcagtcagaggcccacggcctgccgctccacctgccaggcaacaagagcccgcaccgggacccagccccaagaggacccgcgaggttcctgcctctgcctggattgcccccagccctccctgaaccccccggaatattggccccacagccccccgatgttggcagcagcgaccctctcagcatggtagggccctcccaaggcagatcaccttcctacgcctca

SEQ ID NO: 275785 - DNA, 627 bp, Artificial Sequence
  derived and/or modified sequence
atggattcggatgaaactggattcgaacatagcgggctctgggtgtccgtgcttgcaggactgcttctgggagcgtgtcaagcccaccctattcccgactcatccccactccttcagttcggaggacaagtgagacaaaggtacttgtacactgatgacgcacagcaaactgaagcacatctcgaaatccgtgaggacggaactgtcggcggagcggcagatcagagccctgagtcgctgctgcagcttaaggcactgaagcctggagtgatacaaatacttggtgtgaaaacgtcgagatttctgtgccaacgccctgatggtgcactgtacggcagcctccactttgaccccgaagcatgttcgttccgagaacttctgctggaggatgggtacaatgtgtaccaatcagaagcacatggactgcctctgcatctgccaggcaacaagagcccccatagagatccagctccaaggggtcctgcgcgatttttgcctttgcccggactgccacctgcacttccagaacctccagggattctggcaccccaacctccagatgtgggatcttcggatcctctctccatggtcggaccatcccaggggcggagcccttcatacgcctcg

SEQ ID NO: 275786 - DNA, 627 bp, Artificial Sequence
  derived and/or modified sequence
atggactcggatgagacaggcttcgagcatagtggtctgtgggtgtcggtcttggccggtctgctgctaggagcttgccaagcacacccaatccccgatagtagccccctgttacagtttggaggccaggtgcgccagcgatacttgtacactgacgacgctcagcagacagaagcccacctcgagatcagggaggacggtacggttggaggggcggcagaccaatcacctgagagcctcctgcagctgaaggcgctgaaaccaggtgtaattcagatccttggcgtgaaaacatcaagatttctgtgccagagaccagacggcgccctgtatggctctctccactttgacccggaggcttgttcctttcgcgaactgttgctggaagatgggtacaacgtataccagtcggaggctcacggcttacccttgcacctcccaggcaataaatcaccccatagagaccccgcgcccaggggcccagctaggttcctgccactccccgggctgcctcctgccctaccagagccacctggtattctggccccccagcctcccgacgtgggcagctctgaccccctgagtatggtggggcctagtcaggggcgaagtcctagttatgccagc

SEQ ID NO: 275787 - DNA, 627 bp, Artificial Sequence
  derived and/or modified sequence
atggacagtgatgaaacagggttcgagcactccggactttgggttagcgtactcgccgggctccttctcggggcttgtcaagcccatcctatacctgattcaagccctctgctgcagtttggagggcaggttcgccagcggtatctttataccgacgatgcccagcaaacggaggcccacctcgagattagagaagatgggactgtgggaggggccgccgatcagagccctgagagtttgctccagctgaaagcattgaagccaggtgtgatccagatacttggagttaagacctcccggtttctctgccagcggcctgatggtgccctgtatggcagcctgcatttcgaccccgaggcttgctcctttcgcgagctgctccttgaggatggatacaacgtgtatcagtctgaagcccacggactccctctgcacctgcccgggaataaatcacctcaccgagatcccgctccgcgaggccccgcaaggtttctgccactgcctggtttgcctcccgctctgcctgagccacccggcatactggcgcctcagccccctgatgtgggaagtagcgatcccttgtctatggttggccctagccagggccggagcccaagctatgcctct

SEQ ID NO: 275788 - DNA, 627 bp, Artificial Sequence
  derived and/or modified sequence
atggactccgatgaaacaggttttgaacatagcggtctgtgggtgtccgttttggcaggcttactgctgggcgcgtgtcaagcacatcccattccggattcgtccccgctgttgcagttcggtggtcaggtccgtcagcgatacttgtacaccgatgatgctcagcagaccgaagcacatctcgagatacgggaggatggaaccgtaggtggagcggctgatcagtctccggagtctttgctccagctcaaagcccttaagcccggagtaatccagatccttggagtcaagaccagtcggtttctatgtcaacgtccagatggagccttgtacgggtcgctacacttcgaccccgaggcctgctctttccgggaactacttctcgaagacggctataatgtctatcaatccgaggcacatggcctgcctttgcacctccccggtaacaaaagtcctcaccgtgatccagccccgcgcggccccgcacggttcctgccattgcctggtttgccacctgctctccccgaacctccgggcatcttggctccgcagccacctgacgttggaagctcggatcccttatcgatggtcgggccatcgcaaggtcgatctccctcatatgcatcg

SEQ ID NO: 275789 - DNA, 627 bp, Artificial Sequence
  derived and/or modified sequence
atggattcagatgaaaccggttttgaacactccggactctgggtatctgtcctcgcaggactcctcctgggggcctgccaagcacatcctattccagattcgtcccctcttctgcaattcggtggacaagtgagacagcgatacctgtacactgatgacgcgcaacaaaccgaagctcacctggaaataagggaagatggaactgtggggggagctgcagatcagtcacctgagagccttcttcagctgaaagcacttaaaccaggagtgattcagatactcggagtgaaaacttcccgcttcctctgtcagaggccagatggtgcgctttacggtagcctgcattttgatccagaggcttgttccttccgcgagctgctgctggaagatggttataacgtctaccagtccgaggcacatggacttccactccacctgcccggcaataagtcgccacatcgagatcctgcgcctcgcggaccagccagattcttgcctctgcccggtctgcccccagcacttcccgaaccgccaggtatccttgcacctcaaccacctgatgtgggctcgagcgatccactgtccatggtcggtcctagccagggccggtcgccaagctacgcgtcc

SEQ ID NO: 275790 - DNA, 627 bp, Artificial Sequence
  derived and/or modified sequence
atggattcggatgaaactggattcgagcatagcgggctctgggtgtccgtgcttgctggactcctccttggtgcctgtcaggcgcatccaatacccgactcgtcaccgctcctccaatttggaggacaagtgcgccagcgatacttgtataccgatgacgcccagcaaaccgaagctcaccttgaaattcgagaggacggcactgtgggaggtgcagcagatcagtccccagaatcgctgcttcaactgaaagcacttaagccaggagtgatacaaattctcggggtcaaaactagccgttttctgtgtcaaagaccagacggtgcactttatggtagcttgcattttgacccagaagcgtgctcatttagggaactgctcttggaggacggttacaatgtgtaccagtccgaggcacatggacttcctcttcacctgccgggtaacaagtcgcctcacagagatcctgccccaaggggaccagcacgctttctcccgcttccggggttgcctcccgctcttcctgagcctccaggaattctggcaccacagcccccagatgtcggctcgtccgatccattgtcgatggtgggaccttcgcaaggtagaagcccctcgtacgcatcg

SEQ ID NO: 275791 - DNA, 627 bp, Artificial Sequence
  derived and/or modified sequence
atggactccgacgaaaccggcttcgagcacagcgggctgtgggtgtcggttctcgcgggcttgctcctgggtgcctgtcaagcccacccgatcccggactccagccccctcttgcagtttggcggacaggtgagacaaagatacctgtacactgatgatgcccagcagactgaagcgcatctggagatccgcgaggacggcaccgtcggtggggccgctgaccagagcccggagtcgttgctccagttgaaggctctcaagcccggagtgatccagattctgggagttaagacgtccagattcctgtgccaacgcccggacggagcgctgtacggctcactgcacttcgatcccgaagcctgctcgtttcgggagctgcttctggaagatggctacaacgtgtaccaatcggaggcccacggcctccctctgcacctgcccgggaataagtcgccacaccgggatcctgcaccacggggacctgctcgatttttgccactgccaggactgccgccggccctgcctgaaccgccgggcatcctcgccccacagccgcctgacgtgggatccagcgacccattgtccatggtgggaccatcacaggggcggtcgccgagttatgcctcc

SEQ ID NO: 275792 - DNA, 627 bp, Artificial Sequence
  derived and/or modified sequence
atggactcagatgagacgggcttcgagcactcgggattgtgggtcagtgtcctggcaggactgctgcttggagcgtgtcaagcccacccaatcccggactcaagtcccctgctgcaattcggaggtcaggtgcggcagcgctacctgtacaccgacgacgcgcagcaaactgaagctcacctggaaatccgagaagatggaactgtgggaggggccgccgaccaatcgccagagtcgcttctgcagttgaaggccctgaagccaggcgtcatccagatccttggggtgaaaacttctcgctttctctgccaacgcccagatggcgccctttacggctcgctccatttcgaccccgaggcctgctcattccgggaactgttgcttgaagatgggtacaatgtgtatcagtcggaggctcatggactcccgctgcatctgcctggaaacaagagcccccatagggacccagcaccgcgtgggcctgcacgctttctgcctctcccgggacttccgccagcgctcccagaacccccaggcatcctggctccacagccgcctgatgtgggctccagcgacccgctgtccatggtgggaccatcacagggacggagcccatcatacgccagc

SEQ ID NO: 275793 - DNA, 627 bp, Artificial Sequence
  derived and/or modified sequence
atggactcagatgaaaccggattcgaacatagtgggctgtgggtgagcgtattagccgggctgctactaggcgcgtgccaggcccaccctattcccgacagctccccgttgctacagtttgggggccaggtacggcaacgttatttgtacacggatgatgcccagcagactgaggcccacttggagatccgtgaggatggaactgtcggcggagccgccgaccagtctcccgagtcactgctgcagctgaaggccctgaagcccggcgtgattcaaattttgggagtcaagacctcaaggtttctctgtcagcgacctgacggagccctgtatgggtccttgcattttgatcccgaggcctgctctttccgcgagctgctcctcgaggacggttacaatgtgtatcaatctgaggctcatggcctacctctgcatctcccaggcaacaagtctccccatagagacccagctcctaggggaccagctcggtttcttcctctcccaggtctgccccctgccctgcctgagccacctgggattttggccccgcaacctcctgacgtcggctctagtgacccactcagcatggtaggcccgtctcagggaaggtcaccgtcatatgcctcc

SEQ ID NO: 275794 - DNA, 627 bp, Artificial Sequence
  derived and/or modified sequence
atggacagcgacgaaactggtttcgaacactccgggttgtgggtgtcagtgctcgcgggactgctccttggagcgtgccaggctcatccgattccagacagctcacccctgcttcagttcggcggacaagtgcggcaaagatacctgtacacggacgatgcccagcaaacggaggcgcacctcgagatccgggaagatggcaccgtgggaggagcggccgatcagtccccagagtccctcctgcagcttaaagcgcttaagccgggagtgatccaaattctcggggtcaaaacttcccggttcctctgtcagaggcccgacggagctctctacggaagcctgcacttcgacccggaggcgtgcagctttagagagctcctgctggaagatggatacaacgtctatcagtcagaagcacatggcctgccgctgcacctgccagggaacaagagcccccatcgcgacccagcgccacggggccctgcgcgctttctgccgctgccgggcctcccaccggcccttccagaaccgccgggcatccttgccccacaacctccagacgtgggatcatccgacccactctcgatggttgggccctcccaggggaggtccccatcgtacgcttca

SEQ ID NO: 275795 - DNA, 627 bp, Artificial Sequence
  derived and/or modified sequence
atggactctgacgaaacagggttcgagcactcgggcctgtgggtttctgtgctggctggtctactcttgggagcatgtcaagcacatcccattcctgactcctcccctctgcttcagtttggtgggcaggtacggcagcgatatctgtacactgacgacgcccagcagacggaggcccacctagagattcgagaagacgggaccgtgggcggagccgctgatcagtcccccgagtccctattgcagttgaaagctctaaagccaggcgtgattcagattttgggagtcaagactagtaggttcttatgtcagcgtccagacggggctctctacggtagcctgcacttcgacccagaagcctgcagctttcgtgaactgttgctcgaggacgggtacaacgtgtaccagtcagaggcacatggcctccctttacacttgcccggtaacaaatcaccccatcgggatccagccccaagagggcctgctcgattcttgcccctgccggggctgccgcccgcactgcccgagcctcctggcatactcgccccccaacccccagacgtgggctcatccgaccccctgagtatggtagggccttcccaggggcggtcccctagctatgctagc

SEQ ID NO: 275796 - DNA, 627 bp, Artificial Sequence
  derived and/or modified sequence
atggatagtgatgaaacaggattcgaacactctggactgtgggtatccgtacttgcgggactgctgctgggagcgtgccaggcacaccccatacccgatagtagtccactccttcagttcggggggcaggtacggcagaggtacctgtacacagatgatgcccagcaaacagaagcacatctcgagatacgggaagatgggacagtggggggagcagcggatcagtctcccgagtcgctccttcaattgaaagccctcaagcctggggtaatacagatactaggggtgaaaacttctaggtttctctgccagagaccagatggggctctctatggatccctccactttgatcccgaagcctgttctttccgggaactcttgcttgaagatgggtacaacgtgtatcaatcagaagctcatgggctcccccttcatttgcccgggaacaaatccccgcaccgggatcccgctccccgaggacctgccagatttctccccttgccagggttacctcctgcactccccgaaccaccagggatcctcgcccctcagccgcctgacgttggatcttctgaccccctatcaatggtgggaccttctcaggggagatcgccttcttatgcatcc

SEQ ID NO: 275797 - DNA, 627 bp, Artificial Sequence
  derived and/or modified sequence
atggactcggacgaaactggatttgagcactcgggactgtgggtgtcggtcctcgccggtctgcttcttggagcttgtcaagcacacccaattcctgactccagccccctgcttcagtttgggggtcaggtcagacaacggtacttgtacacggatgatgctcaacaaactgaagcccatcttgagatccgggaagatggaaccgtgggaggcgccgcagaccagtcgcctgaatccctcctgcaactcaaagctcttaagccaggcgtcattcaaatacttggagtgaaaacctcgagattcctgtgtcaacgccctgatggcgcgttgtacggaagcctccattttgaccccgaagcctgttcctttagggagcttctcctcgaggatgggtacaatgtgtaccagtctgaggctcatggtttgccactgcatctcccggggaacaagtctccacatagagatccagcaccacgtggtccggcgagatttcttcccctgcctggattgcctccggccctccctgaaccacctggcattcttgcacctcagccccccgatgtggggagctccgatcctttgtcaatggtgggtccgagccaggggcgttccccatcatatgcaagc

SEQ ID NO: 275798 - DNA, 627 bp, Artificial Sequence
  derived and/or modified sequence
atggactccgacgaaaccggattcgaacactcggggctttgggtgtccgtgctggccggactgctgttgggtgcgtgccaagcccacccgatccctgacagctcaccgctgttgcagtttggaggtcaggtcagacagcggtacctgtacactgacgacgctcaacagactgaggcacacctggagatccgggaagatggcaccgtcggcggcgcagccgatcagtcgccggaaagcctgctccagctgaaggcattgaaaccaggtgtgatccagattttgggcgttaagactagccgctttctctgtcagcgcccagacggtgccctctacggatcgctgcactttgatccagaagcatgttcgttccgcgagctgctgctggaagatggatataacgtgtaccaatccgaggcccatggactgcctctgcatttgcctggaaacaagagcccgcatagggacccggcgccaagaggaccggcgcgattcctgccactgccgggcttgccgccggctctgccggaaccgccgggcatcctggcgccgcagccgccggacgtcggatcgagcgacccattgtccatggtgggaccaagccaaggaagatcgccgagctacgcctcc

SEQ ID NO: 275799 - DNA, 627 bp, Artificial Sequence
  derived and/or modified sequence
atggactcggatgagactggatttgaacactccggcctgtgggtgtctgtgctcgcgggcttattgctcggcgcctgtcaggctcatcccataccagacagttcgccgctgctgcagtttggaggtcaggtgaggcaacgctacctctacacagacgacgcccaacagactgaggcacacctagagattagagaggatggaaccgttggcggcgccgcagaccagtcaccagagtctctgttgcagctgaaggcattgaaacccggggtgatccagattctcggcgtgaaaacctctcggtttctctgccagcgaccggacggggcgttgtatggaagcctccacttcgatcctgaggcatgttcattccgcgagctcctgctggaggatggatacaatgtgtatcagagcgaggctcatggactgccgttgcatcttcccggcaataaatcaccacatagggatcctgctcctcgcggaccggctaggttcctgcccctgcctggccttcctcccgccctgcccgaaccccctggtatattagcacctcagccacccgatgtggggtcgtccgaccctctgagtatggtcgggcccagccagggaagaagccccagctacgccagc

SEQ ID NO: 275800 - DNA, 627 bp, Artificial Sequence
  derived and/or modified sequence
atggattcggacgaaacaggctttgagcatagcggcttgtgggtcagcgtactagccgggctgctgctaggcgcttgtcaggcgcacccgattccggattccagtcccctgttgcaattcggagggcaggtgcgtcaaaggtacctctatacggatgacgcacagcagacagaggcacacctggagattcgtgaagatggaacggttggcggtgcggcagatcagtcccccgagagccttctccagctgaaagcactgaagcctggagtcatccagatactcggggtcaagacctcccgctttctgtgccagcggcccgatggagctctctacggatctctgcacttcgatccagaggcctgctccttccgggagctccttctcgaagatggatataatgtttatcagtcggaggcccacggtttgccgctgcatctacctggcaacaagtcaccacacagagaccctgcccctcgagggccggcaagatttctccctcttcccggcctgcctcccgcactgccggaacctcccggaattttggccccccagcctccagacgtggggagcagtgaccctctcagtatggttggtcctagtcagggtagaagccctagctacgcatcc

SEQ ID NO: 275801 - DNA, 627 bp, Artificial Sequence
  derived and/or modified sequence
atggacagtgatgagaccgggtttgagcactccgggctgtgggtctcggtgctggcagggctcctcttaggggcatgtcaggcccatccaatccccgacagcagcccactgttgcagtttgggggtcaggttagacagcggtatctgtacacagacgacgctcagcaaaccgaggcgcacctggagattcgcgaggatgggaccgtcgggggcgcagctgaccagtcccctgagtctctgttgcaactaaaagctctaaagcctggcgtgattcagattttgggagtgaagacctcccggttcttatgccagcgaccagatggggcgctgtacggaagtctgcatttcgatccggaagcctgctcattccgggaactgctcttagaggatggctacaatgtgtatcaatcagaggcgcatgggttaccactgcaccttccaggaaacaaaagcccgcacagggatcccgcgccccggggaccagcaaggtttctgccattgcctggcctgccgccggctctgcctgagccacctggaatcctggccccccagccacctgatgttggatcaagcgatcccctctcaatggtgggcccgtctcagggcagatctccatcctacgccagt

SEQ ID NO: 275802 - DNA, 627 bp, Artificial Sequence
  derived and/or modified sequence
atggatagcgatgaaaccgggttcgagcactcaggtttatgggtatcagtactggccggactgctgctcggtgcctgtcaggcccatcctattcccgatagttcccccctgctgcagttcggtggtcaggtccgacagaggtacctgtatacagacgatgcccagcagacggaggcccacctcgagattcgggaagacgggactgtgggcggcgcagcagaccagagccctgaaagcctgctgcagctcaaagcgttgaagcccggtgtcatacagatccttggcgttaagaccagtaggtttctgtgtcagcgacccgatggtgctctttacggcagtttgcattttgacccggaggcgtgttcttttcgtgagctgcttctggaagatggctacaacgtgtatcagtccgaagcccatggcctgccactgcatttgccgggtaacaagtctccacatagagacccagccccccgaggtcctgcacggttcttgccactccccggcctcccccccgctctgccagagccccccgggatcttggctccacagccccccgatgtcggtagctcggatcccttgtccatggtggggccctcccagggcagaagcccttcctacgcgtct

SEQ ID NO: 275803 - DNA, 627 bp, Artificial Sequence
  derived and/or modified sequence
atggatagcgacgaaactggattcgaacactcggggctgtgggtgagcgtgttggcggggctcctcttgggtgcatgtcaggctcacccaatcccggattcatcgccgcttctccaattcggaggccaggtccgccaaagatatctgtacaccgacgacgcgcagcaaaccgaggcgcacctcgaaatccgtgaagatggaactgtgggcggagctgcggaccaaagcccagaatcgttgttgcagcttaaggcacttaaaccgggagtgatccagatactgggcgttaagacgagtcgcttcctgtgccaaaggccggatggtgctctgtacggaagtctgcattttgacccagaggcatgcagctttcgcgagcttctgctggaggatgggtacaacgtgtaccagtcagaggcccacgggttgccgctgcacctccctgggaacaagtccccgcatcgcgacccagccccccggggaccagctcggttccttcccctgccaggactgccacctgccctccctgaaccacccggaattcttgccccgcagccgcccgacgtcggaagctccgatccactcagcatggtcggtccctcacaggggcggtcgccttcatacgcttcc

SEQ ID NO: 275804 - DNA, 627 bp, Artificial Sequence
  derived and/or modified sequence
atggacagcgatgagactggattcgaacactcgggactgtgggtgagcgtcctggctggcctgctgctgggagcctgtcaggcccacccgatcccagattccagtcccttgctgcagttcggtggtcaggtccggcagcggtacctttacaccgatgacgcccaacagaccgaggcacatctcgagatccgagaggacggaaccgtgggcggggccgcggaccagagcccagagtccctgcttcagctcaaagcactgaaaccaggcgtcatccaaattctgggagtcaagacctcgaggtttctctgccaaagacccgacggagccctctacggatcgttgcactttgacccggaagcgtgctcgttccgcgaactgctcctggaagatggttacaacgtgtatcagtccgaagcacacggactgcccttgcacctgccgggcaataagtcaccccaccgggacccggccccacggggaccggctcgcttcctgccgttgccgggactgcccccagctctgccagaaccgcctggaatcctggcaccacaacctccggatgtggggtccagcgacccgctgtccatggtgggcccgagccaaggaagatcgccatcgtatgctagc

SEQ ID NO: 275805 - DNA, 627 bp, Artificial Sequence
  derived and/or modified sequence
atggactctgacgagaccgggtttgagcattctgggctgtgggtctctgtcctagctggcttgctgttaggggcttgccaggcccaccctattcccgattcaagtccgttgttgcagtttggggggcaggtgagacagaggtacttgtacacggacgatgctcaacagaccgaggcacacctggaaatacgcgaggatgggactgtaggtggagccgctgaccagtcccctgaaagtctcttgcagctgaaggcactgaaacccggcgtcattcagatccttggagtaaagaccagtcgcttcctttgccaaaggcctgatggagcgctgtacggaagcctgcacttcgaccccgaggcatgtagcttccgcgaactcctgttggaggacgggtataatgtttaccagagcgaggcccatggcctcccactccacctgcctggtaataaaagtccccaccgggatcccgcgcctagaggtcccgccagattccttccgctgcctggactgcctcctgcgctgcccgaacctccgggcattctggcaccacaaccccctgatgtggggtcatccgacccgctgagtatggtcggcccctcgcaagggcgctcccctagctacgcgagt

SEQ ID NO: 275806 - DNA, 627 bp, Artificial Sequence
  derived and/or modified sequence
atggactcggacgaaaccggatttgagcacagcggactctgggtgtcagtgttggctggactgctgctgggagcatgccaagctcacccaattccggattccagccccctcctccagttcggaggacaggtgcgccaacggtacctctacaccgacgatgcccagcagacggaggcccacctcgagattcgcgaagatggaactgtggggggagctgctgatcagtcgccggagtccttgttgcagctcaaggcgctgaagcctggtgtgatccaaattctgggcgtcaagacctcacggtttctgtgccaaagacctgatggagcgctgtacggttcccttcatttcgacccagaggcctgttcgttcagggagctgttgctggaggacgggtataatgtgtatcaaagcgaggcccacgggctcccactgcacctgcctggaaacaaatccccacacagggatccggccccgcggggtccggcgcgctttctgccgctgccggggctcccgcctgccctcccggagcctccgggcatcctcgcgccgcaaccgccggacgtcggctcatccgacccgctcagcatggtgggaccgtcacaaggccggagcccatcatacgcctcg

SEQ ID NO: 275807 - DNA, 627 bp, Artificial Sequence
  derived and/or modified sequence
atggactccgacgaaaccggattcgaacacagcggactgtgggtgtctgtgctggccggccttcttctcggtgcttgtcaagctcacccgattccagattcatcaccgcttctgcagtttgggggccaggtccgccaaaggtacctgtatacggacgacgcccagcagactgaggcacacctcgaaatcagagaggatggaaccgtgggtggcgctgcggaccagtcaccggaatccctgttgcaactgaaggctctcaagccgggagttatccagatccttggtgtgaaaactagccgcttcctgtgccaacggccggacggggcgctttacggatcactccatttcgatcccgaggcgtgcagctttcgagaacttctcctggaggatgggtacaacgtgtaccagagcgaggcccatggccttccattgcacctccccggtaataagagcccgcatcgggatccagcaccccgcgggccggcacggttcctgcctctcccggggctgccacctgcgcttccagaaccgccagggattctcgcgcctcagccccctgacgtcggaagttccgaccctttgtcaatggtgggcccgtcgcaaggaagaagcccatcgtacgcaagt

SEQ ID NO: 275808 - DNA, 627 bp, Artificial Sequence
  derived and/or modified sequence
atggactctgatgagaccggattcgagcactccgggctgtgggttagcgttcttgcaggcctgttgctgggtgcatgtcaggcgcaccctatcccggactcttctccattgctgcagtttggaggccaggtgagacagcgatacctttacacggacgatgcacaacaaactgaagcgcacctggagattcgcgaagatggaaccgtaggtggagcagcggatcagtctccggagtctctcttgcagctgaaggctctgaagccaggtgtgatccaaatccttggtgtcaaaacctcacgcttcctgtgtcagcgaccggatggtgcgctctacggtagtcttcactttgatcctgaggcctgcagctttcgcgagctgttgctggaggacggctataatgtctaccaatccgaggctcatggactgccgctccacctgccgggcaacaaatctccacacagagacccggcgcctcgcggcccggcgcgtttcctgccgctgccaggcctgccgccagccctgcctgaacctccaggcattctggcgccccagccgcctgatgtgggcagctcagacccacttagcatggtaggtccatctcagggccgtagccctagctacgctagt

SEQ ID NO: 275809 - DNA, 627 bp, Artificial Sequence
  derived and/or modified sequence
atggattcagacgaaaccggcttcgaacatagcggactgtgggtgtcagtgcttgccgggcttctgctgggggcgtgccaagcacatcctattcccgactcatcccccttgttgcagttcggaggccaggtccggcagcggtacctttacactgacgatgcacaacaaaccgaagctcatttggaaataagagaggacggaactgtgggtggtgccgcagatcaatcccctgagtcccttctgcaactcaaggcccttaagccgggtgtgatccaaatcttgggagtcaaaacgtcgcgcttcctttgtcagcgtcccgatggtgccttgtacggcagcctccattttgatccagaagcatgcagctttcgtgagcttcttctcgaagatggttacaatgtgtaccagtctgaagcacacgggttgcctctccatctgccaggtaataagtccccgcacagagatcctgcgcctaggggaccagcccgatttcttccactgccaggactgccccctgcgcttcctgagcctccgggaatccttgcaccgcagcctccggatgtgggatcgagcgaccccctctcaatggttggaccctcccaaggccggagcccatcctatgcatcg

SEQ ID NO: 275810 - DNA, 627 bp, Artificial Sequence
  derived and/or modified sequence
atggacagtgacgagacaggtttcgaacattctgggttatgggtgagtgtgctggcgggcctccttctgggagcttgtcaggctcatccaattcccgactcaagtcccctactgcaattcggcgggcaggttagacaacgctacctatacactgacgatgcccagcagaccgaggctcacttagaaattagggaagacggaactgtagggggggccgcggaccagagcccggagtctttattgcaactcaaagctcttaaaccaggggtgattcagattctgggcgttaagacctcccggttcctgtgtcaacgcccggatggagccctctacggatccctgcacttcgatccggaggcgtgtagttttcgtgagctactcctcgaggacgggtacaatgtgtaccagtccgaggcccacggactgcctctccatttgcctggcaataaaagcccccaccgggatccagctccacgcggtcctgctagatttctccccttgccaggcctgccacccgccctgcccgaaccccccggaatcctcgctccccagccccccgatgtaggcagctcagatccactgtctatggtggggcctagtcaaggaaggagtccaagctacgctagc

SEQ ID NO: 275811 - DNA, 627 bp, Artificial Sequence
  derived and/or modified sequence
atggactcagacgagacgggattcgaacatagtggcctctgggtgtcagtcctggccggcctgttgctgggagcatgtcaagcccatcctattccggatagctcgccactgctgcagttcggcggtcaggttagacagcggtacctgtacactgatgacgcacaacagaccgaggctcatttggagattcgcgaggatggaaccgtgggaggagcagccgaccaatcgccggaaagcctgctgcagctgaaggcgctcaagccgggggtcattcaaatcctgggagtaaaaacttcacggttcctgtgccagcgacccgatggagcactctacggatccttgcattttgaccctgaagcgtgttcctttcgagaacttcttctcgaagatggctacaatgtttatcaatcagaagcacacggacttccgcttcaccttcctggcaacaagagccctcatcgggacccagcacctagaggtcctgcccgatttctgccacttcctggactcccaccagctcttcccgaaccccctggcattttggcacctcagccaccagatgtcggttcgtccgatcccctcagcatggtgggaccttcgcaagggcgcagccctagttacgcgtct

SEQ ID NO: 275812 - DNA, 627 bp, Artificial Sequence
  derived and/or modified sequence
atggactctgacgaaactggctttgagcacagcggactttgggtttcagttctcgctggacttctccttggagcttgtcaagcccatccaatcccagactcctcgcccttgctgcagttcggtggacaagttcgtcagcgatatttgtacacagatgacgctcagcagacagaagctcatcttgagattagagaagatggtaccgtgggaggagctgctgatcaatctccggagtctttactacagcttaaggctcttaagccaggggtcatccagatccttggtgttaagacgtcaagattcttgtgtcagcggcctgatggagcattgtacggatcgttgcactttgatccagaagcgtgttcttttagggaacttcttttggaggacggatataacgtttaccagtcggaagcgcatggcctaccgcttcatcttccggggaacaaatcgccacatcgcgatccagctccgaggggtccagccagattccttcctctgccgggtcttccgccggcgctaccagagccaccaggaattctggcaccgcaaccacctgatgttggatcaagtgacccgttgtctatggttggaccatctcaggggaggtcgccatcctatgcttct

SEQ ID NO: 275813 - DNA, 627 bp, Artificial Sequence
  derived and/or modified sequence
atggacagcgacgagacgggttttgaacacagcggcctctgggtgagcgttctggctgggctcctcttgggtgcttgtcaagcgcacccaatccccgactcttctccactcttgcagtttggaggccaggtgaggcagcgctacctttatactgacgacgcgcaacaaactgaagcccacctggaaatcagagaggacggaaccgtcgggggcgctgccgatcagtccccagagtctttattacagctgaaagctcttaaacctggggtcattcagatactgggcgttaaaacatcaaggtttctttgtcagaggcctgatggagcattgtacgggtcgctccactttgacccagaagcatgctcatttcgggagctgctgctggaggacggctataatgtgtaccagagtgaggcacatggcctcccactgcacctccctggcaacaaaagccctcacagagatcctgccccacggggacccgctcggtttcttccactgcctggactgccccccgcactgcccgagcctcccgggatcctcgccccgcagcctcctgatgtcgggtcgagcgacccgttgagtatggtcggcccgtctcaggggaggtctcctagctacgccagc

SEQ ID NO: 275814 - DNA, 627 bp, Artificial Sequence
  derived and/or modified sequence
atggactctgacgagactggtttcgagcactctggcctgtgggtgtctgtgctcgctggcctgctgttgggagcttgtcaggcacatccaatccctgactcgtccccccttcttcagttcggcggccaagtccgccaacggtatctttacactgatgacgcacagcagactgaggctcaccttgaaatccgagaggatggcacagtggggggcgctgccgatcaaagtccagagagcctattgcagctgaaggcgttgaaacccggagtcatccaaattttaggggtgaaaacatctcgctttctgtgtcaacgtccagacggcgcactgtacggttccttacactttgaccctgaggcctgtagcttcagggaactgcttctcgaggatggttacaacgtttatcagagcgaagcgcatgggttgccattgcatctgccaggaaacaaatcaccacatcgcgatccagcgcctagggggcccgcacggtttctaccacttccaggcctgcctcccgcattgcccgaacctcccggcatcctcgcacctcagcccccggatgtggggtcatccgatccactgagcatggtgggtcctagtcaaggacggtccccctcatatgcctct

SEQ ID NO: 275815 - DNA, 627 bp, Artificial Sequence
  derived and/or modified sequence
atggatagcgatgagaccggttttgagcatagcggtctctgggttagcgtcttggctggcctcctgttgggcgcctgccaggctcatccgatccctgacagtagccctcttttgcagtttggaggtcaagtaaggcaaaggtacttgtataccgatgacgctcaacaaacggaagctcacctcgagattcgcgaagacggaaccgtgggtggtgcggctgatcagtcacccgagtcactgttgcagctcaaggccttgaaacctggcgtgatccaaattctgggtgtaaagacttcacgcttcctttgccagagacccgacggtgccttgtacggcagtctgcactttgaccccgaagcctgtagctttcgcgagctgctcctcgaggatggctataacgtctatcagagtgaggctcacggactgcccctgcacttgcctggcaataaaagcccacacagagaccctgcaccccgcggacccgccaggttcttgcccttgcctggcctgccacctgctcttccagagcccccaggcattctggcgcctcagccccctgacgtgggttccagtgatccattgtccatggttggcccttctcagggacgctctccatcttacgcaagc

SEQ ID NO: 275816 - DNA, 627 bp, Artificial Sequence
  derived and/or modified sequence
atggatagtgatgaaaccggatttgagcacagcggcctatgggtatctgtgctggccggtttgctgctgggggcctgccaagcccatcccattccggactcctctccacttctgcagttcggaggccaggtgagacagcgatacctgtacactgatgatgcccagcaaaccgaggcacatctcgaaatccgtgaggatgggactgttggaggggcggccgaccagagtcctgagagtcttttacagcttaaagccttgaaaccgggcgtgatccagatattaggagtgaagacgtctcgttttctgtgtcaaagaccggatggagcactctacggctctttacattttgatcctgaagcctgttctttccgcgagctgctgctggaggatggttataatgtgtaccagtcagaggcacacggcttgcctctgcatttgcctggtaacaagtctccacatcgtgaccctgccccccggggaccagcccggttcctcccattacccgggctgcctcctgccctgccagaacccccaggtatcctggcacctcagcccccagacgtaggttcctccgatccactgtcaatggtgggacctagccaggggaggtctccctcctatgcttcc

SEQ ID NO: 275817 - DNA, 627 bp, Artificial Sequence
  derived and/or modified sequence
atggattccgatgaaaccggcttcgaacatagcggtttgtgggtgagtgtcttggcagggcttcttcttggcgcatgtcaggctcatccaatcccagattcatcgcctctgctgcaatttggtggacaagtgcgccaacgctacctgtacactgatgacgcccaacaaaccgaagcacatctggagatcagggaggacgggacggtgggaggagctgcggaccagagccctgagtcgctgctgcaattgaaggcactgaaacctggtgtgatccagatcctgggcgtcaaaacctcacggttcttgtgtcagcgtcccgatggcgccctttacggtagcctgcactttgatccagaagcatgttcgtttagagaactgctgctcgaggacggatacaacgtgtaccaatccgaagcccacgggctgcccctgcacctgcccggaaacaagtccccccatcgagatccggcaccccgtgggccagccagatttctgccactgccagggcttcctcctgcactgcctgagcccccaggaatactcgcacctcaaccacctgacgtcggatcaagcgatcctctctcgatggttggtccatcacagggaagatccccttcgtacgcctct

SEQ ID NO: 275818 - DNA, 627 bp, Artificial Sequence
  derived and/or modified sequence
atggattctgatgaaaccggattcgagcactccggcctgtgggtgagcgtgctcgccggtctgctgctgggtgcatgccaggcacaccccatcccagattcaagtcccctgctccaatttggtggccaggttcgccaacgctacctgtacactgacgatgcacaacaaaccgaggcacacctggagattagggaggatggcactgtcggcggagctgccgaccagagccctgaatctcttcttcagctcaaggctctcaagcccggtgttatacagatactcggtgtgaaaacatctaggttcctttgtcagaggcccgacggagccctgtatggatctctccactttgaccctgaagcttgctcctttcgtgagctccttctggaggatggttacaacgtttatcaaagcgaggcacacggactccccctccacttgcctggtaataagagccctcacagggatcctgccccccgtggcccagcacgctttttgcctctccctggcctgcctccagctttgccagagccacccggcatcctcgcaccacagccccccgatgtcggatcctctgatccactgtccatggtcggacccagccagggccgttctccctcatatgcttct

SEQ ID NO: 275819 - DNA, 627 bp, Artificial Sequence
  derived and/or modified sequence
atggactccgatgagactggcttcgaacattccggtctttgggtgtccgtcttggccggcctgctgttgggggcatgccaggcccacccaatcccggacagctccccgctcctccagtttggtggccaggtgagacagaggtacctgtacaccgacgacgcgcagcagactgaggcccatctggaaatccgcgaagacggaacggtcggaggagcggcggaccagagtcctgagtcactcctgcaactgaaagcccttaagccgggagtcatccagatcctcggcgtgaagacctcaagatttctctgccaaaggccagatggcgccctgtacgggtcgttgcacttcgatcctgaagcctgctcatttagagagctgttgctggaagatggatacaacgtgtaccaatccgaagcgcacggactccctctccatctgccagggaacaagagcccacaccgggacccggccccgcgcggaccggcccgctttctcccactgccgggactccctcctgccctcccggaaccaccgggaatccttgcgccgcaaccacccgacgtgggatcctcggaccctctgtccatggtgggaccttcgcagggaagaagcccatcttacgcatcc

SEQ ID NO: 275820 - DNA, 627 bp, Artificial Sequence
  derived and/or modified sequence
atggattcagatgaaaccggattcgagcacagcggactgtgggtgtcggtgttggccggacttctcctgggggcttgtcaggcgcaccccattccagactcctcaccgctgctccagttcggcggacaggtgcggcaaagatacctgtacacggacgacgcacaacagactgaagcgcatctcgaaatcagagaggatggaactgtgggcggagccgccgaccagtccccggagagcctgctgcagctcaaagcgcttaagccaggagtgatccagatactgggagtcaagacttcgagattcctgtgccagcgcccggacggagccctttacggaagcctgcatttcgacccggaagcatgttccttcagggaactgttgctcgaggatggatacaatgtgtaccagtccgaagcgcacggactgccgcttcacctgccaggtaataagtctcctcatagagatcccgcgcctaggggcccggcaaggtttctgccactcccaggcctgccacccgcattgccagaaccacctgggatcttggcccctcagcctccagacgttggttctagcgatccgctgtcgatggtggggccgtcgcaagggagatccccgtcgtacgcttca

SEQ ID NO: 275821 - DNA, 627 bp, Artificial Sequence
  derived and/or modified sequence
atggactctgacgaaacaggattcgaacactcaggcctctgggtgtcagtgctagctggactactcctgggcgcttgccaggcacacccaatacctgactccagccctctcctgcagttcggcggccaggtcaggcagcgttatttgtatactgacgacgcccagcagactgaggcccacttggagatccgcgaggatggcacagtcggaggggcagcagaccagtctccagagagtctcctgcaacttaaggccctaaagcccggagtaatccagatcctgggggtgaaaacatctcgctttctatgtcagaggcccgacggagcgctatacggcagtctgcacttcgacccagaggcctgtagcttccgcgagctcctcctcgaagatggatataatgtgtatcagagcgaggcacacggcctgcccctacacttgcccgggaataagtccccacacagagatcctgcacccaggggccccgcaaggttcctgcccttgcccgggctgccacccgccctaccagaacctccaggcattctcgcaccacagcctcccgacgttggttcatccgaccccctgagcatggtcggccctagccagggccgaagcccgagttatgccagc

SEQ ID NO: 275822 - DNA, 627 bp, Artificial Sequence
  derived and/or modified sequence
atggattcagacgaaaccggatttgaacattcaggactctgggtgagcgtcctggcgggactgctgttgggtgcctgccaggctcatcccatcccagattcctccccgctgctgcagtttgggggtcaggtgagacagcggtacctctacactgacgacgcccagcagaccgaagctcatctggaaatccgcgaagatggaactgtgggaggagcggctgaccagtcgcccgaatccctcttgcagctgaaggcactgaagccaggagtgatccagatccttggcgttaagacctccaggtttctttgccagaggcctgacggagcgctgtatggatcgctgcactttgacccggaggcctgttcgttccgggagcttttgttggaagatggatacaatgtgtaccaatccgaagcacacgggctgccactgcatcttcctggaaacaagtcgccacaccgggaccctgccccacgggggcccgcacgcttcctgcctctgccgggtctgccaccggctctcccagagccaccgggtatcctcgcaccgcaaccgcctgatgtcgggagctcagacccgctgtcgatggtgggaccatctcagggaagatcgccatcgtacgcgtcg

SEQ ID NO: 275823 - DNA, 627 bp, Artificial Sequence
  derived and/or modified sequence
atggattcagatgagactggatttgaacacagcggactatgggtatctgttttggcggggctcctgctgggcgcttgccaggcccacccaattcccgattcttcacctctactgcagttcggcgggcaggttaggcagcgctatctgtacaccgatgacgcacaacagacagaggcgcatctcgaaatccgtgaggacggcacagtagggggggccgcggaccaaagccctgaatcactccttcaactgaaggcactgaaacctggagtgatccaaattctgggggtcaagacttctaggttcctatgccaaaggccagatggcgccttgtatgggtccctgcactttgatcctgaggcttgttccttcagagaactcctgttggaagatggatacaacgtgtaccagtctgaggcccatggtctccccttgcacctgcccggtaacaagtctccacatagggatccagcaccccgaggccctgccaggttcctgccactgcccggccttcctcctgctcttcccgaaccacctgggatcttggcccctcagccaccagacgttgggtctagtgatccactgagcatggtggggccatctcagggtcggagtccaagctatgcttca

SEQ ID NO: 275824 - DNA, 627 bp, Artificial Sequence
  derived and/or modified sequence
atggattccgatgaaactggattcgaacactcgggcctgtgggtcagcgtgctggccggactcctgcttggggcgtgtcaggctcaccctattcccgactcatcgcctcttctccaattcggtggccaagtccgtcagaggtacttgtacactgatgatgcacaacaaaccgaggcacacttggaaatccgagaggacggcacggtgggtggggctgccgatcagagcccggaatcactgctgcaattgaaagcgcttaagcctggtgttatccagattctgggagtgaaaacttcccgctttctgtgccagcggcctgacggagcgttgtacggctcactccatttcgatccggaggcatgttcctttcgggaacttctcttggaggacggatacaatgtgtaccaatcggaagcacatggattgcctcttcatctgcctggtaacaagtcgccacatagagatccagcgccaaggggtccagcaaggtttctgccccttcctggcttgccgccagccttgcccgagccaccaggtatactcgcgccccagccgccagacgttggatcgagtgatcctctgtcgatggtgggcccttctcaagggagatcgccctcttatgcatca

SEQ ID NO: 275825 - DNA, 627 bp, Artificial Sequence
  derived and/or modified sequence
atggactccgatgagaccggctttgagcactccggattgtgggtgtctgtgctggctgggctgcttctgggtgcctgccaggcacacccaatcccagactcatctcctctcttacagttcggcggtcaggtacggcagcgctacctgtacactgacgatgcacagcagacagaggcccacctggagattagggaggacgggaccgtaggaggagcagccgatcagagccctgagagtctcctgcaactgaaggccctaaagcccggcgtgatccaaatcctaggcgttaagacatcccggttcctctgccaaaggccagacggagctctctacggctctctgcacttcgatcccgaggcatgtagcttcagagaactcctgcttgaggatggatataatgtgtatcagagcgaagcacatggtctcccactgcacctccctggaaataagtcccctcatcgtgacccagcaccacggggtcccgctcggttcctcccactcccaggcctcccacctgcactgccagagcctcctggcattctggctcctcagccaccagacgtcggctctagtgatcctctatctatggtagggccctcacagggccgatccccttcttacgcgtcc

SEQ ID NO: 275826 - DNA, 627 bp, Artificial Sequence
  derived and/or modified sequence
atggacagcgacgagaccggcttcgagcacagcggcctgtgggtgagcgtgctggccggcctgctgctgggcgcctgccaggcccaccccatccccgacagcagccccctgctgcagttcggcggccaggtgcgccagcgctacctgtacaccgacgacgcccagcagaccgaggcccacctggagatccgcgaggacggcaccgtgggcggcgccgccgaccagagccccgagagcctgctgcagctgaaggccctgaagcccggcgtgatccagatcctgggcgtgaagaccagccgcttcctgtgccagcgccccgacggcgccctgtacggcagcctgcacttcgaccccgaggcctgcagcttccgcgagctgctgctggaggacggctacaacgtgtaccagagcgaggcccacggcctgcccctgcacctgcccggcaacaagagcccccaccgcgaccccgccccccgcggccccgcccgcttcctgcccctgcccggcctgccccccgccctgcccgagccccccggcatcctggccccccagccccccgacgtgggcagcagcgaccccctgagcatggtgggccccagccagggccgcagccccagctacgccagc

SEQ ID NO: 275827 - DNA, 776 bp, Artificial Sequence
  derived and/or modified sequence
gggaaataagagagaaaagaagagtaagaagaaatataagagccaccatggactcagacgagacagggtttgaacattcagggctctgggtgtccgtattggcagggctcttgcttggtgcgtgccaagcccaccccattccagattcgtcgcccctgttgcagttcggaggacaggtccggcagcggtatctctatactgatgatgcgcagcagacggaagcgcaccttgagattagggaggatggcacggtaggtggagcggcagaccagtcgcccgagagcctcttgcagcttaaagctctgaaacccggcgtgatccaaatccttggggtcaagacctcccgcttcctctgccagcgcccagacggtgctctgtacggatccttgcactttgacccggaagcgtgttcctttcgagaactgcttttggaagatggttacaacgtctaccagtcagaggcccacggacttccgctccatctgcccgggaataagagccctcatagggaccctgcgcccagaggaccggccagattcctcccgctgcctgggcttccgccagccctccccgagcctcccggaatcttggcacctcaaccgcccgatgtgggttcgtcggacccgctgtcgatggtgggacccagccaggggcggagcccgtcgtatgcgtcatgataataggctgccttctgcggggcttgccttctggccatgcccttcttctctcccttgcacctgtacctcttggtctttgaataaagcctgagtaggaag

SEQ ID NO: 275828 - DNA, 630 bp, Artificial Sequence
  derived and/or modified sequence
atggattcggacgagacaggattcgagcactctggcctgtgggttagcgtattggccggcctgttgctcggggcatgtcaagctcaccccattcctgattcaagccctctactccaattcggcggtcaggtgaggcagcgatacctgtataccgatgatgctcaacagactgaggcccacttggagataagggaagacggaaccgttggtggcgccgctgaccagtcacccgagtctttgctgcagctgaaagctctcaaacctggagtgatccaaatcctgggggtgaagacatcccgatttctctgtcagcggcctgacggggccctgtacggaagcctgcactttgaccctgaggcgtgctccttccgggagttgctgctggaagacggctacaacgtgtaccagtctgaggcgcacggacttcccctgcacctccccggcaataaaagtccacatagggaccctgcgccacgggggcctgcaaggttccttcctctcccaggtttacctccagcgctgcccgagcctccaggcatcctggcacctcaaccgcctgatgtcgggtcatcagacccactgtctatggttggaccctcacagggacgctctccgtcctacgcgtcgtag

SEQ ID NO: 275829 - DNA, 883 bp, Artificial Sequence
  derived and/or modified sequence
ctgtcagctgaggatccagccgaaagaggagccaggcactcaggccacctgagtctactcacctggacaactggaatctggcaccaattctaaaccactcagcttctccgagctcacaccccggagatcacctgaggacccgagccattgatggactcggacgagaccgggttcgagcactcaggactgtgggtttctgtgctggctggtcttctgctgggagcctgccaggcacaccccatccctgactccagtcctctcctgcaattcgggggccaagtccggcagcggtacctctacacagatgatgcccagcagacagaagcccacctggagatcagggaggatgggacggtggggggcgctgctgaccagagccccgaaagtctcctgcagctgaaagccttgaagccgggagttattcaaatcttgggagtcaagacatccaggttcctgtgccagcggccagatggggccctgtatggatcgctccactttgaccctgaggcctgcagcttccgggagctgcttcttgaggacggatacaatgtttaccagtccgaagcccacggcctcccgctgcacctgccagggaacaagtccccacaccgggaccctgcaccccgaggaccagctcgcttcctgccactaccaggcctgccccccgcactcccggagccacccggaatcctggccccccagccccccgatgtgggctcctcggaccctctgagcatggtgggaccttcccagggccgaagccccagctacgcttcctgaagccagaggctgtttactatgacatctcctctttatttattaggttatttatcttatttatttttttatttttcttacttgagataataaagagttccagagg

SEQ ID NO: 275830 - DNA, 1312 bp, Artificial Sequence
  derived and/or modified sequence
gaggcttccaaggcaggatacttgtgtctcagatgcggtcgcttctttcatacagcaattgccgccttgctgaggatcaaggaacctcagtgtcagatcacgccctccccccaaacttagaaattcagatggggcgcagaaatttctcttgttctgcgtgatctgcatagatggtccaagaggtggtttttccaggagcccagcacccctcctccctccgactcagacccaggagtctggccctccattgaaaggaccccaggttacatcatccattcaggctgcccttgccacgatggaattctgtagctcctgccaaatgggtcaaatatcatggttcaggcgcagggagggtgattgggcgggcctgtctgggtataaattctggagcttctgcatctatcccaaaaaacaagggtgttctgtcagctgaggatccagccgaaagaggagccaggcactcaggccacctgagtctactcacctggacaactggaatctggcaccaattctaaaccactcagcttctccgagctcacaccccggagatcacctgaggacccgagccattgatggactcggacgagaccgggttcgagcactcaggactgtgggtttctgtgctggctggtcttctgctgggagcctgccaggcacaccccatccctgactccagtcctctcctgcaattcgggggccaagtccggcagcggtacctctacacagatgatgcccagcagacagaagcccacctggagatcagggaggatgggacggtggggggcgctgctgaccagagccccgaaagtctcctgcagctgaaagccttgaagccgggagttattcaaatcttgggagtcaagacatccaggttcctgtgccagcggccagatggggccctgtatggatcgctccactttgaccctgaggcctgcagcttccgggagctgcttcttgaggacggatacaatgtttaccagtccgaagcccacggcctcccgctgcacctgccagggaacaagtccccacaccgggaccctgcaccccgaggaccagctcgcttcctgccactaccaggcctgccccccgcactcccggagccacccggaatcctggccccccagccccccgatgtgggctcctcggaccctctgagcatggtgggaccttcccagggccgaagccccagctacgcttcctgaagccagaggctgtttactatgacatctcctctttatttattaggttatttatcttatttatttttttatttttcttacttgagataataaagagttccagaggaggataa

SEQ ID NO: 275831 - DNA, 630 bp, Artificial Sequence
  derived and/or modified sequence
atggacagcgacgagaccggcttcgagcacagcggcctgtgggtgtccgtactagccgggctgcttctgggagcatgtcaggcccaccccattcctgattcgtccccactcctgcaattcggtggacaagtccgacagcgttatctgtatacagacgatgcacaacagactgaggcccatctggagatccgcgaagatggtacggtgggaggggcagccgaccagagcccagaatcactgctgcagctgaaggccctgaaacctggcgttatccagattctgggcgtgaagacctctagatttctgtgtcaacgaccagatggtgctttgtacggttccctgcatttcgatcccgaggcttgtagcttccgggaacttctgctagaggacggatataatgtgtatcagagcgaagctcacggcctgccacttcacctcccaggcaacaaatcaccccaccgggatccagctccccgaggaccagccagattcctcccactacctgggctcccgccagcactgcccgaacctcccggaatcctggcccctcaacctcccgatgtgggatctagcgacccactgtcaatggtcggcccatcccagggtcgcagcccgtcctatgctagctag

SEQ ID NO: 275832 - DNA, 630 bp, Artificial Sequence
  derived and/or modified sequence
atggactctgacgaaaccggattcgagcacagcggactatgggtctctgtgctggcgggtcttctgctgggagcttgtcaggcccatccaatcccagattcctcacccctgctgcagtttggcggacaggtacgccagcgctatttgtatacggatgacgctcagcagactgaagcccatctggaaattagagaagacggaaccgtaggtggcgctgcagatcagagccccgaatctctgttgcaactgaaagcactgaagcctggcgtgattcagattctgggggtgaagacctctagatttctgtgtcaaaggcccgatggtgctttgtatggatctctgcatttcgacccggaggcctgtagtttccgcgagctgctcctggaagacggctataatgtttatcagagtgaagctcatggtctgccgctccaccttcccggtaacaaaagtccacatcgcgacccagcccctcgaggacccgctagattcctgcctcttcctggcctaccccctgccttgcccgaacctccaggaattctggcccctcagcccccagacgttggaagtagtgatccactgtccatggtcggtcccagtcagggacgctctccatcctacgcttcctag

SEQ ID NO: 275833 - DNA, 940 bp, Artificial Sequence
  derived and/or modified sequence
ctgtcagctgaggatccagccgaaagaggagccaggcactcaggccacctgagtctactcacctggacaactggaatctggcaccaattctaaaccactcagcttctccgagctcacaccccggagatcacctgaggacccgagccattgatggactcggacgagaccgggttcgagcactcaggactgtgggtttctgtgctggctggtcttctgctgggagcctgccaggcacaccccatccctgactccagtcctctcctgcaattcgggggccaagtccggcagcggtacctctacacagatgatgcccagcagacagaagcccacctggagatcagggaggatgggacggtggggggcgctgctgaccagagccccgaaagtctcctgcagctgaaagccttgaagccgggagttattcaaatcttgggagtcaagacatccaggttcctgtgccagcggccagatggggccctgtatggatcgctccactttgaccctgaggcctgcagcttccgggagctgcttcttgaggacggatacaatgtttaccagtccgaagcccacggcctcccgctgcacctgccagggaacaagtccccacaccgggaccctgcaccccgaggaccagctcgcttcctgccactaccaggcctgccccccgcactcccggagccacccggaatcctggccccccagccccccgatgtgggctcctcggaccctctgagcatggtgggaccttcccagggccgaagccccagctacgcttcctgaagccagaggctgtttactatgacatctcctctttatttattaggttatttatcttatttatttttttatttttcttacttgagataataaagagttccagaggagaaaaaaaaaaaaaaaaaaaaaaaaaaaaaaaaaaaaaaaaaaaaaaaaaaaaaaa

SEQ ID NO: 275834 - DNA, 793 bp, Artificial Sequence
  derived and/or modified sequence
gggaaataagagagaaaagaagagtaagaagaaatataagagccaccatggactcggacgagaccgggttcgagcactcaggactgtgggtttctgtgctggctggtcttctgctgggagcctgccaggcacaccccatccctgactccagtcctctcctgcaattcgggggccaagtccggcagcggtacctctacacagatgatgcccagcagacagaagcccacctggagatcagggaggatgggacggtggggggcgctgctgaccagagccccgaaagtctcctgcagctgaaagccttgaagccgggagttattcaaatcttgggagtcaagacatccaggttcctgtgccagcggccagatggggccctgtatggatcgctccactttgaccctgaggcctgcagcttccgggagctgcttcttgaggacggatacaatgtttaccagtccgaagcccacggcctcccgctgcacctgccagggaacaagtccccacaccgggaccctgcaccccgaggaccagctcgcttcctgccactaccaggcctgccccccgcacccccggagccacccggaatcctggccccccagccccccgatgtgggctcctcggaccctctgagcatggtgggaccttcccagggccgaagccccagctacgcttcctgataataggctggagcctcggtggccatgcttcttgccccttgggcctccccccagcccctcctccccttcctgcacccgtacccccgtggtctttgaataaagtctgagtgggcggc

SEQ ID NO: 275835 - RNA, 776 nt, Artificial Sequence
  derived and/or modified sequence
gggaaauaagagagaaaagaagaguaagaagaaauauaagagccaccauggacucagacgagacaggguuugaacauucagggcucuggguguccguauuggcagggcucuugcuuggugcgugccaagcccaccccauuccagauucgucgccccuguugcaguucggaggacagguccggcagcgguaucucuauacugaugaugcgcagcagacggaagcgcaccuugagauuagggaggauggcacgguagguggagcggcagaccagucgcccgagagccucuugcagcuuaaagcucugaaacccggcgugauccaaauccuuggggucaagaccucccgcuuccucugccagcgcccagacggugcucuguacggauccuugcacuuugacccggaagcguguuccuuucgagaacugcuuuuggaagaugguuacaacgucuaccagucagaggcccacggacuuccgcuccaucugcccgggaauaagagcccucauagggacccugcgcccagaggaccggccagauuccucccgcugccugggcuuccgccagcccuccccgagccucccggaaucuuggcaccucaaccgcccgauguggguucgucggacccgcugucgauggugggacccagccaggggcggagcccgucguaugcgucaugauaauaggcugccuucugcggggcuugccuucuggccaugcccuucuucucucccuugcaccuguaccucuuggucuuugaauaaagccugaguaggaag

SEQ ID NO: 275836 - DNA, 1621 bp, Artificial Sequence
  derived and/or modified sequence
ggaatatctataaaggaattcgggcccctacgtgagaagctcggagggggtggtttcaggagttccttgtggagaggggatcgtccgtgactcagaccccgtcgaaaagctctcgatttcacgcaaccaaccttaccctcgtccccaacacaatccttgattttacccctgggaaaattagcgtaggtggtcatgaccccggcttcctctttaaaagccctcagaacctggaccgggctcctcaatgaaccctagtgttagaggccacaaatcgggaaccaaggtcggggagcggctgtttagggtgcatcactgttcaggatgcatcggggctcctttttctaagcggaagggtgcgccctgcaaattgggagcccgttagttttggggaagggtgaacaagggccccctaggtctagaggaccgcatggagtctcgcttaagtgttagtggggtcctcagttctaggaatctgcgttctcctgctctcggtttggggtgagagcacccttcctaacggtcttcgggaactgtgcgcgccggctgcaatggggccgcattttaccctcctgtgtgcggcgctggccggttgcttgcttcctgccgaggggtgtgttatatgtgacccgtctgtcgtgctggcgctaaagtccctggagaaagattacctgcctggccacctggatgcgaagcatcacaaagccatgatggaaagggtagagaatgccgtgaaggatttccaggaactgtcgcttaatgaggatgcctatatgggggtcgttgatgaggccacactgcaaaaggggtcctggagtttgctgaaggatctgaaacgcatcacagacagtgatgtaaaaggcgatctcttcgtgaaggagctattttggatgttgcacttgcaaaaggaaacctttgccacctatgttgctcgattccaaaaagaggcttattgtcccaacaaatgtggtgtgatgttgcaaactctgatctggtgcaagaactgcaaaaaggaggttcacgcttgtcgaaagtcctacgattgcggggagcggaatgtggaagttcctcaaatggaagacatgatcctggactgtgagttaaactggcatcaggcttcggaaggcctcactgattacagcttttacagggtttgggggaacaatacggagaccttggtgtccaaggggaaagaggccaccctgaccaagcccatggtgggtccagaggatgcaggcagctaccgctgcgagctgggctctgtgaattccagcccagccacgatcatcaattttcacgtcacagtgttgcccaaaatgatcaaggaggaaaaaccttctccaaatatcgtaaccccgggggaggcgaccacggagtcgtccataagcctccagcctctgcagcccgagaaaatgctggcaagccgccttctggggctgctgatctgcggctccctagcactgataaccggccttacctttgcgatatttcgtcgaaggaaggtgatcgatttcatcaaatcctcactgtttggccttggcagtggagcggccgagcaaacccaggtcccaaaagaaaaggccacagattcgaggcaacaataaagatttatcttgttgtctaa

SEQ ID NO: 275837 - protein, 433 aa, Artificial Sequence
  derived and/or modified sequence
GGYARNDAGEKLPSVMAGVPARRGQSSPPPAPPICLRRRTRLSTASEETVQNRVSLEKVLGITAQNSSGLTCDPGTGHVAYLAGMWRMGPASESCGEDSIAPSLSRTVPGMYCVVVILDPKENKQQHIFNTARKSLSALAFSPDGKYIVTGENGHRPAVRIWDVEEKNQVAEMLGHKYGVACVAFSPNMKHIVSMGYQHDMVLNVWDWKKDIVVASNKVSCRVIALSFSEDSSYFVTVGNRHVRFWFLEVSTETKVTSTVPLVGRSGILGELHNNIFCGVACGRGRMAGSTFCVSYSGLLCQFNEKRVLEKWINLKVSLSSCLCVSQELIFCGCTDGIVRIFQAHSLHYLANLPKPHYLGVDVAQGLEPSFLFHRKAEAVYPDTVALTFDPIHQWLSCVYKDHSIYIWDVKDINRVGKVWSELFHSSYVWNVE

SEQ ID NO: 275838 - DNA, 1599 bp, Artificial Sequence
  derived and/or modified sequence
atggccctgagaagcgtgatgttcagcgacgtgagcatcgacttcagccccgaggagtgggagtacctggacctggagcagaaggacctgtacagagacgtgatgctggagaactacagcaacctggtgagcctgggcctgctgctgctgagcttcatcagcaccctggagatgctgctgctgctggtgaaggagaacagcatgtgcctgctgagctgcttcatcctggacctggagaccaagtacgagaccaagaagctgagcctggagaacgacatctacgagatcaacctgagccagtggaagatcatggagagaatcgagaaccacggcctgaagggcctgatcctgaagaacgactgggagagcaccggcaagatcgagggccaggagagaccccaggagggctacttcagcagcgtgaagatgcccagcgagaaggtgagcagctaccagaagagaaccagcgtgaccccccaccagagactgcacttcgtggacaagccctacgagtgcaaggagtgcggcaaggccttcagagtgagacagcagctgaccttccaccacagaatccacaccggcgagaagccctacgagtgcaaggagtgcggcatggccttcagacagaccgcccacctgaccagacaccagagactgcacagcggcgagaagctgtacgagtgcaaggagtgcggcgaggccttcatctgcggcgccgacctgagagtgcaccagaagatgcacatcggcgagaagccctacgagtgcaaggagtgcggcaaggccttcagagtgagaggccagctgaccctgcaccagagaatccacaccggcgagaagccctacgtgtgcaaggagtgcggcaaggccttcagacagtacgcccacctgaccagacaccagaagctgaacagcgccgacagactgtacgagtgcaaggagtgcggcaaggccttcctgtgcggcagcggcctgagagtgcaccacaagctgcacaccggcgagaagccctacgagtgcaaggagtgcggcaaggccttcagagtgagacagcagctgaccctgcaccagagaatccacaccggcgagaagccctacgagtgcaaggagtgcggcaagaccttcagcagaggctaccacctgatcctgcaccacagaatccacaccggcgagaagccctacgagtgcaaggagtgctggaaggccttcagcagatacagccagctgatcagccaccagagcatccacatcggcgtgaagccctacgactgcaaggagtgcggcaaggccttcagactgctgagccagctgacccagcaccagagcatccacatcggcgagaagccctacaagtgcaaggagtgcggcaaggccttcagactgagacagaagctgaccctgcaccagagcatccacaccggcgagaagcccttcgagtgcaaggagtgcagaaaggccttcagactgaacagcagcctgatccagcacctgagaatccacagcggcgagaagccctacgagtgcaaggagtgcaagaaggccttcagacagcacagccacctgacccaccacctgaagatccacaacgtgaagatctag

SEQ ID NO: 275839 - DNA, 1599 bp, Artificial Sequence
  derived and/or modified sequence
atggccctaagaagtgtaatgtttagcgacgtgagcatcgatttctcacctgaggagtgggagtatctggatctagaacagaaagatctttaccgtgatgtcatgctggagaattacagtaacttagtctcactaggcctgcttcttttaagttttattagtacactggaaatgctgctcctgctagtcaaagagaactccatgtgcttgttgtcatgcttcattctggacctcgagactaagtatgaaaccaagaagctcagcttggagaacgatatctatgagatcaacctgagccagtggaaaatcatggagaggattgagaaccacgggctcaagggtctcattcttaagaacgattgggagtccacaggcaagattgaagggcaggagaggccccaggaaggttacttctcctcagtgaaaatgccatccgagaaagtgagcagctatcagaagaggacttcagtgacacctcatcagaggctccattttgtggataagccctacgagtgtaaggagtgtgggaaggccttcagggtccgccagcaactgacatttcatcaccgcatacacaccggtgaaaaaccgtacgaatgcaaagaatgcggtatggccttccggcagaccgcccatctaacgagacatcagagactccattcaggggagaagctgtatgagtgcaaggaatgcggcgaggctttcatttgcggagctgaccttagggttcaccagaagatgcacattggagaaaaaccatacgagtgtaaagagtgcgggaaagctttcagggtaaggggacagctgaccctccaccagcggatccatactggagagaagccctacgtatgtaaagagtgtggcaaggccttcagacagtacgcccatctcacccgtcaccagaagctgaactctgccgaccggttgtacgaatgcaaggagtgcgggaaagcattcctgtgtggatctggcctgagagtccaccataagcttcacacaggcgaaaagccctacgagtgcaaggaatgtggcaaggcgtttagagttcgacaacagctcactctgcatcaaagaatccatacaggcgagaagccttacgaatgcaaagagtgcggtaagaccttcagtcggggatatcaccttattcttcatcataggatccataccggggagaaaccgtatgagtgtaaggagtgttggaaagccttttccaggtatagccagctgatatcacaccagagcattcatatcggggttaagccttatgactgtaaggagtgcggcaaggcatttcggctgttatcccaactaactcagcatcagtccattcacatcggggagaaaccttacaaatgcaaagagtgcgggaaggctttcaggctacggcaaaaacttactcttcatcagtcaattcacacaggtgagaaaccatttgagtgtaaggaatgccggaaagctttcagacttaattctagcctcatccagcacttgcgcatccattctggagaaaagccctatgaatgtaaggagtgtaaaaaagcatttagacagcatagtcatctcacacatcacttgaagatacacaatgtaaaaatttag

SEQ ID NO: 275840 - DNA, 1599 bp, Artificial Sequence
  derived and/or modified sequence
atggccctgcggtctgtgatgttcagtgatgtgtccattgacttcagccctgaggagtgggagtacctggacctggagcagaaggacctgtacagagatgtgatgctggagaactacagcaacctggtgtccctgggcctgctgctgctgtccttcatcagcaccctggagatgctgctgctgctggtgaaggaaaattccatgtgcctgctgagctgcttcatcctggacctggagaccaagtatgagaccaagaagctgagcctggagaatgacatctatgagatcaacctgagccagtggaagatcatggagagaattgagaaccacggcctgaagggcctcatcctgaagaatgactgggagagcacaggcaagattgagggccaggagcggccccaggagggctacttcagctctgtgaagatgcccagcgagaaggtgagcagctaccagaagaggacctctgtgaccccccaccagaggctgcactttgtggacaagccctatgagtgcaaggaatgtgggaaggccttccgggtgcggcagcagctgaccttccaccaccgcatccacactggagagaagccctatgagtgcaaggaatgtggcatggccttccggcagacagcccacctgaccaggcaccagaggctgcacagcggggagaagctgtatgagtgcaaggaatgtggggaggccttcatctgtggggctgacctgcgggtgcaccagaagatgcacatcggggagaagccctatgagtgcaaggaatgtgggaaggccttccgggtgcggggccagctgaccctgcaccagaggatccacactggagagaagccctacgtgtgcaaggaatgtgggaaggccttccggcagtatgcccacctgaccaggcaccagaagctgaacagcgctgaccggctgtatgagtgcaaggaatgtgggaaggccttcctgtgtggcagcggcctgcgggtgcaccacaagctgcacactggagagaagccctatgagtgcaaggaatgtgggaaggccttccgggtgcggcagcagctgaccctgcaccagaggatccacactggagagaagccctatgagtgcaaggaatgtgggaagaccttcagccggggctaccacctgatcctgcaccaccgcatccacactggagagaagccctatgagtgcaaggagtgctggaaggccttcagccgctacagccagctgatcagccaccagagcatccacatcggcgtgaagccctatgactgcaaggaatgtgggaaggccttccggctgctgagccagctgacccagcaccagagcatccacatcggggagaagccctacaagtgcaaggaatgtgggaaggccttccggctgcggcagaagctgaccctgcaccagagcatccacactggagagaagccctttgagtgcaaggagtgcaggaaggccttccggctgaacagcagcctcatccagcacctgcgcatccacagcggggagaagccctatgagtgcaaggagtgcaagaaggccttccggcagcacagccacctgacccaccacctgaagatccacaacgtgaagatctag

SEQ ID NO: 275841 - DNA, 1599 bp, Artificial Sequence
  derived and/or modified sequence
atggccctgcggagcgtgatgttcagcgacgtgagcatcgacttctctcctgaggagtgggagtatctggatctcgaacagaaagatctgtatcgggacgtgatgctcgagaactacagcaacctggtgagcctaggcctgctgctgctgtctttcatatcaaccctggagatgttattgttgttggtgaaggagaattcaatgtgcctgctctcatgcttcatcctggaccttgaaaccaagtacgaaacaaagaaactatccctcgaaaacgacatttacgaaatcaacttgagccagtggaaaatcatggaacgtatagaaaaccacgggctgaaagggctcattctgaaaaacgattgggaaagtaccggcaagattgaaggacaagaaaggccacaggaagggtactttagtagtgtgaagatgccctctgagaaagtgagcagctatcaaaagcgtacctccgttacgccacaccaaagactgcacttcgtggacaaaccctacgagtgcaaagaatgtggcaaggcttttagagtgcggcagcaacttacttttcaccacagaatccacaccggcgagaaaccatatgaatgcaaagagtgcgggatggcctttagacagactgcccacctcacgaggcatcaacgcttacattctggagagaagctgtatgaatgcaaagaatgcggggaagcctttatatgtggagccgatttacgtgttcaccagaagatgcacatcggggagaaaccgtacgagtgcaaggagtgcgggaaggcatttagagtaagaggccagctgaccctgcaccaacgcattcataccggagaaaaaccctacgtttgcaaagagtgcggcaaagctttcaggcagtacgctcacctgaccaggcaccagaagctgaatagcgccgacaggctgtacgagtgtaaggaatgtggcaaagccttcctgtgcggatcggggttacgcgtgcatcataaattgcataccggagagaagccatatgaatgcaaggaatgtggaaaagccttccgcgtgcggcaacagctaaccctgcatcaacggatccacacgggcgaaaagccatacgaatgcaaggagtgcggcaagaccttctctcgcgggtaccacctgattctacatcaccggattcacacgggggaaaaaccctatgaatgtaaggagtgctggaaagcttttagcaggtactctcagcttattagtcaccaatccatacacatcggcgtgaaaccttacgactgcaaggaatgcggaaaggctttcagacttttatcacagttgacacagcaccagagtatccatatcggggagaagccctacaaatgcaaggagtgcggaaaggcgttcaggctgcgccaaaaattgacactgcaccagtcgatccacacgggggaaaaacctttcgagtgcaaagaatgcaggaaagccttccgactgaacagctcacttattcaacacctgcgtatccacagtggtgaaaagccctacgagtgcaaggagtgcaaaaaggcgtttaggcaacatagtcacctgactcatcaccttaagattcacaatgtgaaaatttag

SEQ ID NO: 275842 - DNA, 1599 bp, Artificial Sequence
  derived and/or modified sequence
atggcattgaggtcggtcatgttttcagacgtgtctatagacttctctcctgaagaatgggaataccttgacctagaacagaaggatttatatcgagatgtgatgcttgaaaactacagcaacctggtgagtctcggtttactgttgctctccttcatttcaacactcgagatgttgctcctgctagttaaggaaaactctatgtgtctgctttcctgcttcatcctagatctcgagacgaagtacgagaccaagaaactgagcctggaaaacgacatctatgagatcaatctgtctcagtggaaaatcatggaacggatcgagaaccatggtctgaaagggctgatcctgaaaaacgactgggaaagcactggcaagatcgagggccaggaacgccctcaagaaggatatttttcttccgtgaaaatgcctagcgaaaaagtgagtagctaccagaagcgaacaagcgtgacccctcatcagaggctccacttcgtggataagccatacgaatgcaaagaatgcggcaaagctttccgggtgcgtcagcagctcactttccatcacagaatccataccggagaaaagccatacgaatgtaaagagtgcgggatggccttccgtcagacggcccatctcacacgccaccagcgtctacattctggggagaagctctacgaatgcaaggagtgcggagaagcgttcatttgtggagctgatctacgtgtgcatcaaaagatgcacatcggcgaaaaaccatatgagtgtaaggagtgcgggaaggcatttagggtcaggggccaactaactctccaccaacgcatacacactggagagaaaccgtacgtgtgcaaagaatgcgggaaagcctttagacagtatgcacatctgactagacaccagaagctcaacagcgccgaccggctctatgagtgtaaggaatgcggaaaagccttcttgtgtggtagtggtttacgagtgcatcacaaattacatactggggagaaaccgtacgagtgtaaagaatgtggtaaggccttcagagtgaggcaacagctgactcttcatcaaaggatccatacgggcgagaagccttacgagtgcaaggagtgcgggaaaaccttttccagaggctaccacctgatccttcaccaccgaattcatactggcgagaaaccttatgagtgtaaagaatgctggaaggccttcagtaggtactcacaactgatctcccaccagagtattcacattggagtaaaaccatacgactgcaaggaatgtggcaaggccttccgccttctctctcagttgacacagcaccagtcaatacacataggggagaagccctataagtgcaaggagtgtggaaaagcttttagactacggcagaaactgacactccatcagtcaattcacacgggagaaaagcctttcgagtgcaaggagtgccgaaaagcctttcgcctgaactctagtttgattcaacacctgcggattcattcgggagaaaaaccctacgaatgtaaggaatgcaagaaggcttttagacaacactcgcatctgacccaccacctcaagatccacaatgttaaaatctag

SEQ ID NO: 275843 - DNA, 1842 bp, Artificial Sequence
  derived and/or modified sequence
gcgcagcccgttaggccccggggattgtggcgtgacccggcagcggcttcctccgttcgggcatcgctgtgcctcgggttcgcgccccgagtgagcagtcctggcccggagcgtcggtcctggtaatctgtaggaaaagcgctgcggcccagggggtaaagagagatcagcctctgtggactcggtgcttctcctggcaagtaaaccccaaggaggactgaccagttcttgaatttctataccatggcccttcgatcagtgatgttcagtgatgtatccatagacttctctccagaagagtgggaatacctggacttggaacaaaaggacttgtacagagatgtcatgttggagaactacagcaacttggtctcactgggattacttttgttgtcttttatttctacattagaaatgttgcttcttttagtaaaagaaaacagcatgtgtttgctttcttgttttattttagatttggagaccaagtatgagaccaagaagttatctttagaaaatgacatttatgaaataaatttatcccagtggaagataatggaaagaattgaaaaccatggccttaagggtctcattttaaaaaatgattgggaatccacaggaaaaattgaaggacaggagagacctcaagaaggatacttcagtagtgtgaaaatgccatctgaaaaggtgtcctcttaccagaaacgcacatctgttactccacatcagagacttcattttgttgataaaccctatgaatgtaaggaatgtgggaaggcgttcagagtgcgccaacagcttacttttcatcacagaattcatactggtgaaaaaccgtatgaatgtaaggaatgtgggatggccttcagacagactgcacaccttactcgacatcagagacttcattctggtgaaaaactctatgaatgtaaggaatgtggggaagctttcatatgtggtgcagatcttagagtacatcagaaaatgcatattggtgagaagccctatgaatgtaaagaatgtgggaaggcttttagggtacgaggacaacttactctgcatcagaggattcatactggtgagaaaccctatgtgtgtaaagagtgtggaaaagcctttagacagtacgcacacctgactcggcatcagaagcttaatagtgctgacaggctctatgaatgcaaagaatgtgggaaggcctttttgtgtggctctggtcttagagtacatcacaaacttcatactggtgagaaaccctatgaatgtaaggaatgcgggaaggcctttagagtgcgacaacaactaacactccatcagagaattcatactggtgagaaaccctatgaatgtaaggaatgtggaaagacctttagccgtggttatcatcttattctccatcacagaattcatactggtgaaaaaccttacgaatgtaaggaatgctggaaagcctttagtcgctactcacaacttatttcacatcagagtattcatattggtgttaagccctatgactgtaaggaatgcgggaaggccttcagactactttcacaactcacacagcatcagagtattcatattggtgagaaaccttataaatgtaaggaatgtggcaaggcctttagattgcgccaaaaacttactctacatcagagcattcatactggcgaaaaaccctttgagtgtaaggaatgtaggaaggcctttagacttaattcatcccttattcaacatctgagaattcattctggtgagaaaccctatgaatgtaaggaatgtaagaaggcctttaggcaacattcacaccttactcatcatctgaaaattcataatgtaaaaatctaa

SEQ ID NO: 275844 - protein, 980 aa, Artificial Sequence
  derived and/or modified sequence
MPAELLLLLIVAFASPSCQVLSSLRMAAILDDQTVCGRGERLALALAREQINGIIEVPAKARVEVDIFELQRDSQYETTDTMCQILPKGVVSVLGPSSSPASASTVSHICGEKEIPHIKVGPEETPRLQYLRFASVSLYPSNEDVSLAVSRILKSFNYPSASLICAKAECLLRLEELVRGFLISKETLSVRMLDDSRDPTPLLKEIRDDKVSTIIIDANASISHLILRKASELGMTSAFYKYILTTMDFPILHLDGIVEDSSNILGFSMFNTSHPFYPEFVRSLNMSWRENCEASTYLGPALSAALMFDAVHVVVSAVRELNRSQEIGVKPLACTSANIWPHGTSLMNYLRMVEYDGLTGRVEFNSKGQRTNYTLRILEKSRQGHREIGVWYSNRTLAMNATTLDINLSQTLANKTLVVTTILENPYVMRRPNFQALSGNERFEGFCVDMLRELAELLRFRYRLRLVEDGLYGAPEPNGSWTGMVGELINRKADLAVAAFTITAEREKVIDFSKPFMTLGISILYRVHMGRKPGYFSFLDPFSPAVWLFMLLAYLAVSCVLFLAARLSPYEWYNPHPCLRARPHILENQYTLGNSLWFPVGGFMQQGSEIMPRALSTRCVSGVWWAFTLIIISSYTANLAAFLTVQRMEVPVESADDLADQTNIEYGTIHAGSTMTFFQNSRYQTYQRMWNYMQSKQPSVFVKSTEEGIARVLNSRYAFLLESTMNEYHRRLNCNLTQIGGLLDTKGYGIGMPLGSPFRDEITLAILQLQENNRLEILKRKWWEGGRCPKEEDHRAKGLGMENIGGIFIVLICGLIIAVFVAVMEFIWSTRRSAESEEVSVCQEMLQELRHAVSCRKTSRSRRRRRPGGPSRALLSLRAVREMRLSNGKLYSAGAGGDAGSAHGGPQRLLDDPGPPSGARPAAPTPCTHVRVCQECRRIQALRASGAGAPPRGLGVPAEATSPPRPRPGPAGPRELAEHE

SEQ ID NO: 275845 - DNA, 2943 bp, Artificial Sequence
  derived and/or modified sequence
atgcccgctgaattgttgctcttgttgatagtggcgttcgctagcccatcttgccaggtgctgtcttctttgcggatggccgcgatcctggacgaccaaacggtctgcggcaggggagagcgtttggccttggccctggccagagagcagatcaatggcatcatagaagtgcctgccaaagctcgggttgaggtcgacatcttcgaattacagcgggacagtcagtacgagaccacagatacaatgtgtcagatcctgcctaaaggagtcgtctctgtgctgggcccctcctcgtcgccggcctccgcctctactgtgtctcatatctgcggcgaaaaggaaattccacatatcaaagtaggtccggaagaaactccccgactccagtacttgcgttttgctagcgtgagtctctatccaagtaatgaggatgtgagtctggctgttagccggatcctcaaaagcttcaactatccgtccgcatctctgatatgtgcaaaggccgagtgcctcctcagactggaggagctcgtacgaggctttctaatttccaaagagaccttatctgtgcggatgttggatgacagcagggatcctacccctttgttaaaggagattagggacgacaaagtgagcacaatcattatcgacgccaacgcctctatttcccacttgatcttgcggaaagccagcgaattgggaatgaccagcgccttctacaaatatatcttgacgacaatggacttccctattctgcatcttgatgggatcgttgaggatagctcaaacatcctgggatttagtatgttcaatacgagccaccctttttaccctgaattcgtgcgctctctgaacatgagttggcgagagaattgcgaagcctcaacatacctgggtccagcccttagcgccgccttgatgttcgacgccgtgcacgttgtcgtgagcgcagtgagggagctcaacagatcccaggagattggggtgaagccactggcctgtacatctgcgaacatatggccccatggaacttcacttatgaactacctacgcatggtggagtatgatggcttgacaggcagagtcgagttcaacagcaagggtcagcggacgaattataccttgcgtattctggaaaagtcgaggcaaggacacagggaaataggcgtgtggtattctaaccggactctggctatgaatgctaccacccttgacattaatctgtcacagaccctcgcaaataaaacattagtggttacaaccatacttgaaaacccatacgtcatgcgacgtcccaacttccaggcgttgagcggcaacgaacgctttgagggcttctgcgtcgacatgctaagggagcttgccgaactcctgaggttccggtacaggttacgactggttgaggatggactttatggcgctcctgagccaaatggcagctggaccgggatggttggcgagctgattaatcgaaaggccgatctggccgtggctgccttcacaattaccgctgagagagagaaggtcatcgacttcagtaaaccattcatgacactggggatctccatcctttaccgggtgcacatgggtagaaagcctggttatttcagctttcttgatcctttctctcctgctgtttggttgttcatgctgctggcctaccttgccgtcagctgtgtcctcttcctcgctgcccgactttccccctatgaatggtacaatccacatccctgcttacgcgcccgtccccacatactcgagaaccaatacacgctcgggaactctctttggttcccggttggaggttttatgcaacagggaagcgagatcatgccacgtgccctgtctacgcgatgcgtctctggcgtgtggtgggcctttacgttgattataatcagttcctacacggctaacctggcggcatttctgaccgtgcagcggatggaggtacccgtagaaagtgccgatgacctcgccgaccagaccaacattgagtacgggacaatccacgcgggcagcacaatgactttctttcagaacagccgctaccagacttaccaaaggatgtggaattacatgcagtcaaagcaaccttctgtgtttgtaaagtcgaccgaagagggcatcgctcgcgtcttaaactcccggtacgcctttcttctcgaaagcactatgaatgagtatcacaggaggctcaattgcaacctcacgcagatcggaggcctgctcgacaccaaggggtacggcatcggtatgccactggggagcccattcagggacgagattacgctagcgatactgcagcttcaggagaacaatagactggaaattctcaagaggaaatggtgggagggaggccgctgtccaaaagaggaagatcacagagccaaaggacttgggatggaaaatatcggaggcatctttatagtgttaatctgcgggctcattatcgctgtctttgtggcagtgatggagttcatatggagtacgagacgctccgctgagtccgaggaggtctcggtatgccaggagatgctgcaggagctaagacacgcagtatcctgcaggaaaacttctcgatcacggaggagaagaagacctggaggcccaagccgggctttactgagcttgcgcgcagtacgcgagatgcgacttagtaatggcaaattgtactctgccggcgccggaggggatgcaggctctgcgcatggcggccctcagcgtctcctcgacgacccaggccctccttcaggtgcaagacccgcagcgcccacgccatgtacacacgttcgcgtctgccaagagtgtagaaggatccaggctcttagagctagtggagctggcgctccacctcggggattgggggtgcccgcagaggctactagtccaccaaggcctcgcccaggtcctgccggaccacgtgaactggccgaacatgaatag

SEQ ID NO: 275846 - DNA, 3524 bp, Artificial Sequence
  derived and/or modified sequence
cgcggcagctgcgtccccatgaggaggggaggaagatgccggctgagctgctgctgctgctgattgttgccttcgccagccccagctgccaggtgctctcatcactgcgcatggctgcaatcctggatgatcagacagtgtgtggccgcggtgagcgtctggccttggccttggcccgggagcagatcaacgggatcatcgaggtcccagccaaggcccgagtggaagtagacatctttgagctgcagcgggacagccagtacgagaccacggacaccatgtgtcagatcttacccaaaggggttgtgtctgtccttgggccctcctctagcccagcatctgcctccaccgtgagccatatctgtggagagaaggagatcccccacatcaaggtgggtcccgaggagacaccccgccttcagtaccttcgcttcgcgtctgtcagcctgtaccccagtaacgaggacgtcagcttggcggtctcccgaatcctcaagtccttcaactacccctcggccagcctcatctgcgccaaggctgagtgcctgctgcgattggaggaactggtgcgtggcttcctcatctccaaggagacgctgtcagtgaggatgttggacgacagccgggaccccacaccactgctcaaggagatccgtgatgacaaggtgtccaccatcatcatcgacgccaacgcctccatctcccacctcatcctccgtaaggcctcggaactgggaatgacctcagcgttttacaagtacatcctcaccaccatggacttccccatcctgcatctggacggtattgtggaggactcctccaacatcctgggcttctccatgttcaacacgtcccaccccttctaccctgagtttgtccgcagcctcaacatgtcctggagggagaactgtgaagccagcacctacctgggccctgcgctgtcagccgccctgatgtttgacgccgtgcacgtggtggtgagcgctgtccgagagctgaaccgcagccaggagatcggtgtgaagcctctggcctgtacatcggccaacatttggccccacgggaccagcctcatgaactacctgcgcatggtagagtatgatgggctgaccgggcgggtcgagttcaacagcaaagggcagagaaccaactacaccctgcgcatcctagaaaagtcccggcagggccaccgtgagattggggtgtggtactctaaccgcaccctggccatgaatgccaccaccctggacatcaacctgtcgcagacactggccaacaagaccctggtggtcacaaccatcctggagaacccatacgtcatgcgccggcccaacttccaggccctgtcggggaacgaacgcttcgagggcttctgcgtggacatgctgcgggagctggccgagctgctgcgcttccgctaccgcctgcggttggtggaggatgggctgtacggggcgcccgagcccaacggctcctggacgggcatggttggcgagctcatcaaccggaaggcagacctggctgtggccgccttcaccatcacagctgagcgggagaaggtcatcgacttttccaagccctttatgaccctggggatcagcatcctctaccgagtgcacatgggccgcaagcctggctacttctccttcctggaccccttctcccctgctgtgtggctcttcatgcttcttgcctacctggctgtcagctgcgtcctgtttctggctgccaggctgagcccctatgagtggtataacccacacccatgcctgcgggcacgcccccacatcctggagaaccagtacacgctgggcaacagcctgtggtttcccgtggggggcttcatgcagcagggctcggagatcatgccccgggcgctgtccacgcgctgtgtcagcggagtctggtgggccttcaccttgatcatcatctcctcctacacggccaacctggccgccttcctcaccgtgcagcgcatggaggtgcctgtggagtcggccgatgacctggcagatcagaccaacatcgagtatggcaccatccacgccggctccaccatgaccttcttccagaattcacggtaccaaacgtaccagcgcatgtggaactacatgcagtcgaagcagcccagcgtgttcgtcaagagcacagaagagggcattgcccgcgtcctcaactcccgctacgccttcctgctcgagtccaccatgaacgaataccaccggcgcctcaactgcaacctcacccagatcgggggactcctcgacaccaagggctacggcattggcatgccgctgggctccccgttccgggatgagatcacactggccatcctgcagcttcaggagaacaaccggctggagatcctgaagcgcaagtggtgggaggggggccggtgccccaaggaggaggaccatcgagctaaaggtttgggcatggagaacattggtggcatttttatcgtgctcatctgtggcctcatcattgctgtcttcgtggcggtcatggaattcatatggtccacacggaggtcagctgagtccgaggaggtgtcggtgtgccaggagatgctgcaggagctgcgccacgccgtttcttgccgcaagacgtcgcgttcccgccggcgccgacgcccgggcggcccgagccgggccctgctgtcactgcgcgcggtccgcgagatgcgcctcagcaacggcaagctctactcggccggcgcgggcggggatgcgggcagcgcgcacgggggcccgcagcgcctcctggacgacccggggccccccagcggagcccgacccgccgcccccaccccctgcacccacgtgcgcgtctgccaggagtgccggcgcatccaggcgctgcgggcctcgggggccggcgcgcctccgcgtggcctgggcgtccccgccgaagccaccagcccgccccggccgcggcctggccccgccggcccccgggagctggcggagcacgagtgaccacgggcggggctgtgcgggcgcccggactgaccgaagggacggggcccgccccaggccccagcagtctccgctcccgcagcgggcgcgggacaggacttgtgcgccggcgccccggacgccgcgattttgcctttggttccccgcgaagtccgaggcctggctctggagcccgcctgcgccccccagtggactcgcgagagggtgccgcgggcgagaagggcgcaggaaccgaggactccaggggctggggacttcgggggcggctctgggaagcggaaagcagtcagcggagaggaccccattctgggactgctcaggctccccaagacttgacgcagccccccacgcttctggaggtggggagggcctctggacagatgggtgtcccctggtgcccctccactcttctcttcctctcttttttggggggagaaacctcggaatttctatgagacctcccccagggagggggtcagttgggcccccatccctccccttgccacatcgcagcccctgttggaataaaaaaaagaacaaaacccc

SEQ ID NO: 275847 - DNA, 2943 bp, Artificial Sequence
  derived and/or modified sequence
atgcctgctgagctgctgctgctgctgattgtggcctttgccagccccagctgccaggtgctgagcagcctgaggatggccgccatcctggatgaccagacagtgtgtggccgcggggagcggctggccctggccctggcccgggagcagatcaatggcatcatcgaggtgcctgccaaggcccgggtggaggtggacatctttgagctgcagagggacagccagtatgagaccacagacaccatgtgccagatcctgcccaagggcgtggtgtctgtgctgggccccagcagcagccctgccagcgccagcacagtgagccacatctgtggggagaaggagatcccccacatcaaggtgggccctgaggagaccccccggctgcagtacctgcgctttgcctctgtgtccctgtaccccagcaatgaagatgtgtccctggccgtgagccgcatcctgaagagcttcaactaccccagcgccagcctcatctgtgccaaggcagaatgtctgctgcggctggaggagctggtgcggggcttcctgatcagcaaggagaccctgtctgtgaggatgctggatgacagccgggaccccacccccctgctgaaggagatcagagatgacaaggtgtccaccatcatcattgatgccaatgccagcatcagccacctgatcctgaggaaggccagcgagctgggcatgaccagcgccttctacaagtacatcctgaccaccatggacttccccatcctgcacctggatggcatcgtggaggacagcagcaacatcctgggcttctccatgttcaacaccagccaccccttctacccagagtttgtgcgcagcctgaacatgtcctggagggagaactgtgaggccagcacctacctgggccctgccctgtctgctgccctgatgtttgatgctgtgcacgtggtggtgtctgctgtgcgggagctgaacagaagccaggagattggagtgaagcccctggcctgcaccagcgccaacatctggccccacggcaccagcctgatgaactacctgaggatggtggagtatgatggcctgaccggccgggtggagttcaacagcaagggccagaggaccaactacaccctgcgcatcctggagaagagccggcagggccaccgggagattggagtgtggtacagcaacagaaccctggccatgaatgccaccaccctggacatcaacctgagccagaccctggccaacaagaccctggtggtgaccaccatcctggagaacccctacgtgatgaggcggcccaacttccaggccctgtctggaaatgaaagatttgagggcttctgtgtggacatgctgcgggagctggccgagctgctgcgcttccgctaccgcctgcggctggtggaggatggcctgtatggagcccctgagcccaacggctcctggacaggcatggtgggggagctgatcaacaggaaggctgacctggccgtggccgccttcaccatcacagctgagcgggagaaggtgattgacttcagcaagcccttcatgaccctgggcatcagcatcctgtacagagtgcacatgggcaggaagccaggctacttctccttcctggaccccttcagccctgctgtgtggctgttcatgctgctggcctacctggccgtgtcctgtgtgctcttcctggccgcccggctgagcccctatgagtggtacaacccccacccctgcctgcgggcccggccccacatcctggagaaccagtacaccctgggcaacagcctgtggttccctgtgggcggcttcatgcagcagggcagcgagatcatgccccgggccctgagcacccgctgtgtgtctggagtgtggtgggccttcaccctcatcatcatcagcagctacacagccaacctggccgccttcctgactgtgcagaggatggaggtgcctgtggagagcgcagatgacctggccgaccagaccaacatcgagtatggcaccatccatgctggcagcaccatgaccttcttccagaacagccgctaccagacctaccagaggatgtggaactacatgcagagcaagcagcccagcgtgtttgtgaagagcacagaggagggcatcgcccgggtgctgaacagccgctatgccttcctgctggagagcaccatgaatgagtaccaccggcggctgaactgcaacctgacccagattggaggcctgctggacaccaagggctacggcatcggcatgcccctgggcagccccttcagagatgagatcaccctggccatcctgcagctgcaggagaacaaccggctggagatcctgaagaggaagtggtgggagggcggccgctgccccaaggaggaggaccaccgggccaagggcctgggcatggagaacatcggcggcatcttcatcgtgctgatctgtggcctcatcatcgctgtgtttgtggccgtgatggagttcatctggagcaccaggagatctgctgagagcgaggaggtgtctgtgtgccaggagatgctgcaggagctgcggcatgctgtgtcctgcaggaagaccagccgcagcagaagaagaagaagacctgggggccccagccgggccctgctgagcctgcgggctgtgcgggagatgaggctgagcaatggcaagctgtacagcgctggagctggaggagatgctggcagcgcccatggaggcccccagaggctgctggatgatcctggccccccatctggggcccggcctgctgcccccaccccctgcacccacgtgcgggtgtgccaggagtgccgccgcatccaggccctgcgggccagcggggccggggccccaccccggggcctgggcgtgcctgctgaggccaccagccccccccggccccggcccggccctgctggcccccgggagctggccgagcatgaatag

SEQ ID NO: 275848 - DNA, 2943 bp, Artificial Sequence
  derived and/or modified sequence
atgcccgccgagctgctgctgctgctgatcgtggccttcgccagccctagttgtcaagtactctcttcgctccgcatggccgcgatactggatgaccagacagtttgcgggcggggcgagagattagccttggctttagcaagagagcagattaacggcattatcgaggtacccgccaaagcccgcgtcgaggtggacatcttcgagctgcaacgggatagccaatatgagacaaccgacacaatgtgccagattcttccgaaaggagtggtatcagtgctggggccttcttcgtcaccagcctccgccagcaccgtgtcccatatatgcggagagaaggagataccacacatcaaagttgggcccgaagaaacaccaagactgcagtatctccgctttgccagtgtaagcctgtacccaagtaacgaggatgtgtctctggcggtgagcagaatcctgaaatccttcaattacccatcagcctcgctcatctgtgccaaagccgaatgtctgctgcgcctggaagaattggtgcggggcttcctcattagcaaggaaacactgagcgttagaatgctggacgattcccgggatcctaccccattgctgaaagaaatcagggacgacaaggtttctactatcatcatagatgccaatgcctccattagccacctgatccttagaaaggccagtgagctggggatgacctccgcattctacaagtacattctgacaactatggacttccccatcctgcatctggatggcatagtcgaggatagttctaatattctgggattttccatgttcaatacctctcaccctttttatcctgaattcgttaggtcactgaacatgagctggagggagaattgtgaggccagcacctacctcggacctgcccttagtgccgccctgatgtttgatgcggtgcacgtcgtggtgtctgcagtgcgcgagctcaacagatctcaggaaatcggggtcaagcctttagcctgtacaagtgccaatatatggcctcatggcacaagcttgatgaactacctgagaatggtcgaatatgacggtttaactgggcgagtcgagttcaattccaaagggcagcgtaccaactataccctgcggattctagagaaatccagacagggtcatcgcgaaatcggggtgtggtattccaatcgaactttggcgatgaatgccacaactctggatataaatttatcacaaacccttgcgaacaaaactctggtcgtaactacgattttagagaatccatatgttatgcggcgaccaaactttcaggccctgtcgggcaatgaacggttcgagggcttttgcgtagacatgttgcgtgagttggcagaactgctacgcttccgttatcggctgagactagtggaggatggcctctacggtgcgcctgagccaaatgggagctggacaggtatggtgggggagttgataaaccgtaaggcggatcttgccgtagcagcttttaccattactgctgaaagagagaaggtaatagatttcagcaagccttttatgaccctaggcatctctatcctttacagagtccatatggggcgaaagcccggatacttctctttcctggatcccttcagccccgcggtttggttgtttatgttactggcttatctggccgtgtcatgcgtccttttcctcgcagcccggctgtcaccgtacgagtggtataatccgcacccctgtctgagggcccgtccacacattcttgaaaatcagtatacactcggaaattcgctttggtttccagtaggcgggttcatgcaacaggggagtgaaataatgcccagggctctatcaacacgctgcgtgtctggcgtgtggtgggccttcactctcattattattagcagttacactgccaaccttgccgcattcctaactgtgcaacgaatggaagtcccggtggagagcgctgacgatctggcagaccagacaaatattgagtacggcacgatccacgcgggcagtaccatgacgttcttccagaattctagataccaaacctatcagcgtatgtggaactatatgcagtctaaacagccctctgtgttcgtaaagtccacagaggaaggaattgcccgggtcctgaattccagatacgccttcctgctggagagcacaatgaacgaatatcacagacggctcaattgcaaccttacccagataggaggcttgctggacaccaaagggtatggtattgggatgcccctgggctcaccttttcgagacgaaatcaccctggccatccttcagctacaggaaaataacaggcttgagatcctgaaaagaaaatggtgggaaggagggagatgtccaaaagaagaagaccatcgagctaagggactcggtatggaaaacattggcgggattttcattgtcctgatctgtggattgataatagctgtgttcgtagccgtaatggaatttatctggtctaccaggagatctgcagaatctgaggaggtctcggtgtgccaagagatgctgcaggagttaagacacgccgttagttgtaggaaaacctcccgatctcggcgcagaaggcgccccggaggcccgtcacgagcgttactgtccctgagggccgtgcgcgagatgaggctgtccaatggaaagttgtatagcgccggtgcggggggtgatgctggtagcgctcatggtggcccgcagaggctactggatgatcccggacccccaagcggagcaaggcctgccgctccgaccccttgcacccacgtaagagtctgtcaggagtgtagaaggatccaagcactgcgggcatcgggggcaggcgctcctcccagaggattgggcgttccagccgaggccactagcccccctcgacccagacccgggccggccgggccccgcgagctggcggagcatgaatag

SEQ ID NO: 275849 - DNA, 2943 bp, Artificial Sequence
  derived and/or modified sequence
atgccagctgagttattgctactgctcatcgtggcgttcgcatcaccgagctgccaagtgctatcgagcctacgtatggccgctattctcgacgaccagaccgtgtgtggaagaggggagcggttagcccttgccctggcaagggagcagatcaatggcataatcgaggttccagccaaagccagggtggaagtggacatcttcgaactacagcgtgattcccagtacgagacaaccgacacaatgtgtcaaattttacctaaaggcgttgtgagtgtactaggcccaagttcttcccccgcatcagcatcaacagtaagccatatttgcggagaaaaggagatacctcatatcaaggtcgggcctgaagagactccaaggttgcagtaccttcgcttcgcctcagtaagcctttacccttctaatgaagatgtcagccttgctgtaagcagaatcctaaagtctttcaattaccccagtgcctcactgatttgtgcaaaggctgagtgtctgcttcgattagaagaactcgtacgaggctttctgatcagcaaagaaaccctgtccgtgcggatgcttgacgacagccgtgatccgactcctcttctgaaggagatcagggacgataaggtttccacaatcattattgatgccaacgcgagtatctcgcatttaatccttcgcaaggcatccgaattgggcatgacctccgccttttacaagtacatcctaaccacaatggactttccgattctccacctggatggcattgttgaggactcttccaacattctcggattctccatgttcaatacatcgcaccccttttaccctgagttcgtaagaagcctgaacatgtcttggagggagaattgtgaggcttccacttacctgggacccgcactctctgctgcactgatgttcgatgcagtgcatgtggtcgtcagcgctgtgagagaactcaatcggagccaagagattggggtgaagcctttggcctgcacatccgcaaatatctggccccacgggacgagtctcatgaactatcttcgtatggtggaatatgatggactgaccgggagggtcgagtttaactccaaaggccagcgaaccaattatactctccggatactggagaagtcacgtcaaggccacagggagatcggggtatggtatagcaatcggacacttgcgatgaacgccacaacactcgacattaacctctcccagaccctcgccaataaaacacttgtagtgactaccatactggaaaacccttacgtgatgcgaagaccaaatttccaggctctcagcggcaacgagaggttcgaagggttctgcgtggatatgctccgggagctggccgaactcttaagattccggtatcgcctacggctcgtcgaagacggcttgtacggcgcacctgagcccaatgggtcttggactggcatggtaggagagctcatcaaccgcaaggctgacctggctgtggccgcatttaccattactgctgagcgggagaaggtcattgacttttctaagcccttcatgacactggggatatccattctgtaccgggttcacatgggcaggaagcctggctatttctctttcttggatccatttagccctgccgtttggctgtttatgcttctggcctacctggcagtgtcttgtgtgttattcctggctgccaggctcagcccatatgagtggtataaccctcacccctgtctacgggcaagaccccatatactggaaaatcagtacaccctgggcaattcactctggttccccgtagggggattcatgcagcaggggtcggaaattatgcccagggcccttagtactcgttgcgttagtggggtgtggtgggcttttacactcataattatttcctcctataccgcgaacttggccgctttcctaacagtacaacgaatggaggtgcccgtagaaagcgcagacgacctggcagaccagactaatatcgagtacggcacaatacacgccggaagcactatgaccttttttcagaactcaagataccagacttatcagcggatgtggaactatatgcaatccaagcagcccagtgtgttcgttaagtccaccgaagagggcattgccagagttctgaattctcgatatgcatttctccttgagagtaccatgaatgagtaccataggaggctgaattgtaacctgacccagatcggcggtttgctggacactaaaggatatgggataggcatgcccttgggttcccccttccgcgacgaaatcacattggcgattcttcagctgcaagagaacaatcgtctcgaaatcctgaagagaaagtggtgggagggaggaagatgccccaaagaggaagaccatcgcgctaaagggcttggcatggagaatatcgggggtatctttatcgtgctgatatgcggcctgattattgctgtgtttgtggcggttatggaattcatttggagcacgcggcgaagcgccgaatctgaagaggtgagcgtctgccaggagatgttacaagagctgcgtcacgcagtgtcctgtcgcaagacctccagatctaggaggcggagacgcccaggtgggccatcccgagccctgctctctttgcgggcagtgcgcgaaatgcgactgtcaaatgggaagctttattctgctggcgctggtggtgatgccggttcggcccatgggggtccacaacgtctgctggacgatccaggccctccatcaggagccagacctgccgcaccgaccccttgcactcacgtccgggtgtgtcaagaatgtcggcgtatacaggcccttcgcgcatcaggcgcaggcgctcctccgcgaggactgggagtcccagcggaggctacatcaccgcctagacctcgcccaggaccagctggcccacgcgaactcgctgagcatgagtag

SEQ ID NO: 275850 - DNA, 2943 bp, Artificial Sequence
  derived and/or modified sequence
atgcccgccgagctgctgctgctgctgatcgtggccttcgccagccccagctgccaggtgctgagcagcctgagaatggccgccatcctggacgaccagaccgtgtgcggcagaggcgagagactggccctggccctggccagagagcagatcaacggcatcatcgaggtgcccgccaaggccagagtggaggtggacatcttcgagctgcagagagacagccagtacgagaccaccgacaccatgtgccagatcctgcccaagggcgtggtgagcgtgctgggccccagcagcagccccgccagcgccagcaccgtgagccacatctgcggcgagaaggagatcccccacatcaaggtgggccccgaggagacccccagactgcagtacctgagattcgccagcgtgagcctgtaccccagcaacgaggacgtgagcctggccgtgagcagaatcctgaagagcttcaactaccccagcgccagcctgatctgcgccaaggccgagtgcctgctgagactggaggagctggtgagaggcttcctgatcagcaaggagaccctgagcgtgagaatgctggacgacagcagagaccccacccccctgctgaaggagatcagagacgacaaggtgagcaccatcatcatcgacgccaacgccagcatcagccacctgatcctgagaaaggccagcgagctgggcatgaccagcgccttctacaagtacatcctgaccaccatggacttccccatcctgcacctggacggcatcgtggaggacagcagcaacatcctgggcttcagcatgttcaacaccagccaccccttctaccccgagttcgtgagaagcctgaacatgagctggagagagaactgcgaggccagcacctacctgggccccgccctgagcgccgccctgatgttcgacgccgtgcacgtggtggtgagcgccgtgagagagctgaacagaagccaggagatcggcgtgaagcccctggcctgcaccagcgccaacatctggccccacggcaccagcctgatgaactacctgagaatggtggagtacgacggcctgaccggcagagtggagttcaacagcaagggccagagaaccaactacaccctgagaatcctggagaagagcagacagggccacagagagatcggcgtgtggtacagcaacagaaccctggccatgaacgccaccaccctggacatcaacctgagccagaccctggccaacaagaccctggtggtgaccaccatcctggagaacccctacgtgatgagaagacccaacttccaggccctgagcggcaacgagagattcgagggcttctgcgtggacatgctgagagagctggccgagctgctgagattcagatacagactgagactggtggaggacggcctgtacggcgcccccgagcccaacggcagctggaccggcatggtgggcgagctgatcaacagaaaggccgacctggccgtggccgccttcaccatcaccgccgagagagagaaggtgatcgacttcagcaagcccttcatgaccctgggcatcagcatcctgtacagagtgcacatgggcagaaagcccggctacttcagcttcctggaccccttcagccccgccgtgtggctgttcatgctgctggcctacctggccgtgagctgcgtgctgttcctggccgccagactgagcccctacgagtggtacaacccccacccctgcctgagagccagaccccacatcctggagaaccagtacaccctgggcaacagcctgtggttccccgtgggcggcttcatgcagcagggcagcgagatcatgcccagagccctgagcaccagatgcgtgagcggcgtgtggtgggccttcaccctgatcatcatcagcagctacaccgccaacctggccgccttcctgaccgtgcagagaatggaggtgcccgtggagagcgccgacgacctggccgaccagaccaacatcgagtacggcaccatccacgccggcagcaccatgaccttcttccagaacagcagataccagacctaccagagaatgtggaactacatgcagagcaagcagcccagcgtgttcgtgaagagcaccgaggagggcatcgccagagtgctgaacagcagatacgccttcctgctggagagcaccatgaacgagtaccacagaagactgaactgcaacctgacccagatcggcggcctgctggacaccaagggctacggcatcggcatgcccctgggcagccccttcagagacgagatcaccctggccatcctgcagctgcaggagaacaacagactggagatcctgaagagaaagtggtgggagggcggcagatgccccaaggaggaggaccacagagccaagggcctgggcatggagaacatcggcggcatcttcatcgtgctgatctgcggcctgatcatcgccgtgttcgtggccgtgatggagttcatctggagcaccagaagaagcgccgagagcgaggaggtgagcgtgtgccaggagatgctgcaggagctgagacacgccgtgagctgcagaaagaccagcagaagcagaagaagaagaagacccggcggccccagcagagccctgctgagcctgagagccgtgagagagatgagactgagcaacggcaagctgtacagcgccggcgccggcggcgacgccggcagcgcccacggcggcccccagagactgctggacgaccccggcccccccagcggcgccagacccgccgcccccaccccctgcacccacgtgagagtgtgccaggagtgcagaagaatccaggccctgagagccagcggcgccggcgccccccccagaggcctgggcgtgcccgccgaggccaccagcccccccagacccagacccggccccgccggccccagagagctggccgagcacgagtag

SEQ ID NO: 275851 - protein, 576 aa, Artificial Sequence
  derived and/or modified sequence
MSTSSLRRQMKNIVHNYSEAEIKVREATSNDPWGPSSSLMSEIADLTYNVVAFSEIMSMIWKRLNDHGKNWRHVYKAMTLMEYLIKTGSERVSQQCKENMYAVQTLKDFQYVDRDGKDQGVNVREKAKQLVALLRDEDRLREERAHALKTKEKLAQTATASSAAVGSGPPPEAEQAWPQSSGEEELQLQLALAMSKEEADQPPSCGPEDDAQLQLALSLSREEHDKEERIRRGDDLRLQMAIEESKRETGGKEESSLMDLADVFTAPAPAPTTDPWGGPAPMAAAVPTAAPTSDPWGGPPVPPAADPWGGPAPTPASGDPWRPAAPAGPSVDPWGGTPAPAAGEGPTPDPWGSSDGGVPVSGPSASDPWTPAPAFSDPWGGSPAKPSTNGTTAAGGFDTEPDEFSDFDRLRTALPTSGSSAGELELLAGEVPARSPGAFDMSGVRGSLAEAVGSPPPAATPTPTPPTRKTPESFLGPNAALVDLDSLVSRPGPTPPGAKASNPFLPGGGPATGPSVTNPFQPAPPATLTLNQLRLSPVPPVPGAPPTYISPLGGGPGLPPMMPPGPPAPNTNPFLL

SEQ ID NO: 275852 - DNA, 1731 bp, Artificial Sequence
  derived and/or modified sequence
atgtcaacatcctccctgagacgtcaaatgaaaaacattgtacacaattactctgaagcagaaataaaggtgcgtgaggcaacatcgaatgacccctggggccctagcagctcactaatgagtgagatcgccgatcttacctacaatgtagttgccttctctgagatcatgtccatgatttggaagcggctgaacgaccacggtaaaaattggcgacacgtctacaaagccatgaccttaatggagtacttgatcaagacgggcagtgagagggtgagtcaacagtgtaaagagaacatgtatgccgtgcagaccctgaaggatttccagtacgtggatagggacgggaaagatcagggagtcaacgtcagagagaaagccaaacaactggtggcccttctgagggatgaggaccgtcttcgggaggagcgcgcacatgccttaaaaactaaggagaagctggcccagacagcaaccgctagcagcgccgcggttgggtcaggccctccgcccgaagcagagcaggcctggcctcagtcctccggtgaggaggaactacaactgcagctggcactcgcaatgtccaaggaagaggcggaccaacctccaagttgcgggccagaagatgacgcccaactgcagttagcactgtctctgagtcgggaggagcatgataaggaagagagaatacggaggggcgacgatctgcggctccagatggctatcgaggagagcaagagggagactggaggcaaagaggaaagtagcctgatggaccttgccgacgtcttcacagctcccgccccggctcctaccaccgatccatggggcgggccggcgccaatggccgcagccgtccccaccgcagctccaactagtgacccctgggggggacccccagtgccccctgctgccgatccgtgggggggccccgcccccacgcctgcttctggagatccctggcgccctgcagccccggcgggcccttccgtcgacccatggggcggaacccccgcacctgcggcaggggaaggtcctacccctgatccctggggctccagcgacggcggggtccccgttagtgggccctcagccagcgacccttggactccggccccagcatttagtgatccctggggcggctcgccagccaagccaagcacaaatggaactaccgccgccgggggattcgacaccgagcctgatgagtttagtgactttgatcggttaagaaccgccttgccaaccagcggaagtagcgcaggtgagttggagctccttgccggggaggttcccgctaggtctccaggcgcgtttgacatgtccggcgttaggggctccctcgccgaggctgtgggttcacctccaccggccgctactcctactcctaccccgcccactcggaagactcctgaaagcttcttaggccccaatgcagcgctcgtcgacttggattcactggtatctagaccagggcctacacctccaggggctaaagcctctaacccctttttgcccggagggggacctgctacaggaccttccgttacgaatccattccagcctgcccctcccgcaaccctgactttaaatcaattgcgactctcacccgtgccgcctgtgccaggagcccccccgacctatataagtccgctcgggggcggcccaggtctcccacctatgatgccccccgggcctccagcgccaaacaccaacccattcttgttatag

SEQ ID NO: 275853 - DNA, 1731 bp, Artificial Sequence
  derived and/or modified sequence
atgagcaccagcagcctgcggcggcagatgaagaacatcgtgcacaactacagcgaggccgagatcaaggtgcgggaggccaccagcaatgacccctggggccccagcagcagcctgatgtctgaaattgctgacctgacctacaacgtggtggccttcagcgagatcatgtccatgatctggaagaggctgaatgaccacggcaagaactggaggcatgtgtacaaggccatgaccctgatggagtacctgatcaagacaggcagcgagcgggtgtcccagcagtgcaaggagaacatgtatgctgtgcagaccctgaaggacttccagtatgtggacagagatggcaaggaccagggcgtgaatgtgcgggagaaggccaagcagctggtggccctgctgagagatgaagatcggctgcgggaggagcgggcccacgccctgaagaccaaggagaagctggcccagacagccacagccagcagcgctgctgtgggcagcggccccccacctgaggccgagcaggcctggccccagagcagtggagaggaggagctgcagctgcagctggccctggccatgagcaaggaggaggccgaccagccccccagctgtggcccagaagatgatgcccagctgcagctggccctgagcctgagccgggaggagcatgacaaggaggagcgcatcagaagaggagatgacctgcggctgcagatggccatcgaggagagcaagcgggagactggaggcaaggaggagagcagcctgatggacctggctgatgtgttcaccgccccagccccagcccccaccacagacccctggggcggccctgcccccatggctgctgctgtgcccacagctgcccccaccagtgacccctggggcggcccccctgtgcccccagctgctgacccctggggcggccctgcccccaccccagccagcggggacccctggaggcctgctgccccagctggccccagcgtggacccctggggcggcaccccagccccagctgctggggagggccccaccccagacccctggggcagcagtgatggaggagtgcctgtgtctggccccagcgccagtgacccctggaccccagccccagccttcagtgacccctggggcggcagccctgccaagcccagcaccaacggcaccacagctgctgggggctttgacacagagccagatgagttcagtgactttgaccggctgaggacagccctgcccaccagcggcagcagcgctggggagctggagctgctggccggggaggtgcctgcccggagccctggggcctttgacatgtctggagtgcggggcagcctggccgaggccgtgggcagccccccacctgctgccacccccacccccaccccacccaccaggaagaccccagagagcttcctgggccccaatgctgccctggtggacctggacagcctggtgtccaggcctggccccaccccacctggggccaaggccagcaaccccttcctgcccggcggcggccctgccaccggccccagcgtgaccaaccccttccagcctgcccccccagccaccctgaccctgaaccagctgcggctgagccctgtgccccctgtgcctggggccccacccacctacatcagccccctgggcggcggccctggcctgccccccatgatgcctcctggccccccagcccccaacaccaaccccttcctgctgtag

SEQ ID NO: 275854 - DNA, 1731 bp, Artificial Sequence
  derived and/or modified sequence
atgagcaccagcagcctgcggcggcagatgaagaacatcgtgcacaattactccgaagctgagataaaggtgcgggaagccactagtaacgacccttggggaccgtcaagctcgctgatgtccgaaatcgccgacctcacttataacgtggtggccttcagtgaaattatgtcaatgatttggaagaggctgaacgaccacgggaaaaattggcgccatgtatataaggcgatgactctgatggaatatttgattaaaacagggtccgaacgcgtcagtcagcaatgcaaggagaatatgtacgctgtccagaccctcaaggatttccaatatgtagatcgcgacggcaaggaccagggcgtgaacgtgcgcgagaaggccaaacaactcgtcgctctgctcagggacgaggatcggttgagagaggagcgggcacacgccctcaaaacaaaggagaaactcgcacagacagccacagcttcatctgctgccgtgggcagtggtcctccacctgaagcagaacaggcttggccacagtccagcggggaggaggagctgcagcttcaacttgctctggcaatgtctaaagaggaggccgatcagccgcctagctgtggaccggaagacgacgcgcagttacagctggcgcttagccttagcagggaagaacacgacaaagaggagcggatccgaagaggggacgacctgcgcctacagatggcaatcgaagagtctaaaagagaaaccggtgggaaggaggagagctctctgatggacctagccgatgtctttaccgccccggcgcctgcccccaccacagatccctggggcggacccgcccccatggccgccgccgtacccaccgccgctcctactagcgatccctggggaggcccccctgtcccccccgctgccgacccttggggggggccggctcctacccccgcctccggagacccctggagaccagctgcacctgccgggccatccgtcgacccttggggcggtacacctgctccagctgccggtgagggtcccacccccgacccttggggcagctccgatgggggtgttcccgtgagcggaccctcagcctctgatccatggactcccgctcccgcattttccgatccctggggcggaagtcctgcgaaacctagcacaaatggaactacagccgcggggggattcgacaccgagcctgacgagttttctgactttgaccggctgcgcacagcactgcccacttctgggagctctgctggagagctcgaactgttggccggggaggtccctgccagatcccctggtgcgtttgacatgtccggcgtgcgagggtcactcgccgaggctgtgggtagcccgcctcctgccgccacgccaacaccaacccctcccacacggaagaccccggaatcttttctgggacccaatgccgcactggttgacctggacagtctggtttctcgccccggaccgacgccacccggcgccaaggctagcaacccatttctgccgggaggagggcctgctacaggaccttccgtgaccaatccattccagccagcaccaccagctacgctgaccctgaaccagctcagactttccccggtgccacctgtacccggcgctcctccgacatatatctcccccctgggcgggggaccagggctgccccccatgatgccccccggccctcctgccccgaatactaaccctttcctcctctag

SEQ ID NO: 275855 - DNA, 1731 bp, Artificial Sequence
  derived and/or modified sequence
atgagcacctctagtcttcggaggcagatgaaaaatatcgtgcacaactacagcgaggctgagatcaaggttagagaagctacctccaacgatccatggggcccttcctcctcgttaatgagcgaaatcgcagatctgacctacaacgtagtcgccttctccgaaatcatgagcatgatctggaaacggctgaacgaccacgggaaaaactggcgacacgtgtacaaggcgatgaccttgatggagtatctgattaaaaccggaagtgagagggtctctcagcagtgcaaggagaacatgtatgcggttcaaacattaaaagactttcagtatgtggaccgggatggaaaggatcagggtgtgaacgtccgggagaaagctaaacagctggtcgccttgttacgtgatgaggacaggcttagagaggaacgcgcacacgctctgaagactaaggaaaagctcgctcagaccgccacagcatcatccgctgccgttgggagcggtccaccacctgaggcagagcaggcctggccacagagctccggtgaagaggagctgcaactgcagctggctctcgccatgtccaaagaggaggccgaccagcctccctcatgcggacctgaggacgacgcgcagctccagctggccttatccctgtcaagagaagagcacgataaggaggagcggatccgccgaggagatgatctgaggctccagatggccatcgaagagagcaagagagaaacaggcggaaaggaggaatccagtctcatggacctggctgacgtgtttaccgcccctgcccctgcgccaaccaccgatccatgggggggacccgcacccatggcagccgcagtacctaccgccgcacccacatccgacccttggggcggacccccagttccacctgctgctgacccatggggaggtcctgccccaacacccgcttcaggagacccatggcgcccagcagcgccagctggcccttctgtcgatccgtggggtggtacaccggctcccgctgccggtgaaggcccaacgccagacccatggggatctagtgacggcggtgtgccagtctctgggccttcggcctctgacccttggactcccgcaccagctttttcagatccgtggggtgggtcgccagctaaacccagcaccaacggaacaaccgccgctggaggattcgacactgagccagatgagttctctgatttcgatagattgcggactgccctgcctacatccggtagcagcgctggagagctcgagctgctggctggcgaggtaccagctaggtcgcccggagcctttgatatgtccggggtgagaggaagtctggccgaagccgtcggcagcccacctcctgccgctacacccaccccaactcctcctacgcggaagacccccgaatccttcctggggccaaatgcggcactggttgaccttgactcccttgtgtcaaggccgggacctacaccgccaggagccaaagccagcaatccgttcttgccaggcggaggccctgccaccggcccaagcgttactaaccctttccaaccagccccacctgctacactgactttgaatcagctgcgtctctctcctgtccctccggtgcccggagcaccacctacgtacatctctccactcgggggtggtcctggacttccccctatgatgcccccagggccacctgctcccaacacaaatccttttctcctttag

SEQ ID NO: 275856 - DNA, 1731 bp, Artificial Sequence
  derived and/or modified sequence
atgagcaccagcagcctgagaagacagatgaagaacatcgtgcacaactacagcgaggccgagatcaaggtgagagaggccaccagcaacgacccctggggccccagcagcagcctgatgagcgagatcgccgacctgacctacaacgtggtggccttcagcgagatcatgagcatgatctggaagagactgaacgaccacggcaagaactggagacacgtgtacaaggccatgaccctgatggagtacctgatcaagaccggcagcgagagagtgagccagcagtgcaaggagaacatgtacgccgtgcagaccctgaaggacttccagtacgtggacagagacggcaaggaccagggcgtgaacgtgagagagaaggccaagcagctggtggccctgctgagagacgaggacagactgagagaggagagagcccacgccctgaagaccaaggagaagctggcccagaccgccaccgccagcagcgccgccgtgggcagcggccccccccccgaggccgagcaggcctggccccagagcagcggcgaggaggagctgcagctgcagctggccctggccatgagcaaggaggaggccgaccagccccccagctgcggccccgaggacgacgcccagctgcagctggccctgagcctgagcagagaggagcacgacaaggaggagagaatcagaagaggcgacgacctgagactgcagatggccatcgaggagagcaagagagagaccggcggcaaggaggagagcagcctgatggacctggccgacgtgttcaccgcccccgcccccgcccccaccaccgacccctggggcggccccgcccccatggccgccgccgtgcccaccgccgcccccaccagcgacccctggggcggcccccccgtgccccccgccgccgacccctggggcggccccgcccccacccccgccagcggcgacccctggagacccgccgcccccgccggccccagcgtggacccctggggcggcacccccgcccccgccgccggcgagggccccacccccgacccctggggcagcagcgacggcggcgtgcccgtgagcggccccagcgccagcgacccctggacccccgcccccgccttcagcgacccctggggcggcagccccgccaagcccagcaccaacggcaccaccgccgccggcggcttcgacaccgagcccgacgagttcagcgacttcgacagactgagaaccgccctgcccaccagcggcagcagcgccggcgagctggagctgctggccggcgaggtgcccgccagaagccccggcgccttcgacatgagcggcgtgagaggcagcctggccgaggccgtgggcagccccccccccgccgccacccccacccccaccccccccaccagaaagacccccgagagcttcctgggccccaacgccgccctggtggacctggacagcctggtgagcagacccggccccaccccccccggcgccaaggccagcaaccccttcctgcccggcggcggccccgccaccggccccagcgtgaccaaccccttccagcccgccccccccgccaccctgaccctgaaccagctgagactgagccccgtgccccccgtgcccggcgccccccccacctacatcagccccctgggcggcggccccggcctgccccccatgatgccccccggcccccccgcccccaacaccaaccccttcctgctgtag

SEQ ID NO: 275857 - DNA, 2483 bp, Artificial Sequence
  derived and/or modified sequence
gcaatttccgcttccggtccgtcgcctccttctgttgcttcccgtctcctcggcggctcccctcccccgcccggctctccgcgccccttctgggcggcggggcggcggagccgtcggcgtgcggccctccttgcgttcgtgcgtgcgcccgtggcccggcgcacgtcccgcgacaccgaggccgagcggggcagggggctgaccgccatgaccccccagagcccggcgtgagggggccgagatgcggtgacctgccagcacctgccgcagccttcgtccgggagtcgccccatctctccacgcatcggggccctgtgccccttgctgctgcagccgggcaccatgtcgacctcgtccttgaggcgccagatgaagaacatcgtccacaactactcagaggcggagatcaaggttcgagaggccacgagcaatgacccctggggcccatccagctccctcatgtcagagattgccgacctcacctacaacgttgtcgccttctcggagatcatgagcatgatctggaagcggctcaatgaccatggcaagaactggcgtcacgtttacaaggccatgacgctgatggagtacctcatcaagaccggctcggagcgcgtgtcgcagcagtgcaaggagaacatgtacgccgtgcagacgctgaaggacttccagtacgtggaccgcgacggcaaggaccagggcgtgaacgtgcgtgagaaagctaagcagctggtggccctgctgcgcgacgaggaccggctgcgggaagagcgggcgcacgcgctcaagaccaaggaaaagctggcacagaccgccacggcctcatcagcagctgtgggctcaggcccccctcccgaggcggagcaggcgtggccgcagagcagcggggaggaggagctgcagctccagctggccctggccatgagcaaggaggaggccgaccagcccccgtcctgcggccccgaggacgacgcccagctccagctggcccttagtttgagccgagaagagcatgataaggaggagcggatccgtcgcggggatgacctgcggctgcagatggcaatcgaggagagcaagagggagactgggggcaaggaggagtcgtccctcatggaccttgctgacgtcttcacggccccagctcctgccccgaccacagacccctgggggggcccagcacccatggctgctgccgtccccacggctgcccccacctcggacccctggggcggcccccctgtccctccagctgctgatccctggggaggtccagcccccacgccggcctctggggacccctggaggcctgctgcccctgcaggaccctcagttgacccttggggtgggaccccagcccctgcagctggggaggggcccacgcctgatccatggggaagttccgatggtggggtcccggtcagtgggccctcagcctccgatccctggacaccggccccggccttctcagatccctggggagggtcacctgccaagcccagcaccaatggcacaacagcagccgggggattcgacacggagcccgacgagttctctgactttgaccgactccgcacggcactgccgacctccgggagcagcgcaggagagctggagctgctggcaggagaggtgccggcccgaagccctggggcgtttgacatgagtggggtcaggggatctctggctgaggctgtgggcagccccccacctgcagccacaccaactcccacgccccccacccggaagacgccggagtcattcctggggcccaatgcagccctcgtcgacctggactcgctggtgagccggccgggccccacgccgcctggagccaaggcctccaaccccttcctgccaggcggaggcccagccactggcccttccgtcaccaaccccttccagcccgcgcctcccgcgacgctcaccctgaaccagctccgtctcagtcctgtgcctcccgtccctggagcgccacccacgtacatctctccccttggcgggggccctggcctgccccccatgatgcccccgggccccccggcccccaacactaatcccttcctcctataatccagggcggaagggggcctggctccatccggctgccccattccggctccctgggagatcagtgttgtgagtgcatgtgaaatgggggatccccacccccagtgcccttccccttcctggggcccactcacactacaccctcttcctttcccaccccacctccccggagagaaactggacatggggcctggggaggggagctggccagaggaggacccctttcccgtggcattagaagggggaggggtggctggggcccccacccattccccctccctccaaactcccaacccccagtcagtgtttgagcctcctcgttcccctcacgcacccgctcacgcaccctcggtgaatccttggtgatgattttggcaactttgggaataaatggcaattcccacgggcttggc

SEQ ID NO: 275858 - protein, 536 aa, Artificial Sequence
  derived and/or modified sequence
MSEIADLTYNVVAFSEIMSMIWKRLNDHGKNWRHVYKAMTLMEYLIKTGSERVSQQCKENMYAVQTLKDFQYVDRDGKDQGVNVREKAKQLVALLRDEDRLREERAHALKTKEKLAQTATASSAAVGSGPPPEAEQAWPQSSGEEELQLQLALAMSKEEADQPPSCGPEDDAQLQLALSLSREEHDKEERIRRGDDLRLQMAIEESKRETGGKEESSLMDLADVFTAPAPAPTTDPWGGPAPMAAAVPTAAPTSDPWGGPPVPPAADPWGGPAPTPASGDPWRPAAPAGPSVDPWGGTPAPAAGEGPTPDPWGSSDGGVPVSGPSASDPWTPAPAFSDPWGGSPAKPSTNGTTAGGFDTEPDEFSDFDRLRTALPTSGSSAGELELLAGEVPARSPGAFDMSGVRGSLAEAVGSPPPAATPTPTPPTRKTPESFLGPNAALVDLDSLVSRPGPTPPGAKASNPFLPGGGPATGPSVTNPFQPAPPATLTLNQLRLSPVPPVPGAPPTYISPLGGGPGLPPMMPPGPPAPNTNPFLL

SEQ ID NO: 275859 - DNA, 1611 bp, Artificial Sequence
  derived and/or modified sequence
atgtccgagatagcagacctgacttataatgtggtcgctttctccgagattatgagcatgatttggaaacgcttgaacgaccacggtaagaattggcgccatgtgtataaagcaatgaccttaatggagtacttgattaaaactggttcagaaagggttagccagcagtgtaaggagaatatgtatgccgtgcagacgctaaaagattttcagtacgtggatcgggatgggaaagatcaaggagtgaatgttagagagaaggcaaagcaactggtggctctgctccgagacgaagataggttgcgagaagaaagagctcacgcgctgaagaccaaggaaaagcttgctcaaaccgctactgcaagttctgccgccgttggaagtgggccaccgcccgaggcagagcaggcgtggccccagtcttcaggtgaggaggagctccaactccagctggcgcttgcaatgtccaaggaagaagctgaccagcccccatcctgcggtccggaagatgacgcccagctgcagttggcgctgagcctgagcagggaagaacatgataaagaagaacgcatcagacgcggtgatgacctcaggctgcaaatggcgattgaagaaagcaagcgggagactgggggaaaagaggagagcagtctgatggaccttgccgacgtctttactgcgccggcacccgcccctactaccgacccctggggaggtcctgcgccaatggcggctgctgttcctactgccgcccccacttcagacccttggggtggccctcccgtaccccccgcagcggatccctggggcggccccgcgcctacaccggcctctggtgacccatggcgcccagccgcccctgccggcccatctgtcgatccctggggcggcacacctgctcctgctgcaggcgaaggacccacccccgatccttggggaagcagcgacggaggcgtaccggtgtcaggaccttccgcatccgacccctggacacctgctccagctttctccgacccctggggcggaagcccagccaaaccttccactaacggaaccactgcaggcgggtttgacaccgagcctgatgaattcagcgactttgatcgcctccgcactgccctgcccacctctggaagctctgccggagaactggagctcctagccggggaagtgccagctcgctcaccgggtgccttcgatatgagtggcgtccgcgggagtttggctgaagccgtggggtcccctccacccgccgctactcccactccaactccaccaacaagaaagactccagagtcctttttaggtcccaacgctgcacttgtagaccttgattccttggtctctcgacctggaccgaccccacctggagctaaagccagtaacccattcctgccgggaggcgggcccgcaaccggcccaagcgtgaccaatccctttcagccagctcccccagctaccctgactctgaaccagttacgactttcacctgttcctcccgtccctggcgcccctcccacgtacattagccctctaggcggcgggccaggtctccctcccatgatgcctccgggacccccagctcccaatacgaacccgtttctcctgtag

SEQ ID NO: 275860 - DNA, 1611 bp, Artificial Sequence
  derived and/or modified sequence
atgtctgaaattgctgacctgacctacaacgtggtggccttcagcgagatcatgtccatgatctggaagaggctgaatgaccacggcaagaactggaggcatgtgtacaaggccatgaccctgatggagtacctgatcaagacaggcagcgagcgggtgtcccagcagtgcaaggagaacatgtatgctgtgcagaccctgaaggacttccagtatgtggacagagatggcaaggaccagggcgtgaatgtgcgggagaaggccaagcagctggtggccctgctgagagatgaggaccggctgcgggaggagcgggcccacgccctgaagaccaaggagaagctggcccagacagccacagccagcagcgctgctgtgggcagcggccccccacctgaggccgagcaggcctggccccagagcagcggggaggaggagctgcagctgcagctggccctggccatgagcaaggaggaggccgaccagccccccagctgtggcccagaagatgatgcccagctgcagctggccctgagcctgagccgggaggagcatgacaaggaggagcgcatcagaagaggagatgacctgcggctgcagatggccatcgaggagagcaagcgggagaccggcggcaaggaggagagcagcctgatggacctggctgatgtgttcaccgccccagccccagcccccaccacagacccctggggcggccctgcccccatggctgctgctgtgcccacagctgcccccaccagtgacccctggggcggcccccctgtgcccccagctgctgacccctggggcggccctgcccccaccccagccagcggggacccctggaggcctgctgccccagctggccccagcgtggacccctggggcggcaccccagccccagctgctggggagggccccaccccagacccctggggcagcagtgatggcggcgtgcctgtgtctggccccagcgccagtgacccctggaccccagccccagccttcagtgacccctggggcggcagccctgccaagcccagcaccaacggcaccacagctgggggctttgacacagagccagatgagttcagtgactttgaccggctgaggacagccctgcccaccagcggcagcagcgctggggagctggagctgctggccggggaggtgcctgcccggagccctggggcctttgacatgtctggagtgcggggcagcctggccgaggccgtgggcagccccccacctgctgccacccccacccccaccccacccaccaggaagaccccagagagcttcctgggccccaatgctgccctggtggacctggacagcctggtgtccaggcctggccccaccccacctggggccaaggccagcaaccccttcctgcccggcggcggccctgccaccggccccagcgtgaccaaccccttccagcctgcccccccagccaccctgaccctgaaccagctgcggctgagccctgtgccccctgtgcctggggccccacccacctacatcagccccctgggcggcggccctggcctgccccccatgatgcctcctggccccccagcccccaacaccaaccccttcctgctgtag

SEQ ID NO: 275861 - DNA, 1611 bp, Artificial Sequence
  derived and/or modified sequence
atgagcgagatcgccgacctgacctacaacgtggtggccttcagcgagatcatgtccatgatctggaagaggctgaacgatcacggcaagaactggaggcacgtttacaaagccatgacattgatggagtatttgatcaagacaggatccgagcgtgtgagccagcagtgcaaggagaacatgtatgcggttcaaaccctcaaagatttccagtacgtcgacagagacgggaaggatcagggtgtgaacgtgcgagaaaaagctaaacagctggtggcgctgctccgggacgaagatagactcagagaggaaagggcccatgccttgaagactaaggagaagctggcacagaccgctacggccagctctgctgccgtgggcagcggccctccccctgaggcagagcaggcttggcctcagtccagtggagaggaggagctacaattacaattggcgctggcaatgagtaaagaggaggcagaccagccaccttcgtgtggacctgaagacgatgcacagttgcagttggctctctccttgtctcgagaggagcatgacaaggaagaaaggatccgcagaggagatgatctgagactgcagatggcaatagaagagtctaagcgggagaccggaggcaaagaggagtcgagcctcatggatctggcagacgttttcacggctccagcccccgcacccacaactgacccatgggggggacctgcccccatggctgccgccgtgccaactgcagcccctacttctgatccgtggggtggaccccctgttcccccagcggcagacccgtggggaggccccgctccgacacctgcgtcgggcgatccatggcggccagctgctccggccggcccaagtgtggatccatggggaggaacaccagctcctgctgcaggcgaaggtccgacacctgatccctggggttcttcagacggcggagttccagtctctggcccctcagcatccgatccttggacgcctgctccagcgttttccgatccgtggggaggatcccctgccaagcccagcacgaatggaacaaccgcaggtggctttgataccgagccggatgaattctccgacttcgatcggttgcgcacagccttgccgacctctgggagctctgccggagaactcgagctgctggcgggcgaagtgccagcccgaagcccaggtgcctttgacatgtctggggttagaggcagcctggcagaggctgtcgggagccctcctccagcggctactcccacccctaccccaccaactcgaaaaacccccgagtcttttctcgggcccaatgccgcgctcgtggatcttgattctcttgtatcccgaccagggcccacccccccaggggcaaaagcttctaatccctttctgccaggaggcggaccggccaccgggccgtcagtgactaacccgttccagccagccccccccgcgacacttactctaaatcaactgcgcctgtctccagtgccccccgttcctggggcgcccccaacatacattagccctctcggcggtggtcctggcttaccgccaatgatgccccccggcccgccggcaccgaacactaacccatttttgctgtag

SEQ ID NO: 275862 - DNA, 1611 bp, Artificial Sequence
  derived and/or modified sequence
atgagcgaaattgccgacctcacgtacaacgtggttgcgttcagcgaaataatgtcgatgatttggaagaggctgaatgatcacggtaagaactggcggcatgtctataaggccatgacacttatggagtacctaattaaaactggttctgaaagagtgtcacaacagtgtaaggaaaatatgtacgctgtccagaccctcaaagatttccaatatgttgatagagatggtaaggatcagggggttaatgtccgtgaaaaagccaaacaactggtagccttgcttagagatgaggacagattacgtgaagaacgagcccatgcgctgaaaactaaagagaaacttgcgcaaaccgccaccgcttccagcgctgctgtgggctctggacctcctcctgaagccgagcaggcatggcctcaaagttctggcgaggaggagctgcaactccaattggctctggcgatgtcaaaagaagaggctgatcaacccccatcgtgcggacctgaagacgacgcgcaattgcagttggctctgtccctctcccgcgaggagcatgataaggaggaacgtatcagacgcggtgatgatctccgccttcagatggctattgaagaaagcaaaagggaaactggtggcaaagaggaaagcagcttgatggatcttgcggacgttttcactgccccagctcccgctcccaccaccgatccttggggaggtcccgcacctatggcagctgccgtgcctactgctgctccaacaagcgatccttgggggggaccccctgtgcccccagcagctgacccctggggcggaccagcacctactcccgcttccggagacccttggcggccagcagctcctgccggaccttctgtggatccctggggcggtactccggctcccgcagcgggagagggtccgaccccggacccatggggctcgagtgatggtggcgtccccgtgtcaggcccatccgccagcgacccttggacccctgcgccagccttttctgacccatggggcggttcgccagcgaagcctagcactaacgggactacagctggcggatttgacaccgagccggacgagttttcggacttcgacagactgaggacggcactgccaacctccggtagttctgccggagagctcgagctcctggctggagaggtccccgcacgtagccctggcgcattcgacatgtcaggagtgcggggaagtctcgccgaggccgttggctcccctcctcccgctgctactccaacacccacccccccaacgcgaaagacacccgagtccttcttgggaccaaacgctgctctagttgaccttgatagcctggtgagccggccaggtccgactccccctggggctaaggcttcgaatccgttcctccccggaggagggcctgctacaggtccttcagtgaccaacccgttccagccagctcccccagctactctgacactaaatcagctgcgcctttccccagtgccacctgtccccggagcccctcctacctatatctctcctctaggaggaggaccaggactgcctcccatgatgccgccagggccaccggcacctaataccaatccctttctactctag

SEQ ID NO: 275863 - DNA, 1611 bp, Artificial Sequence
  derived and/or modified sequence
atgagcgagatcgccgacctgacctacaacgtggtggccttcagcgagatcatgagcatgatctggaagagactgaacgaccacggcaagaactggagacacgtgtacaaggccatgaccctgatggagtacctgatcaagaccggcagcgagagagtgagccagcagtgcaaggagaacatgtacgccgtgcagaccctgaaggacttccagtacgtggacagagacggcaaggaccagggcgtgaacgtgagagagaaggccaagcagctggtggccctgctgagagacgaggacagactgagagaggagagagcccacgccctgaagaccaaggagaagctggcccagaccgccaccgccagcagcgccgccgtgggcagcggccccccccccgaggccgagcaggcctggccccagagcagcggcgaggaggagctgcagctgcagctggccctggccatgagcaaggaggaggccgaccagccccccagctgcggccccgaggacgacgcccagctgcagctggccctgagcctgagcagagaggagcacgacaaggaggagagaatcagaagaggcgacgacctgagactgcagatggccatcgaggagagcaagagagagaccggcggcaaggaggagagcagcctgatggacctggccgacgtgttcaccgcccccgcccccgcccccaccaccgacccctggggcggccccgcccccatggccgccgccgtgcccaccgccgcccccaccagcgacccctggggcggcccccccgtgccccccgccgccgacccctggggcggccccgcccccacccccgccagcggcgacccctggagacccgccgcccccgccggccccagcgtggacccctggggcggcacccccgcccccgccgccggcgagggccccacccccgacccctggggcagcagcgacggcggcgtgcccgtgagcggccccagcgccagcgacccctggacccccgcccccgccttcagcgacccctggggcggcagccccgccaagcccagcaccaacggcaccaccgccggcggcttcgacaccgagcccgacgagttcagcgacttcgacagactgagaaccgccctgcccaccagcggcagcagcgccggcgagctggagctgctggccggcgaggtgcccgccagaagccccggcgccttcgacatgagcggcgtgagaggcagcctggccgaggccgtgggcagccccccccccgccgccacccccacccccaccccccccaccagaaagacccccgagagcttcctgggccccaacgccgccctggtggacctggacagcctggtgagcagacccggccccaccccccccggcgccaaggccagcaaccccttcctgcccggcggcggccccgccaccggccccagcgtgaccaaccccttccagcccgccccccccgccaccctgaccctgaaccagctgagactgagccccgtgccccccgtgcccggcgccccccccacctacatcagccccctgggcggcggccccggcctgccccccatgatgccccccggcccccccgcccccaacaccaaccccttcctgctgtag

SEQ ID NO: 275864 - DNA, 2057 bp, Artificial Sequence
  derived and/or modified sequence
ttccggtccgtcgcctccttctgttgcttcccgtctcctcggcggctcccctcccccgcccggctctccgcgccccttctgggcggcggggcggcggagccgtcggcgtgcggccctccttgcgttcgtgcgtgcgcccgtggcccggcgcacgtcccgcgacaccgaggccgagcggggcagggggctgaccgccatgaccccccagagcccggcgtgagggggccgagatgcggtgacctgccagcacctgccgcagccttcgtccgggagtcgccccatctctccacgcatcggggccctgtgccccttgctgctgcagccgggcaccatgtcagagattgccgacctcacctacaacgttgtcgccttctcggagatcatgagcatgatctggaagcggctcaatgaccatggcaagaactggcgtcacgtttacaaggccatgacgctgatggagtacctcatcaagaccggctcggagcgcgtgtcgcagcagtgcaaggagaacatgtacgccgtgcagacgctgaaggacttccagtacgtggaccgcgacggcaaggaccagggcgtgaacgtgcgtgagaaagctaagcagctggtggccctgctgcgcgacgaggaccggctgcgggaagagcgggcgcacgcgctcaagaccaaggaaaagctggcacagaccgccacggcctcatcagcagctgtgggctcaggcccccctcccgaggcggagcaggcgtggccgcagagcagcggggaggaggagctgcagctccagctggccctggccatgagcaaggaggaggccgaccagcccccgtcctgcggccccgaggacgacgcccagctccagctggcccttagtttgagccgagaagagcatgataaggaggagcggatccgtcgcggggatgacctgcggctgcagatggcaatcgaggagagcaagagggagactgggggcaaggaggagtcgtccctcatggaccttgctgacgtcttcacggccccagctcctgccccgaccacagacccctgggggggcccagcacccatggctgctgccgtccccacggctgcccccacctcggacccctggggcggcccccctgtccctccagctgctgatccctggggaggtccagcccccacgccggcctctggggacccctggaggcctgctgcccctgcaggaccctcagttgacccttggggtgggaccccagcccctgcagctggggaggggcccacgcctgatccatggggaagttccgatggtggggtcccggtcagtgggccctcagcctccgatccctggacaccggccccggccttctcagatccctggggagggtcacctgccaagcccagcaccaatggcacaacagccgggggattcgacacggagcccgacgagttctctgactttgaccgactccgcacggcactgccgacctccgggagcagcgcaggagagctggagctgctggcaggagaggtgccggcccgaagccctggggcgtttgacatgagtggggtcaggggatctctggctgaggctgtgggcagccccccacctgcagccacaccaactcccacgccccccacccggaagacgccggagtcattcctggggcccaatgcagccctcgtcgacctggactcgctggtgagccggccgggccccacgccgcctggagccaaggcctccaaccccttcctgccaggcggaggcccagccactggcccttccgtcaccaaccccttccagcccgcgcctcccgcgacgctcaccctgaaccagctccgtctcagtcctgtgcctcccgtccctggagcgccacccacgtacatctctccccttggcgggggccctggcctgccccccatgatgcccccgggccccccggcccccaacactaatcccttcctcctataatccagggcggaagggggcctggctccatccggctgccccattccggctccctgggagatcagtgttgtgagtgcatgtgaaatgggggatccccacccccagtgcccttcccctt

SEQ ID NO: 275865 - protein, 1560 aa, Artificial Sequence [sequence omitted]

SEQ ID NO: 275866 - DNA, 4683 bp, Artificial Sequence
  derived and/or modified sequence
atggacgatgaagatggacggtgtctcttagacgtgatctgtgacccacaggctctcaacgattttctgcacggctctgagaagttggacagtgatgatttgctagacaatcccggggaagcccagtccgccttctatgaagggcctggccttcacgtgcaagaggcctctggcaaccacctgaaccccgagcctaaccagcccgcccccagcgtcgatctcgatttcctggaggatgatatcctcggtagcccagcaacggggggtggggggggcgggagtggaggcgctgaccagccatgcgatatcctacagcagtcactgcaggaagccaatattacggagcagacactggaggctgaggccgagttagacctgggcccatttcagctgcccacactccaaccggcggacgggggggcagggcctactggcgcagggggtgccgccgcagtcgcagccggcccacaggcattgtttcctgggagcactgacttgttgggcctacaggggccccctactgttcttacacatcaagcccttgtgcccccacaggatgtagttaataaagctcttagcgtccagccttttctccagcccgtcggattgggaaatgttacccttcagcccatcccaggcttgcagggccttcccaatggttctccgggcggagccacagcggcaacgctcgggctcgctcccattcaggtcgtgggtcagccagtgatggccctcaataccccaacctcccagctgttggcgaaacaggttcccgtttcagggtacttggcaagcgctgccggtccatctgagcccgtgaccctggcatctgctggggtttcccctcaaggtgccggcttggttatccagaagaacctctcagccgctgttgcaaccaccctgaatggtaactctgtcttcggtggcgccggcgcggcaagtgcgccaaccgggacgccttccgggcagcctctggccgtggcacccggtctcggctcatcaccactggttcccgcgccgaatgttatcctccatcgtacccctaccccaattcagcccaagcctgccggagtcctgccccctaagttatatcagcttactcctaaaccattcgctccagcaggggctactctgacaatccagggcgagccgggtgcattgcctcagcagcccaaggctcctcagaatctgaccttcatggccgcgggaaaggcaggacagaatgtggtgttatctggatttccagccccggccctccaagcaaacgtgtttaaacagcctcctgccacaacgaccggcgcagcgcccccacagccccccggggctttgtccaagcccatgagcgttcacctgctgaaccaggggagctccatcgtgattcccgcccaacatatgctccctggccagaaccagttcctgctgcccggagcaccagcagtgcagcttccccagcaactgagtgctcttcctgccaatgtaggtggccagatattggccgccgccgcaccccacaccggaggacaactgatcgccaacccaatcctaaccaatcagaaccttgcaggtcccctgtccttgggcccggtgctggctccccattccggagctcatagtgcgcacatcctgtctgctgcccctatccaagtcggtcaaccggccctgtttcagatgcccgtgtctcttgccgcaggatccctacccacccagtctcagcccgccccagctggtccggctgctacaacagttctgcagggcgtgacgctcccaccgtcggctgttgctatgctgaacaccccagacgggttagttcaacctgccacacccgccgccgccacaggcgaagccgctcccgtcctcacagtgcagccagcgcctcaggctcctcctgccgtatctacgccgcttcccctggggctccaacagcctcaggcgcaacagccaccgcaggctccgaccccgcaggctgccgctcccccacaggccaccacaccacagccgagcccggggttggcatccagccccgagaagatcgtgctggggcagccaccatctgcaacacccacagcaattctcacgcaggacagcctgcagatgttcttgccgcaggagcgaagccagcaaccactgtccgcggaaggtccacacctaagcgtgcccgctagcgttattgtgtcagcgcctccgccagcccaagacccagctccagccacacccgtagctaaaggtgctggactcggaccccaagcccccgactcccaagcctcaccagccccagcccctcagatcccagccgcagctccattgaagggccctggaccttccagctcgccttccctgccacatcaagcaccactgggagatagcccacacctgccctccccccatcccacaagacctcccagtagaccccccagcaggccccaaagtgtaagccggccaccctctgaaccccccctacatccttgtccccctccacaagcacccccaaccctgcctggaattttcgttatccagaatcagctaggcgtgcctcctcctgcctctaaccccgctccaacagctccaggcccacctcagcctcctcttcggccacagagtcagccccctgaaggccctttgccaccagctccacatctgcctccctcaagcacgtcttctgcagtggcctcctctagcgagactagtagcagactgccagcccctactccttctgactttcagctgcagttccctccgagccagggccctcataaatctcctaccccacctccaactctgcacctggttccagaacccgcggctcctccgcccccgccaccacgcactttccagatggttaccactcctttcccagctttgccacagcccaaagcgcttttagagagattccatcaagtccccagtggcatcatacttcagaacaaggccggcggcgcccccgctgcgcctcagacatcaacttctttgggccccttaacatctcccgcagcaagcgttctggtttctggacaggcaccatctgggacccctacagcaccctcccatgctcccgcacctgctcccatggccgcaacgggcttgccacccctactcccagctgagaacaaagctttcgccagcaacctgccaactctgaacgtggctaaggctgcaagtagcggccccggaaaacctagcgggctgcagtacgaatctaaattgagcggcttgaagaagcccccgacccttcagccctctaaggaggcatgtttcttggaacaccttcataagcatcagggcagcgtgctccatcccgactataagaccgctttcccatccttcgaggacgcactccacaggttgctaccctaccacgtatatcagggggctcttccctccccctctgactaccacaaggtcgacgaggaattcgagacagtgagcacacagctgctaaagcggactcaggcgatgttgaataagtaccgccttcttctgttggaggagagccgacgtgtgagcccaagtgctgagatggttatgatcgatcgaatgtttatacaggaggaaaagacaacacttgcactggataagcaattagctaaggaaaaaccagatgaatacgtgtcaagctccagaagcctggggcttccaattgcggcatcgtcagagggtcaccgactgccgggacacggccctctgagctcttcagctcccggggcaagcacccagcctccaccccatctgccaacaaagctggtcatccgacacgggggcgccggagggtccccttcagtgacctgggctagagcgtcatcttccctgagttccagctcaagttcctcctctgctgccagctccctcgatgccgacgaagatggtcccatgccatcaagaaatcgcccgccaattaaaacttatgaagcaaggtcccgtatcggtctgaaactgaagatcaaacaagaagcgggtctgagcaaggttgtgcacaacacagcactggatccggtgcaccagccaccaccgcctcctgccacccttaaagtggccgagcctcctccaaggccaccgcctcctcctccgccaaccggccagatgaacggaacagtggaccaccccccgccggccgcacccgagaggaaaccactaggcacagcaccccattgtccacgactgccgttgaggaaaacatatcgagagaacgtcggtggtcccggggcgcccgaaggcacacctgctggacgcgctcgcggtgggtcacctgctccgctaccagctaaagttgatgaggctacttccgggttgatcagagagcttgcggcagtggaagatgagctgtatcagagaatgctgaagggcccccctcccgagcccgctgcatccgccgcgcagggcactggcgacccagactgggaggcaccggggttacctcctgcgaagcgcagaaagagcgaaagcccagacgtggaccaggcctcattctcaagcgatagtcctcaggatgacactctaaccgaacatctccagagcgcaattgatagcattctgaacttgcaacaagctcctgggcggacaccggccccctcgtacccccacgccgcctccgcaggaactccagcttccccccctccattgcatcgtcctgaagcctatccaccgtcttcacacaacggtggcttgggcgcccgtactctaacccggtag

SEQ ID NO: 275867 - DNA, 5739 bp, Artificial Sequence
  derived and/or modified sequence
gcgcggccagagcggccggggacaggctccgaggcaggcccgacccgcctccccggcgccgccgtggctcgacggagaccagctaggctggcccccaagaggaccctttccaagtccccagctgggggccctgtgtagacctggagtggacacgcccctccttcccttcatgattcgtttgtagcgcagtggcgatggatgatgaggatgggagatgcttactagacgtgatttgtgacccacaggccctcaatgacttcttgcatggatccgagaagcttgacagtgatgacctcctggataatcccggggaggcccaaagtgccttctatgaaggtcctgggctccatgtgcaagaagcttccggcaaccacctgaacccagagcccaaccagccggcccccagtgtggacctagacttcctggaagatgacatcctgggctctcctgcgacagggggcggcggcgggggcagtgggggcgctgaccagccctgtgacatcctccagcagagcctccaagaggccaacatcacggagcagacgctggaggccgaggctgagctggacctgggtcccttccagctgcccaccctgcagcctgcggatggcggggcaggcccgacgggcgctggaggggcagcggccgtggctgcggggccccaagccctcttcccaggcagcaccgacctgctggggctgcagggcccgcctaccgtgctgacccaccaggccctggtgccgccccaggacgtggtcaacaaggccctgagtgtgcagcccttcctgcagcctgtgggcctgggcaatgtgacactgcagcccatcccgggcctccaaggcctgcccaatggcagccctgggggtgccacggcggccacactgggcctggcgcccatccaggtggtgggccagcccgtcatggcgctcaacacgcccacctcccagctcctggccaagcaggtgcccgtcagcggctacctggcctcggcggctggcccctcggagcccgtgacgctggcgtcggccggtgtctcgccacagggggctggcctggtcatccagaagaacctctcggccgctgtggccaccacgctcaatgggaactctgtgttcggaggcgcgggggccgcctcggctcccaccgggacgccctcgggacagccgctggcggtggccccaggcctcggctcgtcgccactggtcccggcgcccaacgtgatcctgcatcgcacacccacgcccatccagcccaagcccgcgggggtgctgccgcccaagctctaccagctgacgcccaagccgtttgcgcccgcgggcgccacgctcaccatccagggcgagccgggggcgctcccgcagcagcccaaggccccgcagaacctgacgttcatggcggcggggaaggcgggccagaacgtggtgctgtcgggcttccccgcgcctgcgctgcaagcgaacgtcttcaagcagccaccggccaccaccaccggagcggccccgccgcagccccccggggccctgagcaaacccatgagcgtccacctcctgaaccaaggcagcagcatcgtcatccccgcccagcacatgctgccgggccagaaccagttcctactgcctggcgccccggcggtccagctcccgcagcagctctcagccctgccggccaacgtgggcgggcagatcctggcggccgctgccccccacacaggtggacagctcatcgcgaaccccatcctcacaaaccagaacctggcgggcccactgagcctgggccccgtgttggccccccactccggggcccacagcgcgcacatcctctccgccgctcccatccaggtgggccagcctgcgctcttccagatgcccgtgtcgctggcggcgggcagcctgcccacgcagagccagccagcgcccgccgggccggccgccaccactgtcctccagggggtcaccctgccccccagcgccgtggccatgctcaacacccccgacggcctggtgcagccggccacccctgccgctgccaccggggaggccgcgcctgtcctcacggtgcagcctgccccccaggcgccccccgcggtcagcacacccctgcccctgggcctccagcagccgcaggcgcagcagcccccgcaggcccccaccccacaggccgccgccccgcctcaggccaccaccccccagcccagccctggcctggcgtctagcccggagaagatcgtcctggggcagccgccctctgccacccccacggccatcctcactcaggactccctgcagatgttcctgccccaggagaggagccagcagcccctctccgcagagggcccccacctctccgtgcctgcctcggtcatagtcagcgccccgcctcccgcccaagacccagccccagccacccccgtcgccaaaggagctggcctcggccctcaggcccccgacagccaggcttccccggctccggccccccagatcccggcagcggctccgctgaagggcccaggcccctcttcgtccccgtcactacctcaccaggcccctctgggggacagcccccacctgccctccccacaccccacccggcccccttcccgcccaccctcccggccacagagtgtgtcccgccctccctcagagccacccttgcacccttgccccccaccccaggcccccccaactctgcctggcatctttgtcatccaaaaccagctaggcgttcccccgcctgccagcaacccggcccctactgccccaggcccgccgcagccgcctctccgcccccagtcccagccgcctgagggaccgctgcccccagccccccacctccctccatcctccacctcctctgctgtggcctcctcctctgagacgtcctccaggttgccagcccctacgccatccgacttccagctccagttcccacccagccaggggccccacaagtcccccactccccctccaaccctccacctggtccctgagccggcagcaccccccccaccgcctcctcggaccttccagatggtgaccacccccttcccagcgctgccccagccgaaggctcttctcgagagatttcaccaggtgccgtccggaatcatcctccagaacaaggctgggggggcccctgccgccccgcagacctccaccagcctggggcccctcaccagccccgctgcgtctgtgctggtcagtgggcaggccccatctgggacccccactgcccccagccacgcccccgccccggcacccatggccgccacaggcctccctcctctgcttccagccgagaacaaggcttttgccagcaacctcccgaccctgaatgtggccaaggccgcttcctccgggccagggaagccctccgggctgcagtatgagagcaaactgagtggcctgaagaagccccccacgcttcagcccagcaaggaagcctgtttcctggagcatttgcacaaacaccagggctccgtcctgcaccccgactacaagacggccttcccctcctttgaggacgccctgcatcgcctcctgccctaccatgtctaccagggcgccctcccctcccccagtgactaccacaaagtggacgaggagtttgagacggtctccacgcagctgctgaaacgcacccaggccatgctcaataaatatcggctcctgctcctggaggagtcccggagggtgagcccctcagcggagatggtaatgatcgaccgaatgttcattcaggaggagaagaccacccttgccttggataaacagctggccaaggagaagccggacgagtacgtgtcttcctcccgctcgctcggcctccccatcgcagcctcttccgagggtcatcggcttcccggccacggccccctgtcgtcttcagctcccggggcctccacccagccccctccacacctgcccaccaagcttgtgatccggcacggcggggcaggcggctccccttcggtcacctgggcccgggcgtcctcctccctgtcctcctcttcctcctcctcctctgccgcctcctccttggacgccgacgaggacggccccatgccctcccgcaaccgcccgcccatcaagacctacgaggcccggagccgcatcgggctcaagctcaagatcaagcaggaagccgggctcagcaaggtcgtgcacaacacggccctggaccccgtgcaccagcccccgccaccccccgctaccctcaaggtggccgagcccccgccacggccgccaccaccaccgccgcccacgggccagatgaacggcacggtggaccacccgccgcctgccgcccccgagcgcaagcccctgggcaccgccccgcactgcccgcgcctgccactgcgcaagacctaccgcgagaacgtggggggccctggcgcgccggaggggacgcccgcaggcagggcacggggaggcagcccggcgccgctgcccgccaaagtggacgaggccaccagcgggctcatccgcgagctggcggccgtggaggacgagctgtaccagcgtatgctgaagggccccccgccagagcccgcagccagcgccgcccaaggcaccggggaccccgactgggaggcgcccgggctgccccctgccaagcggcgcaagtccgagtcgcccgacgtggaccaggccagcttctccagcgacagcccgcaggatgacacgctcaccgagcacctgcagagcgccatcgacagcatcctgaacctgcagcaggcccccggccggacgcccgcgccctcgtacccccacgctgcctcggccggcacccccgcatccccgccgcccctgcacaggcccgaggcctacccaccctccagtcacaacggtggcctcggcgccaggacgttgaccagataacaccgggccgcctccccttccccgtcccctcctcccgaagacgccgggacagtcgggtgtccgccctcagcctcctggggactcgagccggggatcccctgacggtttttcttgcctaagttatttgagtcacaaaggcctccttccctgccgcctgcttcagctgggttgctggggggtgggcgtggatttagggagggggctgtgatgtaaaacgtctcccctgccaaaggaggggcaaagtgctgtgtcagttcctgtttcttcccatttcctggcacactctgcccctctgtccgggggacacgcgcatgtgtttgccagggatggggccaccgggttgatgccaacgctccgggtgcctgtcttgtctgtgtggcttctcagatggtggagggtgctgggagctggcagggtccttccagacagtctcagcctctccccgccgcccccaacaggctgtcaaacaaaaccggagagggggtgggggagccagcctcccagcgtgctgtgcccgcaggcacccgtgtgacatccgcacgtccagctccgtgacctgtgtgtgtgtgtgtgtgcacaagtgagtgagagatttcgaacgcccacccctcgactttgaaatctgagcaaaacaagaaactggggtcttcctctcccccgaacctctccccagctagtcttccctctgttcttcctgcctccagccgcccgcgccagattttgaaatctcggagacaaaactagtactgtaagataaatttttttgtactgtatttattgtgtataacgatttttttaaaggagaattctgtacatttagaactcttgtaaattaaaaaccgatcctttttttaaaactgta

SEQ ID NO: 275868 - DNA, 4683 bp, Artificial Sequence
  derived and/or modified sequence
atggatgatgaagatggccgctgcctgctggatgtgatctgtgacccccaggccctgaatgacttcctgcacggcagcgagaagctggacagtgatgacctgctggacaaccctggagaggcccagagcgccttctatgagggccctggcctgcacgtgcaggaggccagcggcaaccacctgaaccctgagcccaaccagcctgcccccagcgtggacctggacttcctggaggatgacatcctgggcagccctgccactggaggcggcggcggcggcagcggcggcgctgaccagccctgtgacatcctgcagcagagcctgcaggaggccaacatcacagagcagaccctggaggccgaggccgagctggacctgggccccttccagctgcccaccctgcagcctgcagatggaggagctggccccaccggggccggcggcgctgctgctgtggccgccggcccccaggccctcttccctggcagcacagacctgctgggcctgcagggcccccccaccgtgctgacccaccaggccctggtgcccccccaggatgtggtgaacaaggccctgtctgtgcagcccttcctgcagcctgtgggcctgggcaatgtgaccctgcagcccatccctggcctgcagggcctgcccaacggcagccctgggggcgccacagctgccaccctgggcctggcccccatccaggtggtgggccagcctgtgatggccctgaacacccccaccagccagctgctggccaagcaggtgcctgtgtctggctacctggccagcgctgctggccccagcgagcctgtgaccctggccagcgctggggtgagcccccagggcgccggcctggtgatccagaagaacctgtctgctgctgtggccaccaccctgaatggaaattctgtgtttggaggagctggggccgccagcgcccccaccggcaccccatctggccagcccctggccgtggcccctggcctgggcagcagccccctggtgcctgccccaaatgtcatcctgcacaggacccccacccccatccagcccaagccagctggggtgctgccccccaagctgtaccagctgacccccaagccctttgccccagctggggccaccctgaccatccagggcgagcccggggccctgccccagcagcccaaggccccccagaacctgaccttcatggccgccggcaaggccggccagaatgtggtgctgagcggcttccctgccccagccctgcaggccaacgtgttcaagcagcccccagccaccaccaccggggccgccccaccccagcccccaggggccctgagcaagcccatgtctgtgcacctgctgaaccagggcagcagcatcgtcatcccagcccagcacatgctgcccggccagaaccagttcctgctgcccggggccccagctgtgcagctgccccagcagctgagcgccctgcctgccaacgtgggcggccagatcctggccgctgctgccccccacactggaggccagctgattgccaaccccatcctgaccaaccagaacctggccggccccctgagcctgggccctgtgctggccccccacagcggggcccacagcgcccacatcctgtctgctgcccccatccaggtgggccagcctgccctcttccagatgcctgtgtccctggccgccggcagcctgcccacccagagccagcctgccccagctggccctgctgccaccaccgtgctgcagggcgtgaccctgcccccatctgctgtggccatgctgaacaccccagatggcctggtgcagcctgccaccccagctgctgccaccggggaggccgcccctgtgctgactgtgcagcctgccccccaggcccccccagctgtgtccacccccctgcccctgggcctgcagcagccccaggcccagcagcccccccaggcccccaccccccaggccgccgccccaccccaggccaccaccccccagcccagccctggcctggccagcagccctgagaagatcgtgctgggccagccccccagcgccacccccacagccatcctgacccaggacagcctgcagatgttcctgccccaggagaggagccagcagcccctgtctgctgagggcccccacctgtctgtgcctgcctctgtgattgtgtctgcccctcctccagcccaggaccctgccccagccacccctgtggccaagggagctggcctgggcccccaggccccagacagccaggccagccctgccccagccccccagatcccagctgctgcccccctgaagggccctggccccagcagcagccccagcctgccccaccaggcccccctgggggacagcccccacctgcccagcccccaccccaccaggcctcccagcaggcctcccagccggccccagagcgtgtccaggcctccttctgagccccccctgcacccctgccccccaccccaggccccacccaccctgcccggcatctttgtgatccagaaccagctgggcgtgcccccaccagccagcaacccagcccccacagcccctggccccccccagccccccctgcggccccagagccagcccccagagggccccctgcccccagccccccacctgccccccagcagcaccagcagcgctgtggccagcagcagcgagaccagcagccggctgcctgcccccacccccagcgacttccagctgcagtttcctcccagccagggcccccacaagagccccaccccaccacccaccctgcacctggtgcctgagcctgctgcccctcctcctcctccacccaggaccttccagatggtgaccacccccttccctgccctgccccagcccaaggccctgctggagcgcttccaccaggtgcccagcggcatcatcctgcagaacaaggccggcggggccccagctgccccccagaccagcaccagcctgggccccctgaccagccctgctgcctctgtgctggtgtctggccaggcccccagcggcacccccacagcccccagccacgccccagccccagcccccatggccgccaccggcctgccccccctgctgcctgctgagaacaaggcctttgccagcaacctgcccaccctgaatgtggccaaggccgccagcagcggccctgggaagcccagcggcctgcagtatgagagcaagctgagcggcctgaagaagccacccaccctgcagcccagcaaggaggcctgcttcctggagcacctgcacaagcaccagggctctgtgctgcacccagactacaagacagccttccccagctttgaagatgccctgcaccggctgctgccctaccacgtgtaccagggcgccctgcccagccccagcgactaccacaaggtggatgaggagtttgaaacagtgtccacccagctgctgaagaggacccaggccatgctgaacaagtaccgcctgctgctgctggaggagagccggcgggtgagccccagcgctgagatggtgatgattgacaggatgttcatccaggaggagaagaccaccctggccctggacaagcagctggccaaggagaagccagatgaatatgtgagcagcagccgcagcctgggcctgcccatcgccgccagcagcgagggccaccggctgcccggccacggccccctgagcagcagcgcccctggggccagcacccagcccccaccccacctgcccaccaagctggtgatccgccacggcggggccggcggcagccccagcgtgacctgggcccgggccagcagcagcctgagcagcagcagcagcagcagcagcgctgccagcagcctggatgctgatgaagatggccccatgcccagcaggaacagaccacccatcaagacctatgaggcccggagccgcatcggcctgaagctgaagatcaagcaggaggccggcctgagcaaggtggtgcacaacacagccctggaccctgtgcaccagcccccacctcctccagccaccctgaaggtggccgagcccccacccaggcctcctcctcctcctccacccaccggccagatgaatggcaccgtggaccaccccccacctgctgcccctgagaggaagcccctgggcacagccccccactgcccccggctgcccctgaggaagacctacagagaaaatgtgggcggccctggggcccctgagggcaccccagctggccgggcccggggcggcagccctgcccccctgcctgccaaggtggatgaggccaccagcggcctcatccgggagctggccgctgtggaggatgagctgtaccagaggatgctgaagggccccccacctgagcctgctgccagcgctgcccagggcactggagaccctgactgggaggcccctggcctgcccccagccaagaggaggaagtctgagagcccagatgtggaccaggccagcttcagcagtgacagcccccaggatgacaccctgacagagcacctgcagagcgccatcgacagcatcctgaacctgcagcaggcccctggccgcaccccagcccccagctacccccacgccgccagcgctggcaccccagccagccccccacccctgcacaggcctgaggcctacccacccagcagccacaacggcggcctgggcgcccggaccctgaccaggtag

SEQ ID NO: 275869 - DNA, 4683 bp, Artificial Sequence
  derived and/or modified sequence
atggacgacgaggacggccggtgcctgctggacgtgatctgcgacccccaggcactgaacgactttctccacggctctgaaaagctagattccgacgaccttttagataaccctggtgaagctcagtctgccttttatgagggaccaggcctccatgttcaggaagcctcaggtaatcatctcaaccctgagccgaatcagcccgccccaagtgtcgacctcgactttttagaagatgatattttgggctctccggcaacaggtggcggagggggaggctcgggtggcgccgaccaaccttgtgacattctgcagcaatcattacaagaggccaatatcactgagcagactctcgaagctgaagctgagctggacctaggtccgttccagctgcctaccctgcagccggccgacggcggcgctggaccaaccggtgccggcggtgccgctgccgtggcggcaggtccacaggccctgttccctggcagtacagaccttctgggtctgcaggggccccctaccgtcctcacccaccaggccctcgtccccccgcaagatgttgtcaataaggccctgtccgtgcagccattcttacagccggtgggacttggtaatgtaactcttcaacccatacctggcctgcaggggcttcctaacgggagccctggaggggccactgctgccaccctcggcttggctccaatccaggtggtgggccagcctgtaatggctctgaatactccaacgagccaacttcttgctaaacaagttccagtgtccggctacctcgcctccgctgcaggcccgagcgagccagtaacactggcttcagctggtgtgtccccacagggagctgggcttgtgatacagaagaatctgagcgctgccgtggctactactctgaatggcaacagtgtgtttggaggtgctggcgcagcgtcagctccgacaggaaccccttccgggcagcctctcgctgttgcccccgggctgggatctagtcctctcgtgcctgcacccaatgttattctgcaccgtacccccacgcccatacaacctaagccagcgggtgtcttaccccccaagttgtaccagctaacccctaagccttttgctcccgcaggcgccacgttgacgatacagggagagcctggcgctctgccccaacagccgaaggcccctcaaaaccttacgttcatggccgctgggaaggctggacaaaacgttgtactctccggcttccccgcccccgctttgcaagccaacgtgttcaagcagccacctgcgacgacgaccggagccgcacccccccagcccccaggtgcactctccaagccaatgtccgtgcacctgctcaaccagggatcttccatcgtgattcccgctcaacacatgctgcctgggcaaaatcagttcctgctgcccggcgcacccgccgttcagttgccccagcaactcagcgcccttcccgccaacgttggtggccagatcctggcggcagcagcgccacatactgggggtcaactgattgctaatcctattctgacgaatcaaaatcttgcggggccgctgtcccttggacctgtgctggcaccacacagcggggcacactcagctcatattctgtctgccgctccgattcaagtcggccagccagctctgtttcagatgcccgtgtccctggcggccgggtctttgcctactcagagccagcctgcaccagccggccccgccgcaactaccgtcctccagggggtgaccctgcccccgagtgccgtagcgatgctgaatacacccgacggcctggtgcaaccggctacccctgctgccgccacgggtgaggccgcccctgtactaacggtgcagccagccccacaggcgcccccagccgtgtccacccccttgccgttaggcttgcagcagccacaggcacaacaacctccacaggcccccacgccgcaggctgccgcacctcctcaagcaactaccccacagccaagcccgggcctggcaagcagccccgaaaaaattgtcctgggtcagccacccagtgccacacctacagccattcttacccaggacagcctccagatgtttctgccccaggagcgctcacaacaaccactgtctgctgagggacctcacttatcggtccccgcctctgtgatcgtgtcggcccctcctcctgcccaggatcctgctcctgccacacccgtcgctaagggggccggcttagggccacaagcacctgatagccaagcatcccctgcccccgctccacaaatccctgccgccgctcctcttaaagggcccggcccctcaagcagcccctcactcccccaccaagcgcccctgggggattcgccacacctaccatccccacatccaacaagacctcccagccggccaccatctagaccacaatccgtttccagaccaccatccgagcctccactgcacccatgtccaccaccacaggcacctcccaccctgccagggatctttgtaatccaaaaccagctcggggtcccaccccctgcaagcaatcccgcacctacagctccaggtccccctcagcctcctctgagaccgcagtctcaacctcctgaggggcccttgcctcctgctccacatctgccaccctcaagtacatcatccgccgtggcgtcctcctctgaaacctcatccaggttgcccgcgccaacgccctccgatttccaattgcagttcccaccctctcagggcccccacaaatcacccacccccccccccacgttgcatctggtacccgagcctgcggcccctcctccgccccccccacgaactttccaaatggtcaccaccccgtttcccgcactccctcagcccaaagccctgctggaacgctttcatcaggtcccctccggaatcatactgcagaacaaagccggaggggcccccgccgcccctcaaacttccacttcgctgggccccctgacctccccagctgcgtcagtgctcgtgtcagggcaggcaccatccgggacccccacggcaccaagccatgcccccgctccagcgcccatggcggcaacaggcctgcctcctctgctacccgcggagaacaaagcattcgcctctaaccttcctaccttaaacgtggccaaggcggcgagctctgggccagggaagcctagtggcctgcagtacgaaagcaagctttccggactgaaaaaacccccaacgttacagccctcgaaggaagcttgttttctggaacatttgcataaacaccagggatctgtgctgcacccagattataagaccgccttcccttcatttgaggacgccttgcacagactgctgccgtatcatgtgtatcaaggtgctcttccaagtccaagcgattatcataaagttgatgaggagttcgaaactgtctcgacgcagctgctgaaacgcacacaggctatgctgaacaagtaccgcctgctcctgttagaggagagccggcgggtgtctccttcggccgaaatggtgatgatagatcgaatgttcatccaggaagagaagacaaccctagctctcgacaagcagttagctaaggaaaaacccgacgagtacgtttcaagctctcggtccctgggcttgcctatcgcggcatcgagtgagggacatcgcctcccgggccatggccctctgagctcctcagcacccggagcctcaacgcagccaccgcctcacctgcctacgaagctggtgattcgccacggcggagcaggcggctcacctagtgttacttgggccagagcatcctcatccctgtcatcgtcatcgagcagctcatctgcagcgagctccctcgacgccgacgaggacggtcctatgccaagtcgcaataggcctccaatcaaaacttacgaggctaggtctaggattggcctgaaactaaagatcaagcaggaagccggcctgagtaaggtggtgcataacactgctcttgaccccgtacaccaaccacctcccccaccggcaaccttgaaggtggcagaaccccctccaaggccaccaccacctccgcctcccacgggccagatgaacgggacagtggatcatccaccccctgcggcacccgagaggaagccactcgggactgccccccattgcccccggttgcctttaaggaagacctatagagagaacgtcggaggacccggagcacccgagggtacaccggctggtagggcgcgcgggggttcacccgcgcccctgcccgctaaggtggacgaggctacatcaggtcttataagggagctagccgcagtggaagatgaactatatcagcggatgttaaaggggcctccacctgaacccgctgcttctgcggcccagggcactggcgaccccgactgggaagcgccagggctgccgcccgccaagaggaggaaatcggaatctcctgatgtggaccaagcctcattttcatccgatagtcctcaggacgacaccctaactgagcacctccagtctgccatagactccatactaaacctgcagcaggctccaggtcgaactcccgcaccctcatatccccacgcagcttccgctgggacaccagcgagtccccccccattgcatagacctgaagcgtaccccccctcttcccataatggggggctgggcgccaggaccctgacacggtag

SEQ ID NO: 275870 - DNA, 4683 bp, Artificial Sequence
  derived and/or modified sequence
atggatgatgaggatggcagatgtttgctcgacgtgatctgcgatccacaggcgctgaacgactttcttcacggttccgagaagctggattctgatgatctactcgacaacccaggggaggcacagtctgctttttacgagggacctggcttgcacgtccaagaggcatccgggaatcacctcaatcccgagcccaaccagcctgccccttcagtggatcttgatttcctggaggacgacattcttggttctcccgctaccggcggaggcggagggggttcaggtggagccgaccagccctgcgatatcctgcagcaaagtcttcaagaggccaatataactgagcagactttggaagctgaggcagagctggacctgggacctttccagcttcccacactccagcccgctgacggcggagcaggtccaactggggctggcggagctgctgcggtggcagctgggcctcaggccctgtttcctgggtcaacggatctcctgggtctccaagggccaccaaccgtactcactcaccaggccctcgttccaccccaggacgtagtcaataaggccttgtcagtccagccctttcttcagccagttgggctggggaacgtaaccctgcaaccaatcccaggactacaagggctaccaaatggatcgccagggggagcaacagctgccacattagggctcgcacctattcaagtggtgggtcaacccgttatggctttaaacacccccacatctcaactactcgcaaagcaagtgcctgtgagtgggtatctggcctccgctgccggacccagcgagcctgtgactcttgcatcggccggagtgtcccctcagggggctgggctggttatccagaagaatctctccgctgccgtggccacgaccctcaatggtaactcagtgttcggaggagctggggctgccagcgcacccacaggaactccctccggacagcctctcgccgtagctcctggattagggagctcccctctcgtaccggcacccaatgttattcttcaccggacccctacccctatccagcctaagcccgctggcgttctacctcctaagctgtaccagttgaccccaaaaccattcgcgccagctggcgctactctgaccatacagggcgaaccgggtgcgttaccccagcaacctaaggcaccacagaatcttacatttatggccgctgggaaggcgggacagaatgtagtgctgagcggcttccctgcaccggcactgcaagccaacgtcttcaaacagccccctgctacaaccacgggcgctgccccacctcaaccaccaggagccctgtccaagcctatgagtgtgcatcttctaaatcagggtagcagtattgtgattcctgcacagcatatgttacccggacagaaccagtttctgttgcctggtgcccctgcggtgcaacttccgcagcagctaagcgctcttcctgcgaacgtaggcggacaaattctggccgctgccgctccccacacggggggtcagctgattgcaaatcctatcttgaccaatcagaacctcgccggaccgctctctctgggtcccgtgttggctccacactccggtgcacatagcgcccacatcctgtcggccgctcccattcaagtaggacagccagcactgttccagatgccggtaagccttgccgctggaagcctgcccacacagtctcaacccgcacccgctggccctgccgctactaccgtactgcagggcgtgaccctcccaccatctgcggtagccatgctcaataccccagacggcctggtgcagcccgctacccccgctgctgccaccggagaagccgcaccagtactcaccgttcagcccgctccacaggccccaccagcagtgagcacaccattaccactagggctccagcagccccaggcccaacagccccctcaggctcccacccctcaggctgccgctcctccccaggcaaccacaccccagcctagtcccggtctggcgtcttcgcccgagaaaatcgtgctggggcagcctccttctgcaactcccacagcaatcctgacacaggactctttacaaatgttcctgccacaggaacgctctcagcagccactatctgcggagggaccacatcttagcgtcccagccagcgtcatcgtatccgccccacccccagctcaggaccccgctccagcaaccccagtggctaaaggggctgggctgggtccccaggctccagacagccaagcttctccagcccctgcgcctcagattccagccgctgccccactgaagggccctggtccctcaagcagcccaagtctcccccatcaggcacccctaggggactcccctcacctgccttctccacaccccacacgcccaccaagtaggcctccctcgaggccacagagcgttagccggcctccaagcgaacctcccttgcatccatgcccgccaccacaggctccccctacactgcccggaatcttcgtgatccagaatcagctcggggtgcctcctccagcgagtaatcccgcacccacagctccagggcctccccagccgccattgcgcccacagagccaaccccctgaaggacccttaccccctgcaccccacctacccccatccagcacaagctcagcagtagctagctcttcggaaacgtcaagccgcctgcctgccccaacacctagcgatttccagctgcagttcccgccatcccaaggccctcacaaatctcccactccaccacccacattacacctggtccccgagccagctgcccctccccctcccccacctcggacctttcagatggttacaacaccgttcccagccctgccacagcctaaggcactgctcgaacgattccaccaggtaccttccggcattatacttcagaataaagccggtggcgctcccgctgctcctcagaccagcacttccttaggaccccttaccagccccgctgcatctgttctcgtttcaggacaggccccatcagggacacccactgcgccaagtcatgcgccagcacctgcaccaatggcggctaccggtctgcctcctctgctgccagccgagaataaggcttttgctagcaatctgcccactctcaatgtggccaaggcagctagcagtggaccaggcaagcctagtggcctgcaatacgaaagcaagttgagcggcctcaaaaagcctcccactctgcagccatctaaggaggcgtgctttttggaacatttacataaacatcaaggcagtgtgcttcatcccgactacaaaacagccttcccatcattcgaagatgccctacaccgactgctgccctaccatgtctatcaaggcgctttgccctcccctagcgattatcataaagtggacgaggaatttgagactgtgagtacccagttgctcaaacggactcaggctatgttaaacaaatataggctcctgctcctcgaggaaagccgaagagtgagcccttccgcagaaatggttatgattgatcgcatgttcattcaggaggaaaagaccacactcgccctggataaacagctcgccaaggagaaaccagatgagtatgtgagttcatctcgtagtctgggtttacccatcgcggcttcatccgagggccataggctgcctgggcacggccctctctcctcatccgcacctggcgcttcaacccagcctccgcctcacttaccgacgaagctggtaatcagacatggtggagcaggaggcagcccttctgtgacgtgggcacgcgctagcagttcgctctcgtcgagtagcagctcatcctcagctgcctccagccttgatgctgatgaggacgggccaatgccgagccggaaccggcctcctatcaaaacatatgaagctcgatctcgaattgggctaaagctcaaaatcaagcaagaagccggactttctaaagtggtacataacacggcattagacccggtgcatcaaccccctccccctccggctaccctcaaggtggcagagccccctcccaggccccctccccctccaccccctacggggcagatgaacggaacggttgaccacccacccccagccgcaccagagaggaaacccctgggtaccgcaccccattgccccaggcttcctcttagaaagacttaccgggagaatgtgggaggtcctggtgcacccgaaggcacaccagccggaagggcaagggggggttcccccgctcccttgccagcaaaggtggatgaagctacttccggtcttattagggaactggccgcagtggaggacgagctgtaccagaggatgttaaagggccctcctcctgaacccgcagctagcgccgctcagggtacaggagatcccgattgggaggcccctggcctgccgcctgcgaagcggaggaaatcagagagtccagatgtggaccaggcgtctttctccagcgatagcccgcaggacgacacactgacagaacacctccaaagtgcaatcgactctatattgaacctccagcaagcgccagggaggacaccagccccttcttaccctcatgctgcatcagccggtacccccgcttctccaccccctctgcacagaccagaggcttatcccccatcctctcacaacggcggactgggtgccagaacactcacaaggtag

SEQ ID NO: 275871 - DNA, 4683 bp, Artificial Sequence
  derived and/or modified sequence
atggacgacgaggacggcagatgcctgctggacgtgatctgcgacccccaggccctgaacgacttcctgcacggcagcgagaagctggacagcgacgacctgctggacaaccccggcgaggcccagagcgccttctacgagggccccggcctgcacgtgcaggaggccagcggcaaccacctgaaccccgagcccaaccagcccgcccccagcgtggacctggacttcctggaggacgacatcctgggcagccccgccaccggcggcggcggcggcggcagcggcggcgccgaccagccctgcgacatcctgcagcagagcctgcaggaggccaacatcaccgagcagaccctggaggccgaggccgagctggacctgggccccttccagctgcccaccctgcagcccgccgacggcggcgccggccccaccggcgccggcggcgccgccgccgtggccgccggcccccaggccctgttccccggcagcaccgacctgctgggcctgcagggcccccccaccgtgctgacccaccaggccctggtgcccccccaggacgtggtgaacaaggccctgagcgtgcagcccttcctgcagcccgtgggcctgggcaacgtgaccctgcagcccatccccggcctgcagggcctgcccaacggcagccccggcggcgccaccgccgccaccctgggcctggcccccatccaggtggtgggccagcccgtgatggccctgaacacccccaccagccagctgctggccaagcaggtgcccgtgagcggctacctggccagcgccgccggccccagcgagcccgtgaccctggccagcgccggcgtgagcccccagggcgccggcctggtgatccagaagaacctgagcgccgccgtggccaccaccctgaacggcaacagcgtgttcggcggcgccggcgccgccagcgcccccaccggcacccccagcggccagcccctggccgtggcccccggcctgggcagcagccccctggtgcccgcccccaacgtgatcctgcacagaacccccacccccatccagcccaagcccgccggcgtgctgccccccaagctgtaccagctgacccccaagcccttcgcccccgccggcgccaccctgaccatccagggcgagcccggcgccctgccccagcagcccaaggccccccagaacctgaccttcatggccgccggcaaggccggccagaacgtggtgctgagcggcttccccgcccccgccctgcaggccaacgtgttcaagcagccccccgccaccaccaccggcgccgcccccccccagccccccggcgccctgagcaagcccatgagcgtgcacctgctgaaccagggcagcagcatcgtgatccccgcccagcacatgctgcccggccagaaccagttcctgctgcccggcgcccccgccgtgcagctgccccagcagctgagcgccctgcccgccaacgtgggcggccagatcctggccgccgccgccccccacaccggcggccagctgatcgccaaccccatcctgaccaaccagaacctggccggccccctgagcctgggccccgtgctggccccccacagcggcgcccacagcgcccacatcctgagcgccgcccccatccaggtgggccagcccgccctgttccagatgcccgtgagcctggccgccggcagcctgcccacccagagccagcccgcccccgccggccccgccgccaccaccgtgctgcagggcgtgaccctgccccccagcgccgtggccatgctgaacacccccgacggcctggtgcagcccgccacccccgccgccgccaccggcgaggccgcccccgtgctgaccgtgcagcccgccccccaggccccccccgccgtgagcacccccctgcccctgggcctgcagcagccccaggcccagcagcccccccaggcccccaccccccaggccgccgcccccccccaggccaccaccccccagcccagccccggcctggccagcagccccgagaagatcgtgctgggccagccccccagcgccacccccaccgccatcctgacccaggacagcctgcagatgttcctgccccaggagagaagccagcagcccctgagcgccgagggcccccacctgagcgtgcccgccagcgtgatcgtgagcgcccccccccccgcccaggaccccgcccccgccacccccgtggccaagggcgccggcctgggcccccaggcccccgacagccaggccagccccgcccccgccccccagatccccgccgccgcccccctgaagggccccggccccagcagcagccccagcctgccccaccaggcccccctgggcgacagcccccacctgcccagcccccaccccaccagaccccccagcagaccccccagcagaccccagagcgtgagcagaccccccagcgagccccccctgcacccctgcccccccccccaggccccccccaccctgcccggcatcttcgtgatccagaaccagctgggcgtgcccccccccgccagcaaccccgcccccaccgcccccggccccccccagccccccctgagaccccagagccagccccccgagggccccctgccccccgccccccacctgccccccagcagcaccagcagcgccgtggccagcagcagcgagaccagcagcagactgcccgcccccacccccagcgacttccagctgcagttcccccccagccagggcccccacaagagccccacccccccccccaccctgcacctggtgcccgagcccgccgccccccccccccccccccccagaaccttccagatggtgaccacccccttccccgccctgccccagcccaaggccctgctggagagattccaccaggtgcccagcggcatcatcctgcagaacaaggccggcggcgcccccgccgccccccagaccagcaccagcctgggccccctgaccagccccgccgccagcgtgctggtgagcggccaggcccccagcggcacccccaccgcccccagccacgcccccgcccccgcccccatggccgccaccggcctgccccccctgctgcccgccgagaacaaggccttcgccagcaacctgcccaccctgaacgtggccaaggccgccagcagcggccccggcaagcccagcggcctgcagtacgagagcaagctgagcggcctgaagaagccccccaccctgcagcccagcaaggaggcctgcttcctggagcacctgcacaagcaccagggcagcgtgctgcaccccgactacaagaccgccttccccagcttcgaggacgccctgcacagactgctgccctaccacgtgtaccagggcgccctgcccagccccagcgactaccacaaggtggacgaggagttcgagaccgtgagcacccagctgctgaagagaacccaggccatgctgaacaagtacagactgctgctgctggaggagagcagaagagtgagccccagcgccgagatggtgatgatcgacagaatgttcatccaggaggagaagaccaccctggccctggacaagcagctggccaaggagaagcccgacgagtacgtgagcagcagcagaagcctgggcctgcccatcgccgccagcagcgagggccacagactgcccggccacggccccctgagcagcagcgcccccggcgccagcacccagccccccccccacctgcccaccaagctggtgatcagacacggcggcgccggcggcagccccagcgtgacctgggccagagccagcagcagcctgagcagcagcagcagcagcagcagcgccgccagcagcctggacgccgacgaggacggccccatgcccagcagaaacagaccccccatcaagacctacgaggccagaagcagaatcggcctgaagctgaagatcaagcaggaggccggcctgagcaaggtggtgcacaacaccgccctggaccccgtgcaccagcccccccccccccccgccaccctgaaggtggccgagcccccccccagacccccccccccccccccccccaccggccagatgaacggcaccgtggaccaccccccccccgccgcccccgagagaaagcccctgggcaccgccccccactgccccagactgcccctgagaaagacctacagagagaacgtgggcggccccggcgcccccgagggcacccccgccggcagagccagaggcggcagccccgcccccctgcccgccaaggtggacgaggccaccagcggcctgatcagagagctggccgccgtggaggacgagctgtaccagagaatgctgaagggccccccccccgagcccgccgccagcgccgcccagggcaccggcgaccccgactgggaggcccccggcctgccccccgccaagagaagaaagagcgagagccccgacgtggaccaggccagcttcagcagcgacagcccccaggacgacaccctgaccgagcacctgcagagcgccatcgacagcatcctgaacctgcagcaggcccccggcagaacccccgcccccagctacccccacgccgccagcgccggcacccccgccagccccccccccctgcacagacccgaggcctacccccccagcagccacaacggcggcctgggcgccagaaccctgaccagatag

SEQ ID NO: 275872 - protein, 293 aa, Artificial Sequence
  derived and/or modified sequence
MVGVAEVSCGQAESSEKPNAEDMTSKDYYFDSYAHFGIHEEMLKDEVRTLTYRNSMFHNRHLFKDKVVLDVGSGTGILCMFAAKAGARKVIGIECSSISDYAVKIVKANKLDHVVTIIKGKVEEVELPVEKVDIIISEWMGYCLFYESMLNTVLYARDKWLAPDGLIFPDRATLYVTAIEDRQYKDYKIHWWENVYGFDMSCIKDVAIKEPLVDVVDPKQLVTNACLIKVRGWAWPGAPWVETKERPSPGPGMGLWGPECWPEVSEPDLPARGGARGPGKTLRPLNIFVSAAV

SEQ ID NO: 275873 - protein, 209 aa, Artificial Sequence
  derived and/or modified sequence
MTSKDYYFDSYAHFGIHEEMLKDEVRTLTYRNSMFHNRHLFKDKVVLDVGSGTGILCMFAAKAGARKVIGIECSSISDYAVKIVKANKLDHVVTIIKGKVEEVELPVEKVDIIISEWMGYCLFYESMLNTVLYARDKWLAPDGLIFPDRATLYVTAIEDRQYKDYKIHWWENVYGFDMSCIKDVAIKEPLVDVVDPKQLVTNACLIKVR

SEQ ID NO: 275874 - DNA, 882 bp, Artificial Sequence
  derived and/or modified sequence
atggtgggggtcgcagaagtgagctgcgggcaagccgaatcctctgaaaaacccaacgccgaggatatgacatccaaggattattatttcgatagctatgcgcacttcgggatccacgaggagatgctgaaagatgaggtgagaaccctcacctaccgtaactcaatgtttcacaaccgtcacctgttcaaggataaggtcgtgctcgatgtgggttctggtaccggaatactgtgcatgtttgctgctaaggctggtgcgcggaaagttattggcattgagtgttcatctatctcggactacgccgtgaaaattgtgaaggccaataaactggaccacgtcgtgaccatcatcaagggaaaggtggaggaagttgagcttccggtggagaaggtggatattattatcagcgagtggatgggatactgcctgttttacgaatcaatgctgaacacggtactttacgcccgagacaaatggctggcacccgacggccttatatttcccgaccgggcaaccctgtatgtcaccgcaatcgaggatagacaatataaagattataagattcactggtgggaaaacgtatacggcttcgacatgtcatgtatcaaagacgtcgccataaaggaaccactggttgacgttgtcgaccctaagcagctcgtgaccaacgcctgtctgattaaggtccggggatgggcttggcccggagccccgtgggttgagactaaagaacgccccagccctggacccggaatggggctatggggccctgagtgctggccagaagtgagtgagccggacctacctgctcggggaggagccaggggaccagggaaaaccctcaggcccctgaacatattcgtgagtgctgctgtctag

SEQ ID NO: 275875 - DNA, 483 bp, Artificial Sequence
  derived and/or modified sequence
atgacctctaaagattattattttgattcctacgcccatttcggtattcatgaggagatgcttaaagatgaggtccgcacgttaacttaccggaattcaatgttccataatcggcacctctttaaggacaaggtggtcctagatgtgggctcggggactggtattctatgtatgttcgcagctaaagctggcgcccgcaaggtcattggaatcgagtgcagttctatttctgattatgcagttaaaatcgtaaaggcaaataagctggatcacgtggtgaccatcatcaagggtaaggtcgaagaggttgagttaccagtggagaaggtcgatatcattatctccgagtggatgggctattgcctgttctacgagagcatgctgaataccgtcctttatgccagggacaagtggctggccccagacggactcatcttccctgacagagcgacgctctatgtgactgcgattgaggatcgctag

SEQ ID NO: 275876 - DNA, 618 bp, Artificial Sequence
  derived and/or modified sequence
atgacgagcaaggattactactttgactcctatgcccatttcggcatccacgaggagatgttaaaagacgaagtccgcactctgacttacagaaattctatgtttcataaccgccatttgttcaaggataaagttgttctggatgtgggcagcggtacaggaatattatgtatgttcgccgccaaagctggtgcaaggaaggttattggaatcgagtgttcaagtataagtgattacgctgtcaaaattgtgaaggccaataaactggatcatgtggtcactattatcaaaggcaaggtggaagaggtagagctcccagttgaaaaggtcgacattatcatctccgagtggatgggttattgtcttttctatgagagcatgctgaatacggtgctttacgcaagagacaagtggcttgcgcccgacggtctgattttccccgatagagcaaccctttatgtcaccgcgatagaggaccgccaatacaaggactataaaatacattggtgggagaatgtctacggcttcgacatgagctgtattaaggatgttgctataaaagaacctctggtcgacgtagttgaccccaagcagctcgtaaccaacgcatgtctctag

SEQ ID NO: 275877 - DNA, 483 bp, Artificial Sequence
  derived and/or modified sequence
atgaccagtaaggattattactttgattcctacgcccatttcggaatacatgaagaaatgctcaaagacgaagtgcggactctgacgtaccgcaacagcatgttccacaatcgtcacttattcaaggacaaggtggtgttggacgttgggtcagggacagggatcctctgcatgtttgctgcgaaagccggagccagaaaggtgataggcattgaatgtagctccatcagtgactacgcagtgaaaatagttaaggccaacaaactggatcacgtcgtcacaattatcaagggcaaagtggaggaagtggaactccctgtggaaaaggttgatataatcatcagcgagtggatgggttattgcttgttctatgaaagtatgctcaacactgtgctgtatgcgagggataaatggctggcaccagacgggcttattttcccagaccgggcaactctctatgtgacagcaatcgaggacagatag

SEQ ID NO: 275878 - DNA, 630 bp, Artificial Sequence
  derived and/or modified sequence
atgacaagcaaagattactacttcgactcatacgcccattttggcatccatgaagagatgctgaaggacgaggtgaggacgttgacctaccgaaactccatgttccataatcgacacttgttcaaggacaaggtggtgctggacgtgggctctggcactggaattctgtgcatgttcgccgcaaaagccggtgcccgaaaggtgataggcatcgaatgctcatctataagcgattacgctgttaagatcgtgaaggcaaacaagctcgaccacgtcgtcacaatcatcaagggcaaagtcgaggaagtagaactgcccgtggaaaaagttgatatcattataagcgaatggatgggatattgtctgttctacgagagtatgctgaacaccgtactgtacgcgcgcgataagtggctcgctccggacggacttatctttccagatagagccacgttatacgtgaccgccattgaggatcgacaatacaaggactataaaatccactggtgggaaaatgtgtacggattcgatatgtcatgcattaaggatgtcgcgatcaaggagccactggtggatgtggtggatcccaagcagttagtaacaaatgcttgcctgatcaaggtgagatag

SEQ ID NO: 275879 - DNA, 882 bp, Artificial Sequence
  derived and/or modified sequence
atggtgggcgtggccgaggtgtcctgtggccaggccgagagcagcgagaagcccaatgctgaggacatgaccagcaaggactactactttgacagctatgcccacttcggcatccacgaggagatgctgaaggatgaggtgaggaccctgacctacagaaattccatgttccacaacagacacctgttcaaggacaaggtggtgctggatgtgggcagcggcaccggcatcctgtgcatgtttgctgccaaggccggggccaggaaggtgattggaattgagtgcagcagcatcagtgactatgctgtgaagatcgtgaaggccaacaagctggaccacgtggtgaccatcatcaagggcaaggtggaggaggtggagctgcctgtggagaaggtggacatcatcatcagcgagtggatgggctactgcctcttctatgagagcatgctgaacacagtgctgtatgcccgggacaagtggctggccccagatggcctcatcttcccagaccgggccaccctgtatgtgacagccatcgaggaccggcagtacaaggactacaagatccactggtgggagaatgtgtatggctttgacatgagctgcatcaaggatgtggccatcaaggagcccctggtggatgtggtggaccccaagcagctggtgaccaatgcctgcctgatcaaggtgcggggctgggcctggccaggggccccctgggtggagaccaaggagcggcccagccctggccctggcatgggcctgtggggccctgagtgctggccagaggtgtctgagccagacctgcctgcccggggcggggcccggggccctgggaagaccctgcggcccctgaacatctttgtgtctgctgctgtgtag

SEQ ID NO: 275880 - DNA, 483 bp, Artificial Sequence
  derived and/or modified sequence
atgaccagcaaggactactactttgacagctatgcccacttcggcatccacgaggagatgctgaaggatgaggtgaggaccctgacctacagaaattccatgttccacaacagacacctgttcaaggacaaggtggtgctggatgtgggcagcggcaccggcatcctgtgcatgtttgctgccaaggccggggccaggaaggtgattggaattgagtgcagcagcatcagtgactatgctgtgaagatcgtgaaggccaacaagctggaccacgtggtgaccatcatcaagggcaaggtggaggaggtggagctgcctgtggagaaggtggacatcatcatcagcgagtggatgggctactgcctcttctatgagagcatgctgaacacagtgctgtatgcccgggacaagtggctggccccagatggcctcatcttcccagaccgggccaccctgtatgtgacagccatcgaggacagatag

SEQ ID NO: 275881 - DNA, 618 bp, Artificial Sequence
  derived and/or modified sequence
atgaccagcaaggactactactttgacagctatgcccacttcggcatccacgaggagatgctgaaggatgaggtgaggaccctgacctacagaaattccatgttccacaacagacacctgttcaaggacaaggtggtgctggatgtgggcagcggcaccggcatcctgtgcatgtttgctgccaaggccggggccaggaaggtgattggaattgagtgcagcagcatcagtgactatgctgtgaagatcgtgaaggccaacaagctggaccacgtggtgaccatcatcaagggcaaggtggaggaggtggagctgcctgtggagaaggtggacatcatcatcagcgagtggatgggctactgcctcttctatgagagcatgctgaacacagtgctgtatgcccgggacaagtggctggccccagatggcctcatcttcccagaccgggccaccctgtatgtgacagccatcgaggaccggcagtacaaggactacaagatccactggtgggagaatgtgtatggctttgacatgagctgcatcaaggatgtggccatcaaggagcccctggtggatgtggtggaccccaagcagctggtgaccaatgcctgcctgtag

SEQ ID NO: 275882 - DNA, 630 bp, Artificial Sequence
  derived and/or modified sequence
atgaccagcaaggactactactttgacagctatgcccacttcggcatccacgaggagatgctgaaggatgaggtgaggaccctgacctacagaaattccatgttccacaacagacacctgttcaaggacaaggtggtgctggatgtgggcagcggcaccggcatcctgtgcatgtttgctgccaaggccggggccaggaaggtgattggaattgagtgcagcagcatcagtgactatgctgtgaagatcgtgaaggccaacaagctggaccacgtggtgaccatcatcaagggcaaggtggaggaggtggagctgcctgtggagaaggtggacatcatcatcagcgagtggatgggctactgcctcttctatgagagcatgctgaacacagtgctgtatgcccgggacaagtggctggccccagatggcctcatcttcccagaccgggccaccctgtatgtgacagccatcgaggaccggcagtacaaggactacaagatccactggtgggagaatgtgtatggctttgacatgagctgcatcaaggatgtggccatcaaggagcccctggtggatgtggtggaccccaagcagctggtgaccaatgcctgcctgatcaaggtgaggtag

SEQ ID NO: 275883 - DNA, 882 bp, Artificial Sequence
  derived and/or modified sequence
atggtgggcgtggccgaggtgagctgcggccaggccgagagcagcgagaaaccgaacgcggaagatatgacttccaaagattactacttcgatagctacgcgcattttggcatccatgaagaaatgttgaaggacgaggttcgcacactgacctacagaaattccatgtttcacaaccgccacctgttcaaggacaaggttgttctggacgtgggttctggcacggggatattatgtatgttcgccgccaaggcgggcgctcggaaagtgatcggcattgaatgtagttctatctccgactacgctgtcaagatagttaaggccaataagttggatcacgtggtgaccatcataaaaggtaaagtagaagaagtggagttgccggtggagaaagtcgatataatcatttccgaatggatggggtactgcctgttttatgaaagcatgctgaacaccgtgctgtacgcaagagacaaatggctggcacctgacgggctgatctttcccgacagagccactttgtatgttaccgccatcgaggacaggcagtataaagattacaaaattcactggtgggagaatgtgtacggctttgacatgtcctgcataaaggacgtggccattaaggaaccactggttgacgttgtggaccccaaacaactggttaccaacgcttgcctcattaaagttcgagggtgggcctggccaggagctccctgggtcgagacaaaagagaggcctagcccagggccgggcatggggctttgggggccagagtgctggccagaagtgagcgaacccgacttaccggctagagggggcgcccgaggcccagggaaaacactccggccactgaacatctttgtaagcgcagccgtgtag

SEQ ID NO: 275884 - DNA, 483 bp, Artificial Sequence
  derived and/or modified sequence
atgaccagcaaggactactacttcgacagctacgcccacttcggcatacatgaagagatgctaaaggatgaagtccgaacactgacctatcgcaacagcatgtttcataaccgtcatctcttcaaggataaagtcgtcttagacgtagggagtggcaccggaattttatgtatgtttgcagctaaagcaggagcacgaaaggtgatcgggattgaatgtagttcaattagcgactacgcggtgaaaatcgtaaaggctaataaactggaccatgttgtaaccatcataaaaggaaaggttgaagaagtagagctcccagtcgaaaaggtggacatcattatttctgagtggatgggctactgccttttctacgagtctatgctcaataccgtgctgtacgcccgagataagtggttggcccctgatggccttatttttccagaccgggccacactttacgtgactgctatcgaagaccgctag

SEQ ID NO: 275885 - DNA, 618 bp, Artificial Sequence
  derived and/or modified sequence
atgaccagcaaggactactacttcgacagctacgcccacttcggcatccacgaggagatgctgaaggacgaagtccggaccctaacatacaggaattcaatgtttcacaatagacatctttttaaagacaaggtcgtgctagatgtcggttctggaacaggtatcctctgtatgttcgctgcaaaggctggagctaggaaagtgatcgggattgagtgctcctccatatcagactacgcagtgaaaatcgtcaaagccaacaagctggaccacgtcgtgactattatcaagggtaaggtggaggaggtcgaactgcccgtcgagaaggtggacattatcatctcagaatggatgggatactgcttgttctatgagagtatgctaaacactgtcttatacgcccgagacaagtggctggcccctgatggccttatttttccagaccgtgccactctgtatgtgactgctatagaggaccgccagtataaagattacaagattcactggtgggagaacgtttacggctttgacatgagctgcataaaggacgtggcaattaaggagccgctagtcgatgtggttgacccaaagcagcttgtgaccaacgcctgcctgtag

SEQ ID NO: 275886 - DNA, 483 bp, Artificial Sequence
  derived and/or modified sequence
atgaccagcaaggactactacttcgacagctacgcccacttcggcatacatgaggagatgctaaaggatgaggtgaggacattaacatacagaaactcaatgttccacaataggcatctttttaaagacaaggttgtgctggatgtgggaagtggtaccggcatactgtgcatgttcgccgctaaggctggagcacgtaaggtaatcggtatagaatgtagcagcatatctgattacgcggtgaagattgttaaagccaacaaattggatcacgtcgtgaccatcatcaaggggaaggttgaagaggtcgaactgcccgtggagaaggtggatatcataatttccgagtggatgggatactgtttgttttacgagtctatgctcaataccgttttgtatgcacgggataaatggctggcacccgatggacttatttttcctgatcgagctaccctgtatgtgacggcaattgaggacaggtag

SEQ ID NO: 275887 - DNA, 630 bp, Artificial Sequence
  derived and/or modified sequence
atgaccagcaaggactactacttcgacagctacgcccacttcggcatacatgaagaaatgctgaaggatgaagtgcgcactctgacttaccggaattctatgtttcataacaggcatctgtttaaagataaggtggtcttagacgtaggctcgggcacagggatcctgtgcatgttcgccgctaaagcaggggcacgcaaggtcatcggcatcgagtgctcaagtatctccgattacgcggtgaaaatagtgaaagccaataaactcgatcacgtggtgaccatcataaagggtaaggttgaagaggtcgagctgccagtggagaaagtagatattattatctccgagtggatggggtactgtctgttttacgagtccatgttgaacacagtgctgtacgctagggataagtggcttgcacccgatggtctgatcttccctgatcgcgctaccttatacgttaccgccatcgaggaccggcaatacaaagactataaaatccactggtgggagaatgtgtacgggtttgacatgagttgtattaaggacgtggccattaaagagcctctggtggatgtggttgatcctaagcagctcgtgactaatgcttgcctcattaaggttcggtag

SEQ ID NO: 275888 - DNA, 882 bp, Artificial Sequence
  derived and/or modified sequence
atggttggcgttgctgaggtttcctgcgggcaggccgagtccagcgaaaaaccaaacgccgaggatatgacatctaaagattattattttgacagctacgcacactttgggattcacgaggaaatgctaaaagatgaagtacgaacgctgacctaccgaaattccatgttccataatagacatctattcaaggacaaagttgtcctggatgtcggctcaggaactgggatcctgtgcatgtttgcagcaaaagctggcgctaggaaggttatcggaattgaatgctcctcgataagtgattacgctgtgaagatagtgaaggccaataaactggaccacgtggtgaccatcattaaagggaaggtagaggaggtggagttacccgtcgaaaaggtagatattattatcagtgagtggatggggtattgcttattctacgaatccatgttgaataccgtcctgtacgcaagggataaatggctggctcctgatgggctgattttccccgaccgggcaaccctttacgttactgcgattgaggacagacagtataaagactacaaaattcactggtgggaaaacgtctacgggttcgacatgtcttgtatcaaagacgtggccattaaggagccactggtggacgttgtcgatccaaagcaattagtgaccaacgcttgtctgatcaaggtcagggggtgggcatggccaggcgctccttgggtcgaaacaaaggagcgtccctcccccggtccaggcatgggcttgtgggggccagaatgctggcctgaggtctcggagccagacttacccgcaaggggaggcgctagagggcctggcaaaacccttcgtcccctgaacatattcgtgagcgcagctgtgtag

SEQ ID NO: 275889 - DNA, 483 bp, Artificial Sequence
  derived and/or modified sequence
atgacaagcaaagattactactttgacagttatgcgcacttcgggattcacgaagagatgctaaaagatgaggtgcggaccctgacgtaccggaactcaatgttccacaatagacatctcttcaaggataaagtcgttttggatgtgggatcgggcactggaatcctgtgtatgttcgctgcaaaagccggagccaggaaggtgattggcatcgagtgcagcagtattagcgactacgctgttaaaatagttaaggctaataagttagaccatgttgttactatcatcaaaggcaaagtggaagaagtcgaattgcctgtcgagaaggtggatatcatcatttctgaatggatgggttattgccttttttacgagagcatgctaaatacagtactttatgccagagataaatggcttgctcctgatggcttgatctttcctgatagggccaccctgtatgttacggccattgaggatcgctag

SEQ ID NO: 275890 - DNA, 618 bp, Artificial Sequence
  derived and/or modified sequence
atgaccagcaaagattattatttcgatagttatgctcacttcggcatccacgaggaaatgctaaaagacgaggtgaggaccctcacgtacaggaactcaatgttccacaacagacatctgtttaaagataaagtcgtcctcgacgtcgggtccgggacgggtatcctgtgtatgttcgcggcaaaggcaggtgcgcgtaaagtcatcggtattgagtgcagttcaataagcgactatgctgttaagatcgtgaaggccaataagctcgatcatgtggtgactattattaaaggtaaggtcgaggaagtggagctgcccgtggagaaggtggatatcattatttctgagtggatgggatactgtttgttttatgaatcaatgctgaatacagtcctctatgcgagggataagtggctagcccctgacggattgatattccctgatcgggctactctctacgtcaccgctatcgaagaccggcagtacaaggactataaaattcactggtgggagaacgtgtacggatttgatatgtcttgcattaaagatgtcgcaatcaaagaaccgttggtcgatgtggtcgatccaaaacagctcgtcacaaatgcctgcctgtag

SEQ ID NO: 275891 - DNA, 483 bp, Artificial Sequence
  derived and/or modified sequence
atgaccagcaaagattattacttcgacagctatgcacactttggaattcatgaggaaatgttgaaggacgaggtgaggacccttacttaccgcaactcaatgttccacaataggcacctttttaaggataaggttgtcctcgacgtcggcagcggcaccggcatactttgcatgttcgctgccaaagctggggctcgcaaagtcataggcatcgagtgcagcagcatctctgattacgcggttaaaatcgtgaaagccaataagctggatcacgtggtgacaattataaagggaaaggtggaggaggtcgagttgcctgtagagaaggttgatattattatcagcgagtggatggggtactgcctgttctacgagagcatgttaaacacggtgctttatgcgagggataaatggctggcaccagatggactgatctttcctgacagagctactctctatgtgacagcaattgaagatcgctag

SEQ ID NO: 275892 - DNA, 630 bp, Artificial Sequence
  derived and/or modified sequence
atgacatccaaggactactatttcgactcatatgcccactttggcatacacgaggagatgttaaaagacgaagtgaggactctcacctacaggaactccatgtttcacaatagacacctttttaaagataaggtggtgctggacgttggatccggtactggaattttgtgcatgttcgccgctaaggccggagcaagaaaggtgattgggatagaatgctcctccatctccgactatgcagtgaagatcgtaaaagccaataagctcgaccatgttgttacaatcattaaggggaaggtggaagaggtcgagctaccagtcgagaaggttgatattatcatttctgaatggatggggtattgtctcttttacgaatccatgcttaacaccgtgctgtatgccagagataagtggctggccccagatggcctgatctttccggaccgggcaaccctgtacgttacagccattgaggaccgccagtataaggattataagattcattggtgggagaatgtctatggttttgatatgagctgcattaaggatgtggccataaaagaaccactggtggacgtggtcgacccgaagcagctggttaccaacgcctgcttgatcaaagttagatag

SEQ ID NO: 275893 - DNA, 1618 bp, Artificial Sequence
  derived and/or modified sequence
aagggggggtcttggcggccggaggaggagtaggtgcgggtgaagatggcggcagccgaggccgcgaactgcatcatggagaattttgtagccaccttggctaatgggatgagcctccagccgcctcttgaagaagtaacccccctttgcccttccctgtgtctgcccccattttccttcccctcccctccccagctgtgggctgagctagagacggggtcagagagactggagagatggtaggcgtggctgaggtgtcctgtggccaggcggaaagcagtgagaagcccaacgctgaggacatgacatccaaagattactactttgactcctacgcacactttggcatccacgaggagatgctgaaggacgaggtgcgcaccctcacttaccgcaactccatgtttcataaccggcacctcttcaaggacaaggtggtgctggacgtcggctcgggcaccggcatcctctgcatgtttgctgccaaggccggggcccgcaaggtcatcgggatcgagtgttccagtatctctgattatgcggtgaagatcgtcaaagccaacaagttagaccacgtggtgaccatcatcaaggggaaggtggaggaggtggagctcccagtggagaaggtggacatcatcatcagcgagtggatgggctactgcctcttctacgagtccatgctcaacaccgtgctctatgcccgggacaagtggctggcgcccgatggcctcatcttcccagaccgggccacgctgtatgtgacggccatcgaggaccggcagtacaaagactacaagatccactggtgggagaacgtgtatggcttcgacatgtcttgcatcaaagatgtggccattaaggagcccctagtggatgtcgtggaccccaaacagctggtcaccaacgcctgcctcataaaggtgagggggtgggcatggccaggtgccccctgggttgaaaccaaagagaggccatcacctggccctggcatgggactttggggcccagaatgttggcctgaggtctcagagcctgatctgccagccagaggtggtgctagaggcccaggaaagacacttcgtcctttaaatatctttgtgagcgctgctgtgtgagaaccatgcttggcacttggcttctggcggaggaaacacccaaagctggcagctaaagcccacagcccatgcacggaaaggcaggaccccagggcgatgagcggatgcacatgcacgcgggccactgcagaagagcacggggccaggctgggctccgagatgtgcctgaggtcccagctactcgggaggatcacttgggcctgggagttcaaggctgcagtgagctgtgatcacatcactgcactccagctttggtgacaatgttttgttttgttttttccttttgtttttttttacttctgagaccctgtttaaaaaaaaaaaatacggcgatgagtatttgttgagctgggatgtgtgagccgggtgaagctgggtggctgaccgggggatcctgtcggggaggagaggtggacatctataccgtcaaggtggaagacctgaccttcacctccccgttctgcctgcaagtgaagcggaatgactacgtgcacgccctg

SEQ ID NO: 275894 - DNA, 578 bp, Artificial Sequence
  derived and/or modified sequence
gagctttaccctactggagccgtttatctcccccgggtctttgtgagggtgtcctgtggccaggcggaaagcagtgagaagcccaacgctgaggacatgacatccaaagattactactttgactcctacgcacactttggcatccacgaggagatgctgaaggacgaggtgcgcaccctcacttaccgcaactccatgtttcataaccggcacctcttcaaggacaaggtggtgctggacgtcggctcgggcaccggcatcctctgcatgtttgctgccaaggccggggcccgcaaggtcatcgggatcgagtgttccagtatctctgattatgcggtgaagatcgtcaaagccaacaagttagaccacgtggtgaccatcatcaaggggaaggtggaggaggtggagctcccagtggagaaggtggacatcatcatcagcgagtggatgggctactgcctcttctacgagtccatgctcaacaccgtgctctatgcccgggacaagtggctggcgcccgatggcctcatcttcccagaccgggccacgctgtatgtgacggccatcgaggaccggca

SEQ ID NO: 275895 - DNA, 699 bp, Artificial Sequence
  derived and/or modified sequence
caaagagcgagctcattccgggattggagagaagtgtgtcctgtggccaggcggaaagcagtgagaagcccaacgctgaggacatgacatccaaagattactactttgactcctacgcacactttggcatccacgaggagatgctgaaggacgaggtgcgcaccctcacttaccgcaactccatgtttcataaccggcacctcttcaaggacaaggtggtgctggacgtcggctcgggcaccggcatcctctgcatgtttgctgccaaggccggggcccgcaaggtcatcgggatcgagtgttccagtatctctgattatgcggtgaagatcgtcaaagccaacaagttagaccacgtggtgaccatcatcaaggggaaggtggaggaggtggagctcccagtggagaaggtggacatcatcatcagcgagtggatgggctactgcctcttctacgagtccatgctcaacaccgtgctctatgcccgggacaagtggctggcgcccgatggcctcatcttcccagaccgggccacgctgtatgtgacggccatcgaggaccggcagtacaaagactacaagatccactggtgggagaacgtgtatggcttcgacatgtcttgcatcaaagatgtggccattaaggagcccctagtggatgtcgtggaccccaaacagctggtcaccaacgcctgcctca

SEQ ID NO: 275896 - DNA, 1182 bp, Artificial Sequence
  derived and/or modified sequence
agtgcagtggcgcgatctcagctcactgcaagctccgcctcccgggttcacgccatcctcctgcctaagcctccacgcccggctaattttttgtatttttagtagagacgggggtttcaccatgttagccaggatggtctcgacctcctgaccttgtgatccgcccgcctcggtctcccaaaatgctgggattacaggcgtgagccaccgcgcccggccgcctggcgtaatttttgtatttttaatagaaatgggggtttcaccatgttgcccagactggtctcgaactcctgatgtcaagtgatccgcctgcctccgcctcctaaagtgctggaattacacccgtgagccatcgcgcccgaaccctattgtaaattttaagtctcaggcgtttgccagcggcacgccagagagtatagcctgcgcggaggcccagaaaccaaagagcgagctcattccgggattggagagaagtgtgagcagagggaagtagagggatcggggagaggaggggcaggacccacgcattcggccctttgcattcagcttcattcaactaggaactttttctgcaaatcaaggaaagcttcccggaggaagtggtgcctaagctgtgctctgattcacgtttagaagctgaccagacaaagagaggtgtcctgtggccaggcggaaagcagtgagaagcccaacgctgaggacatgacatccaaagattactactttgactcctacgcacactttggcatccacgaggagatgctgaaggacgaggtgcgcaccctcacttaccgcaactccatgtttcataaccggcacctcttcaaggacaaggtggtgctggacgtcggctcgggcaccggcatcctctgcatgtttgctgccaaggccggggcccgcaaggtcatcgggatcgagtgttccagtatctctgattatgcggtgaagatcgtcaaagccaacaagttagaccacgtggtgaccatcatcaaggggaaggtggaggaggtggagctcccagtggagaaggtggacatcatcatcagcgagtggatgggctactgcctcttctacgagtccatgctcaacaccgtgctctatgcccgggacaagtggctggcgcccgatggcctcatcttcccagaccgggccacgctgtatgtgacggccatcgaggaccgg

SEQ ID NO: 275897 - DNA, 785 bp, Artificial Sequence
  derived and/or modified sequence
agagttggcaaacccctgacctatgatggacgtattctctagccaattactagacggtattctcagacgggccgcctccattgccaatgaaatcttccagcggggtcgcggtgtcctgtggccaggcggaaagcagtgagaagcccaacgctgaggacatgacatccaaagattactactttgactcctacgcacactttggcatccacgaggagatgctgaaggacgaggtgcgcaccctcacttaccgcaactccatgtttcataaccggcacctcttcaaggacaaggtggtgctggacgtcggctcgggcaccggcatcctctgcatgtttgctgccaaggccggggcccgcaaggtcatcgggatcgagtgttccagtatctctgattatgcggtgaagatcgtcaaagccaacaagttagaccacgtggtgaccatcatcaaggggaaggtggaggaggtggagctcccagtggagaaggtggacatcatcatcagcgagtggatgggctactgcctcttctacgagtccatgctcaacaccgtgctctatgcccgggacaagtggctggcgcccgatggcctcatcttcccagaccgggccacgctgtatgtgacggccatcgaggaccggcagtacaaagactacaagatccactggtgggagaacgtgtatggcttcgacatgtcttgcatcaaagatgtggccattaaggagcccctagtggatgtcgtggaccccaaacagctggtcaccaacgcctgcctcataaaggtgagg

SEQ ID NO: 275898 - DNA, 882 bp, Artificial Sequence
  derived and/or modified sequence
atggtgggcgtggccgaggtgagctgcggccaggccgagagcagcgagaagcccaacgccgaggacatgaccagcaaggactactacttcgacagctacgcccacttcggcatccacgaggagatgctgaaggacgaggtgagaaccctgacctacagaaacagcatgttccacaacagacacctgttcaaggacaaggtggtgctggacgtgggcagcggcaccggcatcctgtgcatgttcgccgccaaggccggcgccagaaaggtgatcggcatcgagtgcagcagcatcagcgactacgccgtgaagatcgtgaaggccaacaagctggaccacgtggtgaccatcatcaagggcaaggtggaggaggtggagctgcccgtggagaaggtggacatcatcatcagcgagtggatgggctactgcctgttctacgagagcatgctgaacaccgtgctgtacgccagagacaagtggctggcccccgacggcctgatcttccccgacagagccaccctgtacgtgaccgccatcgaggacagacagtacaaggactacaagatccactggtgggagaacgtgtacggcttcgacatgagctgcatcaaggacgtggccatcaaggagcccctggtggacgtggtggaccccaagcagctggtgaccaacgcctgcctgatcaaggtgagaggctgggcctggcccggcgccccctgggtggagaccaaggagagacccagccccggccccggcatgggcctgtggggccccgagtgctggcccgaggtgagcgagcccgacctgcccgccagaggcggcgccagaggccccggcaagaccctgagacccctgaacatcttcgtgagcgccgccgtgtag

SEQ ID NO: 275899 - DNA, 483 bp, Artificial Sequence
  derived and/or modified sequence
atgaccagcaaggactactacttcgacagctacgcccacttcggcatccacgaggagatgctgaaggacgaggtgagaaccctgacctacagaaacagcatgttccacaacagacacctgttcaaggacaaggtggtgctggacgtgggcagcggcaccggcatcctgtgcatgttcgccgccaaggccggcgccagaaaggtgatcggcatcgagtgcagcagcatcagcgactacgccgtgaagatcgtgaaggccaacaagctggaccacgtggtgaccatcatcaagggcaaggtggaggaggtggagctgcccgtggagaaggtggacatcatcatcagcgagtggatgggctactgcctgttctacgagagcatgctgaacaccgtgctgtacgccagagacaagtggctggcccccgacggcctgatcttccccgacagagccaccctgtacgtgaccgccatcgaggacagatag

SEQ ID NO: 275900 - DNA, 618 bp, Artificial Sequence
  derived and/or modified sequence
atgaccagcaaggactactacttcgacagctacgcccacttcggcatccacgaggagatgctgaaggacgaggtgagaaccctgacctacagaaacagcatgttccacaacagacacctgttcaaggacaaggtggtgctggacgtgggcagcggcaccggcatcctgtgcatgttcgccgccaaggccggcgccagaaaggtgatcggcatcgagtgcagcagcatcagcgactacgccgtgaagatcgtgaaggccaacaagctggaccacgtggtgaccatcatcaagggcaaggtggaggaggtggagctgcccgtggagaaggtggacatcatcatcagcgagtggatgggctactgcctgttctacgagagcatgctgaacaccgtgctgtacgccagagacaagtggctggcccccgacggcctgatcttccccgacagagccaccctgtacgtgaccgccatcgaggacagacagtacaaggactacaagatccactggtgggagaacgtgtacggcttcgacatgagctgcatcaaggacgtggccatcaaggagcccctggtggacgtggtggaccccaagcagctggtgaccaacgcctgcctgtag

SEQ ID NO: 275901 - DNA, 630 bp, Artificial Sequence
  derived and/or modified sequence
atgaccagcaaggactactacttcgacagctacgcccacttcggcatccacgaggagatgctgaaggacgaggtgagaaccctgacctacagaaacagcatgttccacaacagacacctgttcaaggacaaggtggtgctggacgtgggcagcggcaccggcatcctgtgcatgttcgccgccaaggccggcgccagaaaggtgatcggcatcgagtgcagcagcatcagcgactacgccgtgaagatcgtgaaggccaacaagctggaccacgtggtgaccatcatcaagggcaaggtggaggaggtggagctgcccgtggagaaggtggacatcatcatcagcgagtggatgggctactgcctgttctacgagagcatgctgaacaccgtgctgtacgccagagacaagtggctggcccccgacggcctgatcttccccgacagagccaccctgtacgtgaccgccatcgaggacagacagtacaaggactacaagatccactggtgggagaacgtgtacggcttcgacatgagctgcatcaaggacgtggccatcaaggagcccctggtggacgtggtggaccccaagcagctggtgaccaacgcctgcctgatcaaggtgagatag

SEQ ID NO: 275902 - DNA, 888 bp, Artificial Sequence
  derived and/or modified sequence
atgcatgaccagcattttcatctcttaaccccgttgccccatagagggttatcctgccagcgcggacctgctgtccatgaccggcaaagggccgccgggctggcccgcggcgccgatagggctgctgggaacgcttcatacaggtcgataggagccctgaaccaggttagattccggcattggttcgttgcaaagctgtacatgaacacacatcccggaagattactgctgggcctgacgctcggcctgtggcttactaccgcttgggtgctcagcgtggccgaacgtcaggcggtgaatgcaacggggcatttgtctgataccttatggcttattccaataacatttctgaccatcggttacggcgacgtggtgcctggcactatgtggggcaagattgtatgtctctgcactggagtgatgggggtttgttgcaccgccctgctggttgccgtcgtcgccaggaagctggaattcaataaagcagaaaagcacgttcataactttatgatggacatccaatacacaaaagagatgaaggagtcggccgcgagagtactgcaggaagcgtggatgttttacaaacatacacgcaggaaagaatctcatgcagcacgtcgacatcagcgtaagcttctcgcagcgatcaacgctttccggcaggtgcgtttgaagcatcgcaaactgcgtgaacaggtcaactctatggtggacatctccaaaatgcacatgattctgtacgacctgcagcagaatctctcatcgagtcaccgggccctggagaagcagatcgacaccctggcagggaaactggacgccctgacagagctgctgtccactgcgctcgggccgaggcagctgcccgaaccgtcccagcagtcaaaatag

SEQ ID NO: 275903 - DNA, 888 bp, Artificial Sequence
  derived and/or modified sequence
atgcatgaccagcacttccacctgctgacccccctgccccaccggggcctgagctgccagaggggccctgctgtgcatgaccggcagagagctgctggcctggcccggggagctgacagagctgctggaaatgccagctaccgcagcatcggggccctgaaccaggtgcgcttccgccactggtttgtggccaagctgtacatgaacacccaccctggccgcctgctgctgggcctgaccctgggcctgtggctgaccacagcctgggtgctgtctgtggccgagcggcaggccgtgaatgccaccggccacctgagtgacaccctgtggctgatccccatcaccttcctgaccatcggctatggagatgtggtgcccggcaccatgtggggcaagatcgtgtgcctgtgcaccggggtgatgggcgtgtgctgcacagccctgctggtggccgtggtggccaggaagctggagttcaacaaggccgagaagcacgtgcacaacttcatgatggacatccagtacaccaaggagatgaaggagagcgctgcccgggtgctgcaggaggcctggatgttctacaagcacaccaggaggaaggagagccacgccgcccggcggcaccagaggaagctgctggccgccatcaatgccttccggcaggtgcggctgaagcacaggaagctgcgggagcaggtgaacagcatggtggacatcagcaagatgcacatgatcctgtatgacctgcagcagaacctgagcagcagccaccgggccctggagaagcagattgacaccctggccggcaagctggatgccctgacagagctgctgagcacagccctgggcccccggcagctgcctgagcccagccagcagagcaagtag

SEQ ID NO: 275904 - DNA, 888 bp, Artificial Sequence
  derived and/or modified sequence
atgcacgaccagcacttccacctgctgacccccctgccccaccggggattatcctgtcagcgtggccccgctgtgcacgaccgccagagagctgccggtttagcccggggtgccgacagagccgcaggaaatgcgtcatataggagtataggcgcactgaaccaagtgcgcttcagacattggttcgtagcgaagctgtacatgaacacacacccagggaggctactgcttggacttacacttggtctgtggctgactactgcatgggtcctctctgtggcggaaagacaagctgtaaatgccacagggcacttgtccgacacattgtggttgatcccgattacattcctgaccataggctatggagacgtggttcctggcacaatgtggggaaaaatcgtgtgcttgtgtaccggagtgatgggtgtgtgttgtacagccttactggttgctgtcgtcgcaagaaaattagagttcaataaggctgagaaacatgtgcataactttatgatggacattcagtacacgaaagaaatgaaagaatctgccgcccgagtgttgcaggaagcatggatgttctataaacatacacgccggaaagagtcccacgccgccaggagacaccaacgcaagctgctggctgctataaacgcctttagacaggttcgccttaagcatcgcaaactccgcgagcaagtaaatagcatggtggatatttctaagatgcatatgatattgtatgacttacagcagaacctcagctcatcacatcgcgcactcgagaaacagattgatactttagctggcaagctggatgcactcaccgaacttctgagcactgctctcggcccacggcaactgccagagccttctcagcaaagtaagtag

SEQ ID NO: 275905 - DNA, 1736 bp, Artificial Sequence
  derived and/or modified sequence
agcagagcaggctgacgacctgcaagccacagtggctgccctgtgcgtgctgcgaggtgggggaccctgggcaggaagctggctgagccccaagaccccgggggccatgggcggggatctggtgcttggcctgggggccttgagacgccgaaagcgcttgctggagcaggagaagtctctggccggctgggcactggtgctggcaggaactggcattggactcatggtgctgcatgcagagatgctgtggttcggggggtgctcgtgggcgctctacctgttcctggttaaatgcacgatcagcatttccaccttcttactcctctgcctcatcgtggcctttcatgccaaagaggtccagctgttcatgaccgacaacgggctgcgggactggcgcgtggcgctgaccgggcggcaggcaacgcttcctaccgcagcatcggcgctctcaatcaagtccgcttccgccactggttcgtggccaagctttacatgaacacgcaccctggccgcctgctgctcggcctcacgcttggcctctggctgaccaccgcctgggtgctgtccgtggccgagaggcaggctgttaatgccactgggcacctttcagacacactttggctgatccccatcacattcctgaccatcggctatggtgacgtggtgccgggcaccatgtggggcaagatcgtctgcctgtgcactggagtcatgggtgtctgctgcacagccctgctggtggccgtggtggcccggaagctggagtttaacaaggcagagaagcacgtgcacaacttcatgatggatatccagtataccaaagagatgaaggagtccgctgcccgagtgctacaagaagcctggatgttctacaaacatactcgcaggaaggagtctcatgctgcccgcaggcatcagcgcaagctgctggccgccatcaacgcgttccgccaggtgcggctgaaacaccggaagctccgggaacaagtgaactccatggtggacatctccaagatgcacatgatcctgtatgacctgcagcagaatctgagcagctcacaccgggccctggagaaacagattgacacgctggcggggaagctggatgccctgactgagctgcttagcactgccctggggccgaggcagcttccagaacccagccagcagtccaagtagctgggacccacgaggaggaaccaggctactttccccagtactgaggtggtggacatcgtctctgccactcctgacccagccctgaacaaagcacctcaagtgcaaggaccaaagggggccctggcttggagtgggttggcttgctgatggctgctggaggggacgctggctaaagtgggtaggccttggcccacctgaggccccaggtgggaacatggtcacccccactctgcataccctcatcaaaaacactctcactatgctgctatggacgacctccagctctcagttacaagtgcaggcgactggaggcaggactcctgggtccctgggaaagagggtactaggggcccggatccaggattctgggaggcttcagttaccgctggccgagctgaagaactgggtatgaggctggggcggggctggaggtggcgccccctggtgggacaacaaagaggacaccatttttccagagctgcagagagcacctggtggggaggaagaagtgtaactcaccagcctctgctcttatctttgtaataaatgttaaagcc

SEQ ID NO: 275906 - DNA, 888 bp, Artificial Sequence
  derived and/or modified sequence
atgcacgatcagcacttccatctgcttacccccctgccacatagggggctgtcatgccagaggggaccagctgtgcacgataggcagagggccgcaggactggcgagaggcgctgaccgtgccgctgggaatgccagctataggtccataggggctctgaaccaggtgaggttccggcactggttcgtggcgaaattgtacatgaacactcaccctggacgtctgcttttagggctgaccctcggactttggctaacgaccgcttgggtgttgtctgttgccgaacggcaggccgtgaatgccactgggcacttgtcagacacgttatggctgatacctattacattcctcaccattgggtacggcgatgtggtgccaggtaccatgtggggaaaaattgtctgcctttgtacaggagttatgggcgtttgttgcacagccctactggttgccgtcgtggcaagaaagctagagtttaataaggccgaaaaacatgtacataattttatgatggacatccagtacactaaggaaatgaaggagtctgctgcccgagtgctgcaggaggcctggatgttttacaagcacacaaggcgcaaagaaagccatgccgctcgcagacaccaacgtaagctcctggcggctattaatgcctttcgccaagtgagactgaagcacaggaaactgagggagcaggtgaatagcatggtggacattagcaaaatgcacatgatactgtacgatctgcaacagaatctgtcttccagtcacagagcccttgagaaacagatagacacgttagcagggaaactcgatgccctgacggaattgctcagtacagccctcgggccacggcagcttccagaaccgtcccaacaaagcaagtag

SEQ ID NO: 275907 - DNA, 888 bp, Artificial Sequence
  derived and/or modified sequence
atgcacgaccagcacttccacctgctgacccccctgccccacagaggcctgagctgccagagaggccccgccgtgcacgacagacagagagccgccggcctggccagaggcgccgacagagccgccggcaacgccagctacagaagcatcggcgccctgaaccaggtgagattcagacactggttcgtggccaagctgtacatgaacacccaccccggcagactgctgctgggcctgaccctgggcctgtggctgaccaccgcctgggtgctgagcgtggccgagagacaggccgtgaacgccaccggccacctgagcgacaccctgtggctgatccccatcaccttcctgaccatcggctacggcgacgtggtgcccggcaccatgtggggcaagatcgtgtgcctgtgcaccggcgtgatgggcgtgtgctgcaccgccctgctggtggccgtggtggccagaaagctggagttcaacaaggccgagaagcacgtgcacaacttcatgatggacatccagtacaccaaggagatgaaggagagcgccgccagagtgctgcaggaggcctggatgttctacaagcacaccagaagaaaggagagccacgccgccagaagacaccagagaaagctgctggccgccatcaacgccttcagacaggtgagactgaagcacagaaagctgagagagcaggtgaacagcatggtggacatcagcaagatgcacatgatcctgtacgacctgcagcagaacctgagcagcagccacagagccctggagaagcagatcgacaccctggccggcaagctggacgccctgaccgagctgctgagcaccgccctgggccccagacagctgcccgagcccagccagcagagcaagtag

SEQ ID NO: 275908 - DNA, 843 bp, Artificial Sequence
  derived and/or modified sequence
atggaacgtgaaatggtattatgtctggcccagactatccacactcaggaagatcttcccagacccagcatatccgcggagcccggcacagtcatccctctaggatctcacgtgacatttgtgtgtagaggacccgtgggggtccagacatttcgcttggagcgggaaagccgtagtacatacaacgacacagaagacgtttcgcaggcttctcctagtgagagcgaggcaaggttccgaatagacagcgtttctgaggggaatgcaggcccttaccggtgcatctattacaagcccccaaaatggagtgaacaatccgactacctagagctcctggtgaaggagacaagcggtggtccagatagccccgacacagagccaggtagttccgccggaccaactcaacggccctccgataattcacacaacgaacatgctcccgccagccagggccttaaggctgagcacctgtacatcctgatcggtgtatcggtcgtttttttgttctgcctactacttctcgtgttgttttgcctgcaccgccagaatcagattaagcagggacccccgcggagcaaggacgaggaacagaaaccccagcagaggccagacctcgccgtcgacgtcctcgagcgaacggccgataaggctacggtgaacggactccccgaaaaggacagagagacagacacgtccgctttggccgctggcagctcccaggaggttacgtatgcacagctggatcactgggctctgactcagcggactgcacgggctgtttctcctcaatctaccaagccaatggctgaaagtataacatacgccgccgtggctcggcactag

SEQ ID NO: 275909 - DNA, 843 bp, Artificial Sequence
  derived and/or modified sequence
atggagcgggagatggtgctgtgcctggcccagaccatccacacccaggaggacctgccccggcccagcatctctgctgagcccggcaccgtcatccccctgggcagccacgtgacctttgtgtgccggggccctgtgggcgtgcagaccttccggctggagcgggagagccgcagcacctacaatgacacagaagatgtgtcccaggccagccccagcgagagcgaggcccgcttcagaattgattctgtgtctgagggcaatgccggcccctaccgctgcatctactacaagccacccaagtggagcgagcagagcgactacctggagctgctggtgaaggagaccagcggcggccctgacagcccagacacagagcccggcagcagcgctggccccacccagaggcccagcgacaacagccacaatgaacatgccccagccagccagggcctgaaggccgagcacctgtacatcctgattggagtgtctgtggtgttcctgttctgcctgctgctgctggtgctcttctgcctgcaccggcagaaccagatcaagcagggccccccaagaagcaaggatgaggagcagaagccccagcagaggccagacctggccgtggatgtgctggagaggacagctgacaaggccaccgtgaatggcctgcctgagaaggaccgggagacagacaccagcgccctggccgccggcagcagccaggaggtgacctacgcccagctggaccactgggccctgacccagaggacagcccgggctgtgagcccccagagcaccaagcccatggccgagagcatcacctatgctgctgtggcccggcactag

SEQ ID NO: 275910 - DNA, 1511 bp, Artificial Sequence
  derived and/or modified sequence
ccacagcgcaggctggaggtggcagcccgtggaaagccaagttcatccaccatcggagcccaggccaggctgccaaggctaatattcaggacaaagccaggcacaggtcgggaatcctatgaagatgatcatcgtcctgaggtcttccttccagggttgcatccgcgacagaagatggaaagagaaatggtgctctgcctggcccagaccatccacacgcaggaggatctgcccagaccctccatctcggctgagccaggcaccgtgatccccctggggagccatgtgactttcgtgtgccggggcccggttggggttcaaacattccgcctggagagggagagtagatccacatacaatgatactgaagatgtgtctcaagctagtccatctgagtcagaggccagattccgcattgactcagtaagtgaaggaaatgccgggccttatcgctgcatctattataagccccctaaatggtctgagcagagtgactacctggagctgctggtgaaagaaacctctggaggcccggactccccggacacagagcccggctcctcagctggacccacgcagaggccgtcggacaacagtcacaatgagcatgcacctgcttcccaaggcctgaaagctgagcatctgtatattctcatcggggtctcagtggtcttcctcttctgtctcctcctcctggtcctcttctgcctccatcgccagaatcagataaagcaggggccccccagaagcaaggacgaggagcagaagccacagcagaggcctgacctggctgttgatgttctagagaggacagcagacaaggccacagtcaatggacttcctgagaaggacagagagacggacacctcggccctggctgcagggagttcccaggaggtgacgtatgctcagctggaccactgggccctcacacagaggacagcccgggctgtgtccccacagtccacaaagcccatggccgagtccatcacgtatgcagccgttgccagacactgaccccatacccacctggcctctgcacctgagggtagaaagtcactctaggaaaagcctgaagcagccatttggaaggcttcctgttggattcctcttcatctagaaagccagccaggcagctgtcctggagacaagagctggagactggaggtttctaaccagcatccagaaggttcgttagccaggtggtcccttctacaatcgagcagctccttggacagactgtttctcagttatttccagagacccagctacagttccctggctgtttctagagacccagctttattcacctgactgtttccagagacccagctaaagtcacctgcctgttctaaaggcccagctacagccaatcagccgatttcctgagcagtgatgccacctccaagcttgtcctaggtgtctgctgtgaacctccagtgaccccagagactttgctgtaattatctgccctgctgaccctaaagaccttcctagaagtcaagagctag

SEQ ID NO: 275911 - DNA, 843 bp, Artificial Sequence
  derived and/or modified sequence
atggagcgggagatggtgctgtgcctggcccagaccatccacacccaggaagatttgccccggccttctattagtgctgagcccgggacagttattcccttaggaagccatgtgactttcgtgtgtcgcggacctgtaggggttcagacctttcgcctggagagggaaagccgcagtacctacaatgacactgaagatgtgtcccaggcaagcccatccgagagcgaagctaggtttaggatcgacagtgtgagtgagggcaatgccgggccttatagatgtatctattataagccgcctaagtggagtgagcaatccgattatctggagctcctggtcaaggagacgtcaggcggtccagatagcccggatactgaaccagggagttctgctggcccaactcagaggccgtctgataactcacacaacgagcacgctccggcttcccaagggctgaaagctgagcacctatacatcctgattggcgtttctgtcgtttttctgttttgcctcctgctcctcgtgctgttttgtcttcatcgccagaatcagataaaacagggaccaccgcggagcaaagatgaagagcaaaaaccacagcagagacctgatctggcagttgatgtgcttgagcggactgccgacaaagcgaccgttaacggattacctgagaaagaccgagagacagacacctctgctctagctgctggatcctctcaagaggttacctatgcccagctggatcattgggccctgacacaaaggacggcccgcgccgtatcaccacaaagcacaaagcccatggccgagtccatcacttatgctgcggtcgctcgccactag

SEQ ID NO: 275912 - DNA, 843 bp, Artificial Sequence
  derived and/or modified sequence
atggagcgtgagatggtgctgtgtctggcccaaactattcatacccaagaagatctccccagaccatccatctcagccgagcccggaaccgtgatccctctaggatcacacgtcacgttcgtgtgtcgtggcccagtgggtgttcagacgttcaggctcgagagggagtcaagatccacctataatgacaccgaagacgtgagccaagcttccccctccgagagtgaagctagattcagaatcgacagcgtcagcgaaggcaacgcagggccttatcgctgcatttattacaagcctcctaagtggagcgaacagtccgattacctcgagctccttgttaaagaaacctctggaggccctgacagccccgataccgagcccggatccagtgcagggccaacacagcggccatccgataatagtcataatgagcacgctcccgcatcccaaggactgaaagccgaacacctctacatcctgatcggtgtgagtgtggtcttcctcttctgtctcctcctgctggttttgttttgtttgcaccggcagaaccaaatcaaacagggtccacctcgctccaaggacgaggagcagaagccgcagcagcggccagacctggccgtcgacgtgctggaaaggacagcagacaaggcgaccgtgaacggcctccccgaaaaggatcgcgaaacggacacgagcgccctcgccgctggttctagccaggaagtcacgtatgcacagcttgatcactgggcattgactcagagaacggccagggccgttagcccacagtctacaaaacccatggcagaaagcataacgtatgctgccgtagctagacattag

SEQ ID NO: 275913 - DNA, 843 bp, Artificial Sequence
  derived and/or modified sequence
atggagagagagatggtgctgtgcctggcccagaccatccacacccaggaggacctgcccagacccagcatcagcgccgagcccggcaccgtgatccccctgggcagccacgtgaccttcgtgtgcagaggccccgtgggcgtgcagaccttcagactggagagagagagcagaagcacctacaacgacaccgaggacgtgagccaggccagccccagcgagagcgaggccagattcagaatcgacagcgtgagcgagggcaacgccggcccctacagatgcatctactacaagccccccaagtggagcgagcagagcgactacctggagctgctggtgaaggagaccagcggcggccccgacagccccgacaccgagcccggcagcagcgccggccccacccagagacccagcgacaacagccacaacgagcacgcccccgccagccagggcctgaaggccgagcacctgtacatcctgatcggcgtgagcgtggtgttcctgttctgcctgctgctgctggtgctgttctgcctgcacagacagaaccagatcaagcagggcccccccagaagcaaggacgaggagcagaagccccagcagagacccgacctggccgtggacgtgctggagagaaccgccgacaaggccaccgtgaacggcctgcccgagaaggacagagagaccgacaccagcgccctggccgccggcagcagccaggaggtgacctacgcccagctggaccactgggccctgacccagagaaccgccagagccgtgagcccccagagcaccaagcccatggccgagagcatcacctacgccgccgtggccagacactag

SEQ ID NO: 275914 - DNA, 699 bp, Artificial Sequence
  derived and/or modified sequence
aacagaacagaaagctctccctcttgtgtgaggcagttgctgtggaaaccccacgggcaggaggcccccggccagcacatcctgtctgcttgtgtctgctgcagagttctgggaccggggccatgtctccacacctcactgctctcctgggcctagtgctctgcctggcccagaccatccacacgcaggagggggcccttcccagaccctccatctcggctgagccaggcactgtgatctccccggggagccatgtgactttcatgtgccggggcccggttggggttcaaacattccgcctggagagggaggatagagccaagtacaaagatagttataatgtgtttcgacttggtccatctgagtcagaggccagattccacattgactcagtaagtgaaggaaatgccgggctttatcgctgcctctattataagccccctggatggtctgagcacagtgacttcctggagctgctggtgaaagaaagctctggaggcccggactccccggacacagagcccggctcctcagctgggactgtgccaggcactgaagcctccggatttgatgcaccatgaatgaggagaaatggcctcccgtcttgtgaacttcaatggggagaaataattagaatgagcaatagaaatgcacagatgcctatacatacatatacaaataaaaagatacgattcgcaa

SEQ ID NO: 275915 - DNA, 294 bp, Artificial Sequence
  derived and/or modified sequence
atgggttccatcccaagtaagccttgtaacaaccccgaagggcccttactacaaggcatggaagcggcagattggaccggcattggcgtgtgtctgccccctggtggcgcccgtggacacatctactgctgtaccagactgtgtcaccagcgcgctgcctccgcccacagatctctgcttctccctcggacggtgcagactggcgggaccgagcgggagaaacctgggcctggccagagaaagcgcggcgctcactgcagtgcttgtaagagatccagcactaggccttcgtag

SEQ ID NO: 275916 - protein, 144 aa, Artificial Sequence
  derived and/or modified sequence
MALSVGVTHSRGRWGCLRAPACAAGVSLLTTGGSSQRLTAAADPFPDLLQCLNLSIVSHATCHGVYPGRITSNMVCAGGVPGQDACQGDSGGPLVCGGVLQGLVSWGSVGPCGQDGIPGVYTYICNSTLVGLGTSWNFNSCQPF

SEQ ID NO: 275917 - DNA, 435 bp, Artificial Sequence
  derived and/or modified sequence
atggcactctcggtgggagttactcactcacggggaagatgggggtgcctgcgggcccccgcttgtgccgcaggtgtctctttactgaccaccggtgggagcagccaacgtcttaccgccgccgctgatccttttcctgatctgttgcagtgcctgaacctgagcatcgtgtcacatgctacatgccatggtgtctatcccggtcgaatcacttccaatatggtgtgcgcaggcggcgtgcccggccaggatgcctgccagggtgacagtggaggccctctcgtgtgtgggggagtccttcaaggattagtgtcctggggaagcgtgggcccttgtggacaggatggaatccccggcgtctatacctatatttgtaactcaaccctggtcggtttgggcacatcatggaacttcaactcctgccagccattctag

SEQ ID NO: 275918 - DNA, 1170 bp, Artificial Sequence
  derived and/or modified sequence
gggcttgcagaggagagagggagtggggctgggtcttcccaccctgggtcctttcctccttccccactccgtttagctgtaaagctcaattaagtgtgattagctgagaagagtttctgcagaattagagcacgccccacccctgtcttcgtggtccccttcccttaacccggaaactggatgggccaggacaaagagagttaagagctttgtcagtggtctgtctggagcgacagatggaaggaaagggaccggttgagcaacatgacaggtggctgaggagccaggtgcagagtggtagagttggctggcggagtggccagcacatgagaagacaggcaggtaggtggacggagagatagcagcgacgaggacaggccaaacagtgacagccacgtagaggatctggcagacaaagagacaagactttggaagtgacccaccatggggctcagcatctttttgctcctgtgtgttcttggtgagttctcccggagcagggagagggcaggactgcgactggatcccttcacccccatgaggaggccccaccaccctccccatctcagctctggcccccagcctggtggtgaggaggagaggggctttctctgtgcctccatttacctgcagctctcaggggctcagccaggcagccacaccgaagattttcaatggcactgagtgtgggcgtaactcacagccgtggcaggtggggctgtttgagggcaccagcctgcgctgcgggggtgtccttattgaccacaggtgggtcctcacagcggctcactgcagcggcagacccattcccggatctgctccagtgcctcaacctctccatcgtctcccatgccacctgccatggtgtgtatcccgggagaatcacgagcaacatggtgtgtgcaggcggcgtcccggggcaggatgcctgccagggtgattctgggggccccctggtgtgtgggggagtccttcaaggtctggtgtcctgggggtctgtggggccctgtggacaagatggcatccctggagtctacacctatatttgcaactccactcttgttggcctgggaacttcttggaactttaactcctgccagcccttctaagacccacgagcggggtgagagaagtgtgcaatagtctggaataaatataaatgaaggaggg

SEQ ID NO: 275919 - DNA, 735 bp, Artificial Sequence
  derived and/or modified sequence
cgaggacaggccaaacagtgacagccacgtagaggatctggcagacaaagagacaagactttggaagtgacccaccatggggctcagcatctttttgctcctgtgtgttcttgggctcagccaggcagccacaccgaagattttcaatggcactgagtgtgggcgtaactcacagccgtggcaggtggggctgtttgagggcaccagcctgcgctgcgggggtgtccttattgaccacaggtgggtcctcacagcggctcactgcagcggcagacccattcccggatctgctccagtgcctcaacctctccatcgtctcccatgccacctgccatggtgtgtatcccgggagaatcacgagcaacatggtgtgtgcaggcggcgtcccggggcaggatgcctgccagggtgattctgggggccccctggtgtgtgggggagtccttcaaggtctggtgtcctgggggtctgtggggccctgtggacaagatggcatccctggagtctacacctatatttgcaagtatgtggactggatccggatgatcatgaggaacaactgacctgtttcctccacctccacccccaccccttaacttgggtacccctctggccctcagagcaccaatatctcctccatcacttcccctagctccactcttgttggcctgggaacttcttggaactttaactcctgccagcccttctaagacccacgagcggggtgagagaagt

SEQ ID NO: 275920 - DNA, 435 bp, Artificial Sequence
  derived and/or modified sequence
atggccctgtctgtgggcgtgacccacagccggggccgctggggctgcctgcgggccccagcctgtgccgccggcgtgtccctgctgaccactggaggcagcagccagaggctgacagctgctgctgaccccttcccagacctgctgcagtgcctgaacctgagcatcgtgtcccatgccacctgccacggcgtgtacccaggccgcatcaccagcaacatggtgtgtgccggcggcgtgcccggccaggatgcctgccagggcgacagcggcggccccctggtgtgtggcggcgtgctgcagggcctggtgtcctggggctctgtgggcccctgtggccaggacggcatccctggggtgtacacctacatctgcaacagcaccctggtgggcctgggcacctcctggaacttcaacagctgccagcccttctag

SEQ ID NO: 275921 - DNA, 435 bp, Artificial Sequence
  derived and/or modified sequence
atggccctgagcgtgggcgtgacccacagccggggccggtggggctgcttaagagcacctgcctgtgcagccggcgtgagccttctgactaccggcggtagttcccagcgacttacggctgcagctgatccgttccctgacctgcttcagtgtctcaatctgagtattgtgtcacatgcaacctgccacggagtttatcccggccgaattacatcaaacatggtctgtgcgggaggcgttcccgggcaagatgcatgtcagggcgattccggtggccccttagtttgtggcggtgttctgcaaggcctggttagctgggggtcggtcggaccatgcggccaggatgggatccccggcgtgtatacatatatctgtaatagtaccttagttgggctcgggacctcctggaactttaactcttgccaacccttctag

SEQ ID NO: 275922 - DNA, 435 bp, Artificial Sequence
  derived and/or modified sequence
atggccctttcagtgggcgttactcactctcgtggacgctggggctgtcttcgagcaccagcatgtgcagcgggagtgtcacttctgaccactggtggaagcagccagagactcacggcagccgcagatccgtttcctgacttgctgcagtgcctcaatctgtccattgtgtcacatgcaacctgtcacggcgtctaccctggtcgaatcaccagcaatatggtgtgcgcaggaggagtgcccggacaggacgcctgtcagggtgacagtggagggccactggtatgtggtggagtcctccagggtttggtgtcctgggggtccgtgggcccatgcggacaggacggcatacctggcgtatacacctacatttgcaatagcactctggtggggttgggaacttcctggaatttcaattcctgccaacccttttag

SEQ ID NO: 275923 - DNA, 435 bp, Artificial Sequence
  derived and/or modified sequence
atggccctgagcgtgggcgtgacccacagcagaggcagatggggctgcctgagagcccccgcctgcgccgccggcgtgagcctgctgaccaccggcggcagcagccagagactgaccgccgccgccgaccccttccccgacctgctgcagtgcctgaacctgagcatcgtgagccacgccacctgccacggcgtgtaccccggcagaatcaccagcaacatggtgtgcgccggcggcgtgcccggccaggacgcctgccagggcgacagcggcggccccctggtgtgcggcggcgtgctgcagggcctggtgagctggggcagcgtgggcccctgcggccaggacggcatccccggcgtgtacacctacatctgcaacagcaccctggtgggcctgggcaccagctggaacttcaacagctgccagcccttctag

SEQ ID NO: 275924 - protein, 172 aa, Artificial Sequence
  derived and/or modified sequence
MLLLPPRPPHPRSSSPEAMDPPPPKAPPFPKAEGPSSTPSSAAGPRPPRLGRHLLIDANGVPYTYTVQLEEEPRGPPQREAPPGEPGPRKGYSCPECARVFASPLRLQSHRVSHSDLKPFTCGACGKAFKRSSHLSRHRATHRARAGPPHTCPLCPRRFQDAAELAQHVRLH

SEQ ID NO: 275925 - protein, 591 aa, Artificial Sequence
  derived and/or modified sequence
MQQDGLGVGTRNGSGKGRSVHPSWPWCAPRPLRYFGRDARARRAQTAAMALAIQVTVSNPYHVVILFQPVTLPCTYQMTSTPTQPIVIWKYKSFCRDRIADAFSPASVDNQLNAQLAAGNPGYNPYVECQDSVRTVRVVATKQGNAVTLGDYYQGRRITITGNADLTFDQTAWGDSGVYYCSVVSAQDLQGNNEAYAELIVLGRTSGVAELLPGFQAGPIEDWLFVVVVCLAAFLIFLLLGICWCQCCPHTCCCYVRCPCCPDKCCCPEALYAAGKAATSGVPSIYAPSTYAHLSPAKTPPPPAMIPMGPAYNGYPGGYPGDVDRSSSVRSGYRIQASQQDDSMRVLYYMEKELANFDPSRPGPPSGRVERAMSEVTSLHEDDWRSRPSRGPALTPIRDEEWGGHSPRSPRGWDQEPAREQAGGGWRARRPRARSVDALDDLTPPSTAESGSRSPTSNGGRSRAYMPPRSRSRDDLYDQDDSRDFPRSRDPHYDDFRSRERPPADPRSHHHRTRDPRDNGSRSGDLPYDGRLLEEAVRKKGSEERRRPHKEEEEEAYYPPAPPPYSETDSQASRERRLKKNLALSRESLVV

SEQ ID NO: 275926 - DNA, 1776 bp, Artificial Sequence
  derived and/or modified sequence
atgcagcaggatggcctgggggtagggacgcgtaacgggtcaggcaagggtcgttccgtacaccccagttggccctggtgtgcacctcgacctctgagatacttcggacgggatgccagagccagacgtgcacaaaccgctgcaatggccctcgctattcaggtgactgttagcaatccttatcatgtggttatcctctttcagcctgtgaccttgccctgcacgtaccagatgacatccacgcccactcagcctattgtgatctggaaatataagtcattctgtcgagataggatcgcggacgccttcagtccagcctccgttgataaccagcttaatgctcaactggcagccggtaatcccggttataatccatatgtggaatgtcaggattccgtacggaccgtgagagtcgtcgcgaccaagcagggcaatgcagtcaccctgggagactactatcagggacgtcgcataacaattactggtaacgccgatctcaccttcgaccaaacagcctggggcgactccggagtgtattattgttcagttgtgtctgcgcaggatctgcaaggcaacaacgaagcctacgccgaactgattgttctgggtcgtacttctggagtggctgaactgcttcccggatttcaggccggacccattgaggactggctttttgtggtggtggtatgcctggcggctttcctcatttttcttcttttaggtatctgttggtgtcaatgctgtcctcatacgtgctgttgctacgtccgctgcccatgttgtcccgacaaatgctgctgcccagaagcactttatgcagctggaaaggccgctacctccggagtaccctcaatttatgccccatccacctacgcccacctctctcctgccaagaccccgccaccgcctgccatgattcctatgggaccagcatacaatggataccctggaggctacccaggcgacgtggacagatcctctagtgtgcgctctggatatagaatccaggcttcccagcaggacgactcaatgagagtgttatactatatggagaaggagttagccaatttcgacccctctcgtcccggtcctccctcaggtcgggtggaaagggccatgtcagaagtcaccagcctgcatgaagacgactggagaagccggccatctaggggcccagccttaactccaatcagggacgaagagtggggaggacactctcccaggtcccctaggggctgggaccaggagcctgctcgcgagcaggctggaggcggttggcgcgctcgcaggcctcgagccagaagtgtggatgccttggatgacctaacgcccccaagtaccgcagaaagtggaagtagaagtcccacatccaacgggggtagatctcgcgcttatatgccccctagaagtcgtagccgcgacgatctctacgaccaagacgacagtcgcgatttcccgagatcaagagatccccattatgacgactttagatcccgggagaggcctccagcggatcctcggagtcatcaccaccggacaagagacccacgggacaacggaagcagatcaggagacctcccatatgatggcaggctgctggaagaagccgtgaggaaaaagggctccgaggagcggaggcggccacataaggaagaggaagaagaggcctattacccgccagccccacccccttattcagagaccgacagtcaagccagtcgcgaacgacggctgaagaaaaacctcgccctgtcgagagaaagcctggtggtttag

SEQ ID NO: 275927 - DNA, 1776 bp, Artificial Sequence
  derived and/or modified sequence
atgcaacaagatggactgggagtgggtaccagaaacggaagcggaaaaggtagaagtgtccacccatcttggccatggtgtgccccccgccccctcaggtattttggtagggatgcacgggccagaagggcccagacggctgctatggctctggctatccaagtcacagtgagtaatccataccacgtcgtgattctcttccaacctgtcaccctgccatgcacttatcagatgacaagcacccctacccaacccatcgtcatctggaaatataagtctttttgcagggatagaattgccgacgcgttctcaccagcaagtgtcgacaaccagttaaatgctcagctcgccgccgggaaccctggctacaacccctacgtcgagtgccaggattcagtgcggactgtgagagtcgtagccacaaaacaggggaatgccgtcacactcggcgattactaccaaggaaggcggattacaatcactggaaacgccgatctgacattcgaccagaccgcatggggagactcaggcgtatactattgcagtgtagtttcagcccaggacttgcagggaaacaatgaggcatacgccgagcttatcgttctcggcagaacatctggagtggcggaactgctgcctggctttcaggccggccctatcgaagattggcttttcgtagtggttgtgtgtctggccgctttcttaatctttcttctgctggggatatgctggtgccagtgttgtccacacacatgttgctgctacgtgagatgtccctgctgtccagacaagtgttgttgccccgaggccctttatgctgcaggaaaggcagccacatccggggttccttccatctacgccccttcgacctacgctcacttgtctcccgccaagactcctcccccccccgctatgattcccatgggtcctgcctacaacgggtaccccggcggctaccctggagatgtagacagatccagctctgtgagaagcggttatagaatccaggcctctcagcaagacgatagcatgcgggtgctctactacatggaaaaagagttggctaattttgacccgtcgcggcccggaccacctagcggcagagttgaacgcgccatgtccgaagtgacaagcctgcacgaagatgattggagatcaagaccctcaagagggcccgccctgactcccattagggacgaggaatggggggggcacagcccgcgttccccccgcgggtgggatcaggagcctgcaagggagcaagccggcggcgggtggagagccagacggcccagggctcgaagtgtcgatgccctagatgacttgactcctccttccacagccgagtctggctcaagatctcctacttcaaatggaggacgatcacgagcttacatgccacctcgctctaggtcccgcgacgatctgtatgatcaggacgacagtagagatttccctcgatctcgcgatccccactacgatgactttcgaagccgagagcggccacctgccgacccccgatcacaccaccataggaccagagatccccgcgacaacgggtctcgaagcggagacttaccgtacgacgggcgcctcctcgaggaagcggtgcgcaaaaaagggagtgaagaacgccgtcgacctcacaaggaggaggaagaagaagcatactatcctcccgctccacccccatactccgagaccgactctcaggcgagtcgggaacgtcggttaaaaaagaatttggccctcagccgggaaagcctggtggtttag

SEQ ID NO: 275928 - DNA, 1776 bp, Artificial Sequence
  derived and/or modified sequence
atgcaacaggacggcctcggcgtgggtacccgcaatgggtctggaaaaggacgctcagtacatccttcttggccctggtgcgcccctcgtcctctccgctatttcggtagagatgcccgtgctcgcagagcccagaccgcagctatggccctcgctattcaagtcactgtctcaaatccgtaccatgtggtgatcctgtttcagcccgtaactttgccttgcacctatcagatgacgtccactccaacccaacccatagtcatttggaaatacaagagtttttgcagggatagaattgcagatgcttttagcccagcctccgttgacaatcaactcaatgcacagctcgctgcagggaaccccggatacaacccctatgtggagtgccaggattccgtgcggacagttagggttgtcgcaacaaagcagggcaatgctgttacactcggggattactaccaaggacggagaattacaataacaggaaacgccgatctcaccttcgatcagaccgcgtggggggacagtggagtgtattattgcagtgtcgtatccgctcaagatctccagggaaataacgaagcttatgccgaactgattgtgctggggcgtacatccggcgtggccgagcttctgccagggttccaagccggccccatcgaagattggctgtttgtcgtcgtagtttgtctcgccgctttcctgatctttttactgctgggaatatgttggtgtcagtgctgccctcatacatgctgttgctatgtacgatgtccttgttgtcccgataaatgctgctgccccgaagctctatatgctgccggcaaggctgctacttcaggcgtgccctcaatttacgcaccatctacctacgctcacctctcccctgctaagaccccacccccccccgctatgattcccatgggtcctgcctacaacgggtaccccggcggctaccctggagatgtagacagatccagctctgtgagaagcggttatagaatccaggcctctcagcaagacgatagcatgcgggtgctctactacatggaaaaagagttggctaattttgacccgtcgcggcccggaccacctagcggcagagttgaacgcgccatgtccgaagtgacaagcctgcacgaagatgattggagatcaagaccctcaagagggcccgccctgactcccattagggacgaggagtggggcggacactctcctaggagcccacgaggatgggatcaagagccagccagggagcaggcgggcggtggatggagagcgcggcgcccccgcgcgaggtcagtagatgctctggacgacttgacaccaccaagtactgccgaatccgggagccgctcaccaactagtaatggaggaagatcgcgagcctacatgccaccacgctcacggtccagggatgatctgtacgatcaggacgatagccgagactttcccaggtcaagagatccacattatgatgatttccgctcgcgagagcgcccacctgccgatcctcgaagccaccaccacagaactcgggacccacgcgacaacggttctagatctggagacctgccatacgatggaagactgcttgaagaggccgttcggaaaaagggttcagaggaaagacgtcggccccataaggaagaggaggaagaggcctactatccccctgctccacccccgtatagcgagactgactcacaagccagtcgggaaagacgcctgaagaagaatctcgctctgagtagggagagcctagttgtttag

SEQ ID NO: 275929 - DNA, 1776 bp, Artificial Sequence
  derived and/or modified sequence
atgcagcaggacggcctgggcgtgggcaccagaaacggcagcggcaagggcagaagcgtgcaccccagctggccctggtgcgcccccagacccctgagatacttcggcagagacgccagagccagaagagcccagaccgccgccatggccctggccatccaggtgaccgtgagcaacccctaccacgtggtgatcctgttccagcccgtgaccctgccctgcacctaccagatgaccagcacccccacccagcccatcgtgatctggaagtacaagagcttctgcagagacagaatcgccgacgccttcagccccgccagcgtggacaaccagctgaacgcccagctggccgccggcaaccccggctacaacccctacgtggagtgccaggacagcgtgagaaccgtgagagtggtggccaccaagcagggcaacgccgtgaccctgggcgactactaccagggcagaagaatcaccatcaccggcaacgccgacctgaccttcgaccagaccgcctggggcgacagcggcgtgtactactgcagcgtggtgagcgcccaggacctgcagggcaacaacgaggcctacgccgagctgatcgtgctgggcagaaccagcggcgtggccgagctgctgcccggcttccaggccggccccatcgaggactggctgttcgtggtggtggtgtgcctggccgccttcctgatcttcctgctgctgggcatctgctggtgccagtgctgcccccacacctgctgctgctacgtgagatgcccctgctgccccgacaagtgctgctgccccgaggccctgtacgccgccggcaaggccgccaccagcggcgtgcccagcatctacgcccccagcacctacgcccacctgagccccgccaagaccccccccccccccgccatgatccccatgggccccgcctacaacggctaccccggcggctaccccggcgacgtggacagaagcagcagcgtgagaagcggctacagaatccaggccagccagcaggacgacagcatgagagtgctgtactacatggagaaggagctggccaacttcgaccccagcagacccggcccccccagcggcagagtggagagagccatgagcgaggtgaccagcctgcacgaggacgactggagaagcagacccagcagaggccccgccctgacccccatcagagacgaggagtggggcggccacagccccagaagccccagaggctgggaccaggagcccgccagagagcaggccggcggcggctggagagccagaagacccagagccagaagcgtggacgccctggacgacctgaccccccccagcaccgccgagagcggcagcagaagccccaccagcaacggcggcagaagcagagcctacatgccccccagaagcagaagcagagacgacctgtacgaccaggacgacagcagagacttccccagaagcagagacccccactacgacgacttcagaagcagagagagaccccccgccgaccccagaagccaccaccacagaaccagagaccccagagacaacggcagcagaagcggcgacctgccctacgacggcagactgctggaggaggccgtgagaaagaagggcagcgaggagagaagaagaccccacaaggaggaggaggaggaggcctactacccccccgccccccccccctacagcgagaccgacagccaggccagcagagagagaagactgaagaagaacctggccctgagcagagagagcctggtggtgtag

SEQ ID NO: 275930 - DNA, 1776 bp, Artificial Sequence
  derived and/or modified sequence
atgcagcaagacggactgggtgtaggtacaaggaatggcagcgggaagggacgcagtgttcatccatcctggccatggtgtgccccaaggcctctgcgctacttcggccgagatgcccgcgctcggcgagctcagaccgctgccatggcgttagccatccaagtgaccgtgagtaatccttaccatgtggtgatcctgtttcagcctgtcaccctgccttgtacataccaaatgacgtccacacctacgcaacccatcgtcatctggaaatataaaagcttctgccgggaccgtattgctgatgctttctcaccggccagtgtagataaccagctcaacgctcaattggcggctgggaaccccggctacaacccttacgtcgagtgtcaggattccgtgcgcaccgtcagggttgtggccacaaaacaggggaatgccgtcacactcggcgactactaccagggaaggaggataaccattactggcaacgccgacctcacattcgaccaaacagcttggggggatagcggggtgtattactgttccgtggttagtgcgcaagatctccaggggaacaacgaggcttatgctgagctcatagtactgggccggacatctggcgtcgccgagctcctgcctggattccaggcaggccctattgaagactggctattcgtggtggtagtctgtctggctgcgtttctcatcttcctacttctcggcatctgttggtgccagtgttgcccccatacctgttgttgttacgtgagatgtccctgttgtcctgacaaatgctgttgccccgaagcattgtacgcggcgggcaaggccgctacatctggtgttccatcgatctacgcaccatcaacctacgcccacctcagccctgctaaaaccccgcctccaccggccatgatcccaatggggcctgcctacaacggctacccaggcggttatcctggagacgtggacagatctagctcggtacggtctggataccgcatccaggcgtcgcagcaggacgactcaatgcgagtgctgtactacatggaaaaggaattggcgaacttcgatccaagcagacctggcccccctagtggccgcgttgagcgagctatgagcgaagtcacctctctacatgaggatgattggcggtcaagaccatcacgcgggcctgccttaacccctattcgggacgaagagtgggggggccactctcctcggagtccaagggggtgggaccaagaacccgcaagggagcaagccggcggaggatggcgcgcgagacgtccccgtgctagatcggtggacgcactggatgacctcacacccccctccacagctgagtctggcagtaggagccccacatcaaatgggggccggagtcgcgcctatatgccaccaagatcccgctcacgggacgatctgtatgaccaggacgattctagggatttccctcggtcccgggacccccactatgacgacttccggagccgcgagcggcctccggctgaccctaggagccatcaccaccgtacgagggacccaagggacaacggttcaaggtccggggatcttccttatgacggcaggctgctggaggaggcggtccggaaaaaagggtctgaggaaaggcggcgccctcataaggaggaagaggaggaagcctactatcccccagcccctcccccttactctgagacggattctcaagcatcaagggagagacgtctaaagaagaatctcgccctgtctagagagtctcttgtcgtgtag

SEQ ID NO: 275931 - DNA, 1879 bp, Artificial Sequence
  derived and/or modified sequence
atgcaacaggacggacttggagtagggacaaggaacggaagtgggaaggggaggagcgtgcacccctcctggccttggtgcgcgccgcgccccctaaggtactttggaagggacgcgcgggccagacgcgcccagacggccgcgatggcgctggccatccaggtgaccgtgtccaacccctaccacgtggtgatcctcttccagcctgtgaccctgccctgtacctaccagatgacctcgacccccacgcaacccatcgtcatctggaagtacaagtctttctgccgggaccgcatcgccgatgccttctccccggccagcgtcgacaaccagctcaatgcccagctggcagccgggaacccaggctacaacccctacgttgagtgccaggacagcgtgcgcaccgtcagggtcgtggccaccaagcagggcaacgctgtgaccctgggagattactaccagggccggaggattaccatcaccggaaatgctgacctgacctttgaccagacggcgtggggggacagtggtgtgtattactgctccgtggtctcagcccaggacctccaggggaacaatgaggcctacgcagagctcatcgtccttgggaggacctcaggggtggctgagctcttacctggttttcaggcggggcccatagaagactggctcttcgtggttgtggtatgcctggctgccttcctcatcttcctcctcctgggcatctgctggtgccagtgctgcccgcacacttgctgctgctacgtcaggtgcccctgctgcccagacaagtgctgctgccccgaggccctgtatgccgccggcaaagcagccacctcaggtgttcccagcatttatgcccccagcacctatgcccacctgtctcccgccaagaccccacccccaccagctatgattcccatgggccctgcctacaacgggtaccctggaggataccctggagacgttgacaggagtagctcagtccgcagtggctacaggattcaggccagccagcaggacgactccatgcgggtcctgtactacatggagaaggagctggccaacttcgacccttctcgacctggcccccccagtggccgtgtggagcgggccatgagtgaagtcacctccctccacgaggacgactggcgatctcggccttcccggggccctgccctcaccccgatccgggatgaggagtggggtggccactccccccggagtcccaggggatgggaccaggagcccgccagggagcaggcaggcgggggctggcgggccaggcggccccgggcccgctccgtggacgccctggacgacctcaccccgccgagcaccgccgagtcagggagcaggtctcccacgagtaatggtgggagaagccgggcctacatgcccccgcggagccgcagccgggacgacctctatgaccaagacgactcgagggacttcccacgctcccgggacccccactacgacgacttcaggtctcgggagcgccctcctgccgaccccaggtcccaccaccaccgtacccgggaccctcgggacaacggctccaggtccggggacctcccctatgatgggcggctactggaggaggctgtgaggaagaaggggtcggaggagaggaggagaccccacaaggaggaggaggaagaggcctactacccgcccgcgccgcccccgtactcggagaccgactcgcaggcgtcccgagagcgcaggctcaagaagaacttggccctgagtcgggaaagtttagtcgtctgatctgacgttttctacgtagcttttgtatttttttttttaatttgaaggaacactgatgaagccctgccatacccctcccgagtctaataaaacgtataatcac

SEQ ID NO: 275932 - DNA, 1776 bp, Artificial Sequence
  derived and/or modified sequence
atgcagcaggacggcctgggcgtgggcaccagaaatggcagcggcaagggccgctctgtgcaccccagctggccctggtgtgccccccggcccctgcgctacttcggcagagatgcccgggcccggcgggcccagacagctgccatggccctggccatccaggtgacagtgagcaacccctaccacgtggtgatcctcttccagcctgtgaccctgccctgcacctaccagatgaccagcacccccacccagcccatcgtcatctggaagtacaagagcttctgccgggacagaattgctgatgccttctccccagcctctgtggacaaccagctgaatgcccagctggccgccggcaaccctggctacaacccctacgtggagtgccaggacagcgtgaggacagtgcgggtggtggccaccaagcagggcaatgctgtgaccctgggggactactaccagggccgccgcatcaccatcactggaaatgctgacctgacctttgaccagacagcctggggagacagcggcgtgtactactgcagcgtggtgtctgcccaggacctgcagggcaacaatgaggcctatgcagagctgattgtgctgggccgcaccagcggcgtggccgagctgctgcccggcttccaggccggccccatcgaggactggctgtttgtggtggtggtgtgcctggccgccttcctgatcttcctgctgctgggcatctgctggtgccagtgctgcccccacacctgctgctgctacgtgcgctgcccctgctgcccagacaagtgctgctgcccagaggccctgtatgctgctgggaaggccgccaccagcggcgtgcccagcatctatgcccccagcacctacgcccacctgagccctgccaagaccccacctcctccagccatgatccccatgggccctgcctacaacggctacccaggcggctacccaggagatgtggacaggagcagctctgtgcgcagcggctaccgcatccaggccagccagcaggatgacagcatgagggtgctgtactacatggagaaggagctggccaactttgaccccagccggcccggcccccccagcggccgggtggagcgggccatgtctgaggtgaccagcctgcatgaagatgactggaggagccggcccagccggggccctgccctgacccccatcagagatgaggagtggggcggccacagccccaggagcccccggggctgggaccaggagcccgcccgggagcaggccggcggcggctggagggcccggcggccccgggcccggtctgtggatgccctggatgacctgaccccacccagcacagctgagagcggcagccgcagccccaccagcaatggaggccgcagccgggcctacatgccacccaggagccgcagcagagatgacctgtatgaccaggatgacagccgggacttccccaggagccgggacccccactatgatgacttccgcagccgggagcggcccccagctgaccccaggagccaccaccacaggacccgggacccccgggacaatggcagccgcagcggggacctgccctatgatggccgcctgctggaggaggccgtgaggaagaagggcagcgaggagcggcggcggccccacaaggaggaggaggaggaggcctactaccccccagcccccccaccctacagcgagacagacagccaggccagccgggagcggcggctgaagaagaacctggccctgagccgggagagcctggtggtgtag

SEQ ID NO: 275933 - DNA, 1776 bp, Artificial Sequence
  derived and/or modified sequence
atgcagcaggacggcctgggcgtgggcacccggaacggcagcggcaagggccgatctgttcacccttcatggccgtggtgtgcacccaggccgctcagatacttcggcagagacgcaagggcccggcgggcccagaccgctgcgatggccttggctatccaggttaccgtgtcaaacccctatcacgttgtcattctcttccaacctgtgaccctcccatgtacctatcagatgacatctacgcccacacagccaatcgttatatggaaatacaagtctttctgcagagacagaatagcagatgctttctccccagcctccgttgacaaccagctgaacgctcagctggcagctggtaaccccgggtacaacccttacgtggaatgccaggactctgtgcgtactgtgcgggtggtggccaccaagcaggggaacgcagtcaccttaggtgactactaccagggcaggaggattacaatcactggtaacgcagatctgacatttgaccagacagcctggggcgacagcggcgtgtattattgcagcgtggtcagtgcccaggacttacagggtaacaatgaagcttacgccgaactcattgtcctagggcgtaccagtggggtggcggagttactgcccggcttccaggccggccctattgaagattggttgtttgttgttgtggtttgtctcgctgcatttttgatctttctcctgctgggaatttgttggtgtcagtgttgtccacacacctgttgctgttacgtgcggtgcccctgctgcccagacaagtgttgctgtcctgaggcactgtatgccgcaggaaaagccgccacttccggtgttccctcgatatacgccccatccacctatgcgcacttgtcgccagctaagaccccgcctccaccagcaatgatccctatgggacctgcctacaacggttacccaggcggataccccggagacgtagatcgcagttcctccgtcaggagcggatacaggatccaagcttcccaacaagatgattccatgcgggtactctattacatggagaaggaactggcgaacttcgatccgtctcgccccggacctccgagcggacgcgtcgagcgtgccatgtcagaagtgaccagccttcatgaagatgattggaggtctcgcccatctcgcggtccagccctgactccgattagagacgaggagtggggtggacattccccccgctcaccgcgtggttgggatcaggagcccgccagggaacaggccggcggtgggtggagggccagaagaccccgcgccaggagtgtagacgcactcgacgacctgactcctcctagcactgctgagtcaggttcacgctcccctacgtctaatgggggccgttctcgcgcctatatgcccccccgctcccgcagcagagacgatttgtacgaccaagatgactctcgtgattttccccgatctcgcgatccccactatgacgattttcgaagcagggagagacctcctgccgacccaaggtctcatcatcaccggacgagggatcctcgcgataatggttctcggagcggggatcttccttatgacggccgcttattagaagaagccgtgagaaagaagggcagtgaagagaggagaaggccacacaaagaggaggaggaagaggcttattatcccccagccccacccccgtactcagagactgattctcaggcctcaagagaaagacggctgaaaaagaatttggcattgtccagagagtcactcgtagtctag

SEQ ID NO: 275934 - RNA, 1776 nt, Artificial Sequence
  derived and/or modified sequence
augcaacaagauggacugggaguggguaccagaaacggaagcggaaaagguagaaguguccacccaucuuggccauggugugccccccgcccccucagguauuuugguagggaugcacgggccagaagggcccagacggcugcuauggcucuggcuauccaagucacagugaguaauccauaccacgucgugauucucuuccaaccugucacccugccaugcacuuaucagaugacaagcaccccuacccaacccaucgucaucuggaaauauaagucuuuuugcagggauagaauugccgacgcguucucaccagcaagugucgacaaccaguuaaaugcucagcucgccgccgggaacccuggcuacaaccccuacgucgagugccaggauucagugcggacugugagagucguagccacaaaacaggggaaugccgucacacucggcgauuacuaccaaggaaggcggauuacaaucacuggaaacgccgaucugacauucgaccagaccgcauggggagacucaggcguauacuauugcaguguaguuucagcccaggacuugcagggaaacaaugaggcauacgccgagcuuaucguucucggcagaacaucuggaguggcggaacugcugccuggcuuucaggccggcccuaucgaagauuggcuuuucguagugguugugugucuggccgcuuucuuaaucuuucuucugcuggggauaugcuggugccaguguuguccacacacauguugcugcuacgugagaugucccugcuguccagacaaguguuguugccccgaggcccuuuaugcugcaggaaaggcagccacauccgggguuccuuccaucuacgccccuucgaccuacgcucacuugucucccgccaagacuccucccccccccgcuaugauucccauggguccugccuacaacggguaccccggcggcuacccuggagauguagacagauccagcucugugagaagcgguuauagaauccaggccucucagcaagacgauagcaugcgggugcucuacuacauggaaaaagaguuggcuaauuuugacccgucgcggcccggaccaccuagcggcagaguugaacgcgccauguccgaagugacaagccugcacgaagaugauuggagaucaagacccucaagagggcccgcccugacucccauuagggacgaggaauggggggggcacagcccgcguuccccccgcgggugggaucaggagccugcaagggagcaagccggcggcggguggagagccagacggcccagggcucgaagugucgaugcccuagaugacuugacuccuccuuccacagccgagucuggcucaagaucuccuacuucaaauggaggacgaucacgagcuuacaugccaccucgcucuaggucccgcgacgaucuguaugaucaggacgacaguagagauuucccucgaucucgcgauccccacuacgaugacuuucgaagccgagagcggccaccugccgacccccgaucacaccaccauaggaccagagauccccgcgacaacgggucucgaagcggagacuuaccguacgacgggcgccuccucgaggaagcggugcgcaaaaaagggagugaagaacgccgucgaccucacaaggaggaggaagaagaagcauacuauccucccgcuccacccccauacuccgagaccgacucucaggcgagucgggaacgucgguuaaaaaagaauuuggcccucagccgggaaagccuggugguuuag

SEQ ID NO: 275935 - RNA, 1776 nt, Artificial Sequence
  derived and/or modified sequence
augcaacaggacggccucggcguggguacccgcaaugggucuggaaaaggacgcucaguacauccuucuuggcccuggugcgccccucguccucuccgcuauuucgguagagaugcccgugcucgcagagcccagaccgcagcuauggcccucgcuauucaagucacugucucaaauccguaccauguggugauccuguuucagcccguaacuuugccuugcaccuaucagaugacguccacuccaacccaacccauagucauuuggaaauacaagaguuuuugcagggauagaauugcagaugcuuuuagcccagccuccguugacaaucaacucaaugcacagcucgcugcagggaaccccggauacaaccccuauguggagugccaggauuccgugcggacaguuaggguugucgcaacaaagcagggcaaugcuguuacacucggggauuacuaccaaggacggagaauuacaauaacaggaaacgccgaucucaccuucgaucagaccgcguggggggacaguggaguguauuauugcagugucguauccgcucaagaucuccagggaaauaacgaagcuuaugccgaacugauugugcuggggcguacauccggcguggccgagcuucugccaggguuccaagccggccccaucgaagauuggcuguuugucgucguaguuugucucgccgcuuuccugaucuuuuuacugcugggaauauguuggugucagugcugcccucauacaugcuguugcuauguacgauguccuuguugucccgauaaaugcugcugccccgaagcucuauaugcugccggcaaggcugcuacuucaggcgugcccucaauuuacgcaccaucuaccuacgcucaccucuccccugcuaagaccccacccccccccgcuaugauucccauggguccugccuacaacggguaccccggcggcuacccuggagauguagacagauccagcucugugagaagcgguuauagaauccaggccucucagcaagacgauagcaugcgggugcucuacuacauggaaaaagaguuggcuaauuuugacccgucgcggcccggaccaccuagcggcagaguugaacgcgccauguccgaagugacaagccugcacgaagaugauuggagaucaagacccucaagagggcccgcccugacucccauuagggacgaggaguggggcggacacucuccuaggagcccacgaggaugggaucaagagccagccagggagcaggcgggcgguggauggagagcgcggcgcccccgcgcgaggucaguagaugcucuggacgacuugacaccaccaaguacugccgaauccgggagccgcucaccaacuaguaauggaggaagaucgcgagccuacaugccaccacgcucacgguccagggaugaucuguacgaucaggacgauagccgagacuuucccaggucaagagauccacauuaugaugauuuccgcucgcgagagcgcccaccugccgauccucgaagccaccaccacagaacucgggacccacgcgacaacgguucuagaucuggagaccugccauacgauggaagacugcuugaagaggccguucggaaaaaggguucagaggaaagacgucggccccauaaggaagaggaggaagaggccuacuaucccccugcuccacccccguauagcgagacugacucacaagccagucgggaaagacgccugaagaagaaucucgcucugaguagggagagccuaguuguuuag

SEQ ID NO: 275936 - DNA, 342 bp, Artificial Sequence
  derived and/or modified sequence
atgcagaaggtcaccttaggactcctcgtctttttggcgggcttccctgtcctggacgccaacgatctggaggacaagaacagccctttttactacgattggcactcactgcaggtgggcggactcatctgtgcgggagtgctatgcgccatgggtataattattgtcatgagcgagtggagatcctctggcgagcaagcagggagaggctggggctctccccccctcaccacccaactgagcccaactggcgccaagtgcaagtgcaaattcgggcagaaaagcgggcaccaccccggtgagacacccccattaatcacgccgggatccgcgcagtcttag

SEQ ID NO: 275937 - DNA, 342 bp, Artificial Sequence
  derived and/or modified sequence
atgcagaaggtgaccctgggcctgctggtgttcctggccggcttccctgtgctggatgccaatgacctggaggacaagaacagccccttctactatgactggcacagcctgcaggtgggcggcctcatctgtgccggcgtgctgtgtgccatgggcatcatcatcgtgatgtctgagtggaggagcagtggagagcaggccggccggggctggggcagcccccccctgaccacccagctgagccccactggagccaagtgcaagtgcaagtttggccagaagagcggccaccaccctggagagaccccacccctcatcaccccaggcagcgcccagagctag

SEQ ID NO: 275938 - DNA, 342 bp, Artificial Sequence
  derived and/or modified sequence
atgcagaaggtgaccctgggcctgctggtgttcctggccggcttccctgtcttggacgctaacgacctggaagacaagaacagccctttttattacgattggcacagtctgcaggtgggcggactcatatgcgcaggagtgctatgcgctatgggcatcatcatcgtgatgagtgaatggcggtcttctggcgagcaggcgggacgcggctggggaagtcctcccctcacgacacagctgtcacctacaggtgcgaaatgcaagtgcaaattcggccagaagagtggacatcaccccggagagacgcccccactgattactcctgggagtgcccagtcatag

SEQ ID NO: 275939 - DNA, 342 bp, Artificial Sequence
  derived and/or modified sequence
atgcagaaagttactctagggctgctcgtgttccttgccggattcccagtgctagacgctaacgatcttgaggacaagaatagcccattctattatgactggcacagcctgcaggttggtggattaatttgcgctggggtgctgtgcgccatgggcattattattgtaatgagcgaatggcgcagttccggggaacaggcagggaggggatggggatctccacctctgaccacgcaactgagccccacaggcgctaagtgcaaatgtaaattcgggcaaaagtcaggtcatcatcctggtgagactccaccattaataactcctggttccgcccaaagttag

SEQ ID NO: 275940 - DNA, 342 bp, Artificial Sequence
  derived and/or modified sequence
atgcagaaggtgaccctgggcctgctggtgttcctggccggcttccccgtgctggacgccaacgacctggaggacaagaacagccccttctactacgactggcacagcctgcaggtgggcggcctgatctgcgccggcgtgctgtgcgccatgggcatcatcatcgtgatgagcgagtggagaagcagcggcgagcaggccggcagaggctggggcagcccccccctgaccacccagctgagccccaccggcgccaagtgcaagtgcaagttcggccagaagagcggccaccaccccggcgagaccccccccctgatcacccccggcagcgcccagagctag

SEQ ID NO: 275941 - protein, 586 aa, Artificial Sequence
  derived and/or modified sequence
MVHSSMGAPEIRMSKPLEAEKQGLDSPSEHTDTERNGPDTNHQNPQNKTSPFSVSPTGPSTKIKAEDPSGDSAPAAPLPPQPAQPHLPQAQLMLTGSQLAGDIQQLLQLQQLVLVPGHHLQPPAQFLLPQAQQSQPGLLPTPNLFQLPQQTQGALLTSQPRAGLPTQPPKCLEPPSHPEEPSDLEELEQFARTFKQRRIKLGFTQGDVGLAMGKLYGNDFSQTTISRFEALNLSFKNMCKLKPLLEKWLNDAETMSVDSSLPSPNQLSSPSLGFDGLPGRRRKKRTSIETNVRFALEKSFLANQKPTSEEILLIAEQLHMEKEVIRVWFCNRRQKEKRINPCSAAPMLPSPGKPASYSPHMVTPQGGAGTLPLSQASSSLSTTVTTLSSAVGTLHPSRTAGGGGGGGGAAPPLNSIPSVTPPPPATTNSTNPSPQGSHSAIGLSGLNPSTGSTMVGLSSGLSPALMSNNPLATIQALASGGTLPLTSLDGSGNLVLGAAGAAPGSPGLVTSPLFLNHAGLPLLSTPPGVGLVSAAAAAVAASISSKSPGLSSSSSSSSSSSSSTCSETAAQTPGGPGGPEAGSKPE

SEQ ID NO: 275942 - DNA, 1761 bp, Artificial Sequence
  derived and/or modified sequence
atggttcactcctccatgggcgcacctgagatccggatgtctaagcccttagaggcggagaagcagggccttgatagtccaagcgaacataccgacacagagcggaacggaccagacaccaaccaccagaatccacagaataagacaagtcccttcagtgtgagcccaaccggcccctcgactaagattaaagccgaggacccatctggagactctgcgcccgcagcgccactgcctcctcaacccgcccagcctcatctcccgcaggcccagctaatgctgaccggtagccagctcgccggcgatatccagcagctactacaactacagcagctggtactcgtaccgggccaccacctccagccccctgctcaattcctcctcccacaggctcaacagtcgcaacccggccttttgccgacccccaacttgtttcaactccctcagcagacacagggggccttgctaacctcccaacctagggccgggctgcccactcagccccccaaatgtcttgagccgcccagccatcctgaggagccttcagacctggaggagctggagcagttcgcccgcaccttcaaacaaaggaggatcaagctggggttcacccagggggacgtggggctggcgatggggaagctgtacggaaatgacttttcccaaacaaccatctccaggtttgaggctctcaatctgagctttaagaatatgtgtaaactgaagcctttgctggagaaatggttaaatgatgccgaaaccatgagcgtggactcctctctgccttccccaaatcaactgagctctccatctcttgggtttgacgggctgcccggaagacgccgaaagaaacgtaccagtatcgaaaccaacgtgcgcttcgccctcgagaaatctttcctcgccaaccaaaaacccactagtgaggagatcctgctgatcgctgagcagctacatatggagaaggaagtcatacgtgtatggttctgcaatagacggcagaaggagaagcgcataaatccctgcagcgcagccccaatgcttccatcccccgggaaacctgcatcctactcaccacacatggtcacccctcagggcggcgctggtaccctgcccctgagtcaggcgtcttcctctttgtcaactactgtcaccactctgtctagcgccgtcggaactctccacccatctagaactgccggggggggtggaggcggggggggggctgcaccccctcttaattccatcccatccgtcacaccgcccccaccagctacgacaaattctacaaatccttccccgcagggcagtcatagtgccatcgggcttagcggactcaatccatcaacaggctctactatggtgggactgagcagcggtctaagcccggctctgatgagcaataaccccctagccaccatccaggctctggcatcgggcggcaccttgcctctcacctcgctggatgggtccggtaacctggtgctgggcgctgcaggggcagcccctggttcccctgggctcgtgacctcccctctctttctcaaccacgccggtctccccttgttgagcactcccccaggagtggggttggtatccgctgccgcggccgctgtcgctgcaagcatttcatcaaagagcccagggctgtcaagttcctctagttcttcttcctcgagcagcagtagtacatgtagcgaaactgccgctcagactccgggtggacccggcggaccagaggccggcagcaaacctgaatag

SEQ ID NO: 275943 - DNA, 1761 bp, Artificial Sequence
  derived and/or modified sequence
atggtgcacagctccatgggcgcccctgagatccgcatgagcaagcccctggaggccgagaagcagggcctggacagccccagcgagcacacagacacagaaagaaatggaccagacaccaaccaccagaacccccagaacaagaccagccccttctctgtgagccccaccggccccagcaccaagatcaaggccgaggaccccagcggggacagcgccccagctgcccccctgcccccccagcctgcccagccccacctgccccaggcccagctgatgctgaccggcagccagctggccggggacatccagcagctgctgcagctgcagcagctggtgctggtgcccggccaccacctgcagcccccagcccagttcctgctgccccaggcccagcagagccagcccggcctgctgcccacccccaacctcttccagctgccccagcagacccagggcgccctgctgaccagccagccccgggccggcctgcccacccagccccccaagtgcctggagccccccagccaccctgaggagcccagcgacctggaggagctggagcagtttgcccggaccttcaagcagaggcgcatcaagctgggcttcacccagggagatgtgggcctggccatgggcaagctgtatggaaatgacttcagccagaccaccatcagcagatttgaggccctgaacctgtccttcaagaacatgtgcaagctgaagcccctgctggagaagtggctgaatgatgctgagaccatgtctgtggacagcagcctgcccagccccaaccagctgagcagccccagcctgggctttgatggcctgcccggcagaagaaggaagaagaggaccagcattgagaccaacgtgcgctttgccctggagaagagcttcctggccaaccagaagcccaccagcgaggagatcctgctgattgctgagcagctgcacatggagaaggaggtgatccgggtgtggttctgcaacagacggcagaaggagaagaggatcaacccctgcagcgctgcccccatgctgcccagccctgggaagccagccagctacagcccccacatggtgaccccccagggcggggccggcaccctgcccctgagccaggccagcagcagcctgagcaccaccgtgaccaccctgagcagcgctgtgggcaccctgcaccccagcaggacagctgggggcggcggcggcggcggcggggccgccccacccctgaacagcatccccagcgtgaccccacctcctccagccaccaccaacagcaccaaccccagcccccagggcagccacagcgccatcggcctgagcggcctgaaccccagcacaggcagcaccatggtgggcctgagcagcggcctgagccctgccctgatgagcaacaaccccctggccaccatccaggccctggccagcggcggcaccctgcccctgaccagcctggatggcagcggcaacctggtgctgggcgctgctggagctgcccctggcagccctggcctggtgaccagccccctcttcctgaaccacgccggcctgcccctgctgagcaccccacctggggtgggcctggtgtctgctgctgctgctgctgtggccgccagcatcagcagcaagagccctggcctgagcagcagcagcagcagcagcagcagcagcagcagcagcacctgcagcgagacagctgcccagaccccaggcggccctgggggccctgaggccggcagcaagccagagtag

SEQ ID NO: 275944 - DNA, 1761 bp, Artificial Sequence
  derived and/or modified sequence
atggtgcacagcagcatgggcgcccccgagatccggatgagcaagcctcttgaggccgaaaaacagggactcgactcacccagtgagcatactgacacggaaagaaatgggccggacaccaaccatcagaatccccagaataagacctccccgttctcggttagccccacaggtccatcaactaaaattaaggctgaagatccaagtggcgatagtgcccctgccgcgccactgcctccccagccagcccaaccacaccttcctcaagcacaactgatgctaactggttcacagttagctggggacattcagcaattgttgcagttacagcagttggtcctcgttcctgggcatcatctgcagcctcctgcccagtttctgctgccccaggctcagcagtcacagcctggtctcttgcccacccccaacttgttccagttacctcagcaaacccagggagctctgctgacctcgcaaccgcgcgccgggctccccacccaaccccccaaatgtttggagcctcctagtcatcccgaggagccgtccgacctggaggagctggaacaattcgccaggacatttaagcagagacgcattaaactgggcttcactcagggagatgtgggacttgccatgggaaaactgtatggaaacgacttcagccagactacaatctccaggttcgaggctctgaacctgtcattcaaaaatatgtgtaagttgaaacccttgctcgagaaatggcttaatgacgcagaaaccatgagtgttgactccagtctgccatcgcctaaccaactatctagcccaagcctgggatttgatggcctgccgggaagaagaaggaagaagcgaacctctattgagacaaacgtaaggtttgcgttggagaaatcttttctggccaaccagaagcctacctcagaagagattctactgatcgctgagcaattgcacatggaaaaagaggtgatcagggtgtggttctgtaaccgccgacagaaagaaaagaggattaacccttgttccgctgctcctatgctcccatctccaggcaaaccagcttcctactcaccccacatggtgacaccgcagggtggagccgggaccctgccactgtcccaagcaagctcctcgttgtccaccaccgttacaacactttcctctgcagttggcaccttgcaccctagtcggactgcaggcggcggaggggggggcggaggtgcagccccccccctgaatagtatcccatctgtgacacctcccccacccgccacgacaaactctaccaacccaagcccacagggatctcatagtgctatcggcctctctgggttgaatcccagcactggtagcactatggtggggttgtcgtcgggtttgtcacccgcactcatgtccaataatcccttggcaaccatccaggcacttgctagtggcggtactctgcctctcacatctttagacggctctggtaatctcgtattgggcgccgctggtgctgcaccgggttcacctggccttgtcacatctcccctctttttgaaccacgcgggtttgccactcctgagcacgccccctggtgtcggactagtgtcagctgcagcagcagctgtggctgcctcgatttcctccaaatcccccgggctaagctcttcttcctcttcgtcaagctcaagctcatcttccacatgtagcgagactgccgctcaaacacctggtgggcccggcgggcctgaagccggcagcaagcccgaatag

SEQ ID NO: 275945 - DNA, 2053 bp, Artificial Sequence
  derived and/or modified sequence
ctcggcccccagagagggtggggagatgacacagttgttcccccagccctggcggggcgggcagcatggttcactccagcatgggggctccagaaataagaatgtctaagcccctggaggccgagaagcaaggtctggactccccatcagagcacacagacaccgaaagaaatggaccagacactaatcatcagaacccccaaaataagacctccccattctccgtgtccccaactggccccagtacaaagatcaaggctgaagaccccagtggcgattcagccccagcagcacccctgccccctcagccggcccagcctcatctgccccaggcccaactcatgttgacgggcagccagctagctggggacatacagcagctcctccagctccagcagctggtgcttgtgccaggccaccacctccagccacctgctcagttcctgctaccgcaggcccagcagagccagccaggcctgctaccgacaccaaatctattccagctacctcagcaaacccagggagctcttctgacctcccagccccgggccgggcttcccacacagccccccaaatgcttggagccaccatcccaccccgaggagcccagtgatctggaggagctggagcaattcgcccgcaccttcaagcaacgccgcatcaagctgggcttcacgcagggtgatgtgggcctggccatgggcaagctctacggcaacgacttcagccagacgaccatttcccgcttcgaggccctcaacctgagcttcaagaacatgtgcaaactcaagcccctcctggagaagtggctcaacgatgcagagactatgtctgtggactcaagcctgcccagccccaaccagctgagcagccccagcctgggtttcgacggcctgcccggccggagacgcaagaagaggaccagcatcgagacaaacgtccgcttcgccttagagaagagttttctagcgaaccagaagcctacctcagaggagatcctgctgatcgccgagcagctgcacatggagaaggaagtgatccgcgtctggttctgcaaccggcgccagaaggagaaacgcatcaacccctgcagtgcggcccccatgctgcccagcccagggaagccggccagctacagcccccatatggtcacaccccaagggggcgcggggaccttaccgttgtcccaagcttccagcagtctgagcacaacagttactaccttatcctcagctgtggggacgctccaccccagccggacagctggagggggtgggggcgggggcggggctgcgccccccctcaattccatcccctctgtcactcccccacccccggccaccaccaacagcacaaaccccagccctcaaggcagccactcggctatcggcttgtcaggcctgaaccccagcacgggaagcacaatggtggggttgagctccgggctgagtccagccctcatgagcaacaaccctttggccactatccaagccctggcctctggtggaaccctgccccttaccagccttgatggcagcgggaatctggtgctgggggcagccggtgcagccccggggagccctggcctggtgacctcgccgctcttcttgaatcatgctgggctgcccctgctcagcaccccgcctggtgtgggcctggtctcagcagcggctgcggctgtggcagcctccatctccagcaagtctcctggcctctcctcctcatcctcttcatcctcatcctcctcctcctccacttgcagcgagacggcagcacagacccctggaggtccaggggggcccgaggcagggtccaaacctgagtgagggccagccatgcctcccctcccattcctctggtccctgccttggtcccttgcctgggaagagggcgaggaggccagtggtggggacgcagagggtcctcagagcaggagtgacaagggaggaaagaccaaaaaaacaaccaaccaaaaaaaaaaaaaaaaaggaaagaaactaaccaacaaaagagaaaaccaaaaataatcacaacagaaaccagctgccccaaa

SEQ ID NO: 275946 - DNA, 1761 bp, Artificial Sequence
  derived and/or modified sequence
atggtgcatagctccatgggagcaccagagatacggatgtctaaaccccttgaggccgagaagcaggggctcgattccccgagcgagcacaccgacacggagcggaacgggccagacaccaaccaccagaacccacaaaataaaacatcgccatttagtgtatctccgactggtccatcaacaaaaatcaaagccgaagatccgtcaggtgactcagctccggctgctcctttaccccctcagccggctcagcctcatctgccccaggcccagctcatgctcacgggcagccagcttgcgggagacattcagcaactgctacaactccagcagttggtgctggtgccagggcatcacctgcaacccccagcccaattcttgctcccccaagctcagcagtcccagccgggtttgcttcctacccctaacctgtttcaacttcctcaacaaacccaaggtgcattgttgacatctcagcccagagccggactgccaacccagcctccaaaatgccttgagcctccttcgcacccagaggagccttctgacctggaggagttggaacaattcgcccgaacgtttaaacagcgtcggattaagctgggctttacccagggcgatgtcgggctggccatgggcaaactctacgggaacgatttttcccagaccacgatcagtaggttcgaggccctgaatttgtctttcaaaaatatgtgtaagttgaagcccctccttgagaagtggttgaacgacgccgagaccatgagcgtggattcgtctctcccctcgcctaaccagcttagttccccctctctcggcttcgacgggctgccagggaggaggcggaaaaaacgtacgtccattgagaccaatgttaggttcgcattagaaaaaagctttttggccaaccagaagccaaccagcgaggaaattttgctaatcgccgaacagctccacatggaaaaggaagttattcgtgtttggttctgcaaccgtcgacaaaaggagaagcgcataaatccctgctcagcagctcccatgctgcccagccccggtaagccagcttcttacagtccgcacatggttacgccacagggcggagccggaactttacccctctcccaggctagttcctccctcagtactaccgtaaccacattgagcagcgcagtcggcaccctgcacccatcgcgcactgcgggtggtgggggtggcggaggcggtgcagctccccctctcaacagcatcccctcagtcactccccctcccccagccacgaccaactccaccaatccgagcccacaaggcagccactccgctatcggtctgagcggactaaaccccagcacagggagcaccatggtggggttgagcagcggccttagcccagccctcatgtccaacaatcctctggctacaatacaggctctggctagcggagggacactgcccctcacttcactggatgggagtggtaatctcgttttaggtgctgccggagctgcccctggctcgccgggtctggttaccagtccgctcttcctgaatcatgccggtctaccactattgtcaacacccccaggcgtgggcttggtttcagccgctgcagcagcagttgccgctagtatcagctcgaaatcccccggtctcagcagctcttctagcagcagctccagtagctcctccagtacttgttccgaaacggcagcacagacacctggaggacccggaggacccgaggctggatccaaacctgagtag

SEQ ID NO: 275947 - DNA, 1761 bp, Artificial Sequence
  derived and/or modified sequence
atggtgcacagcagcatgggcgcccccgagatcagaatgagcaagcccctggaggccgagaagcagggcctggacagccccagcgagcacaccgacaccgagagaaacggccccgacaccaaccaccagaacccccagaacaagaccagccccttcagcgtgagccccaccggccccagcaccaagatcaaggccgaggaccccagcggcgacagcgcccccgccgcccccctgcccccccagcccgcccagccccacctgccccaggcccagctgatgctgaccggcagccagctggccggcgacatccagcagctgctgcagctgcagcagctggtgctggtgcccggccaccacctgcagccccccgcccagttcctgctgccccaggcccagcagagccagcccggcctgctgcccacccccaacctgttccagctgccccagcagacccagggcgccctgctgaccagccagcccagagccggcctgcccacccagccccccaagtgcctggagccccccagccaccccgaggagcccagcgacctggaggagctggagcagttcgccagaaccttcaagcagagaagaatcaagctgggcttcacccagggcgacgtgggcctggccatgggcaagctgtacggcaacgacttcagccagaccaccatcagcagattcgaggccctgaacctgagcttcaagaacatgtgcaagctgaagcccctgctggagaagtggctgaacgacgccgagaccatgagcgtggacagcagcctgcccagccccaaccagctgagcagccccagcctgggcttcgacggcctgcccggcagaagaagaaagaagagaaccagcatcgagaccaacgtgagattcgccctggagaagagcttcctggccaaccagaagcccaccagcgaggagatcctgctgatcgccgagcagctgcacatggagaaggaggtgatcagagtgtggttctgcaacagaagacagaaggagaagagaatcaacccctgcagcgccgcccccatgctgcccagccccggcaagcccgccagctacagcccccacatggtgaccccccagggcggcgccggcaccctgcccctgagccaggccagcagcagcctgagcaccaccgtgaccaccctgagcagcgccgtgggcaccctgcaccccagcagaaccgccggcggcggcggcggcggcggcggcgccgccccccccctgaacagcatccccagcgtgaccccccccccccccgccaccaccaacagcaccaaccccagcccccagggcagccacagcgccatcggcctgagcggcctgaaccccagcaccggcagcaccatggtgggcctgagcagcggcctgagccccgccctgatgagcaacaaccccctggccaccatccaggccctggccagcggcggcaccctgcccctgaccagcctggacggcagcggcaacctggtgctgggcgccgccggcgccgcccccggcagccccggcctggtgaccagccccctgttcctgaaccacgccggcctgcccctgctgagcaccccccccggcgtgggcctggtgagcgccgccgccgccgccgtggccgccagcatcagcagcaagagccccggcctgagcagcagcagcagcagcagcagcagcagcagcagcagcacctgcagcgagaccgccgcccagacccccggcggccccggcggccccgaggccggcagcaagcccgagtag

SEQ ID NO: 275948 - protein, 707 aa, Artificial Sequence
  derived and/or modified sequence
MRNGGPCQPLAAGPRAEGASVNWSVTAWGPGTQACIDENLEVVRFLVEQGATVNQADNEGWTPLHVAASCGYLDIARYLLSHGANIAAVNSDGDLPLDLAESDAMEGLLKAEIARRGVDVEAAKRAEEELLLHDTRCWLNGGAMPEARHPRTGASALHVAAAKGYIEVMRLLLQAGYDPELRDGDGWTPLHAAAHWGVEDACRLLAEHGGGMDSLTHAGQRPCDLADEEVLSLLEELARKQEDLRNQKEASQSRGQEPQAPSSSKHRRSSVCRLSSREKISLQDLSKERRPGGAGGPPIQDEDEGEEGPTEPPPAEPRTLNGVSSPPHPSPKSPVQLEEAPFSRRFGLLKTGSSGALGPPERRTAEGAPGAGLQRSASSSWLEGTSTQAKELRLARITPTPSPKLPEPSVLSEVTKPPPCLENSSPPSRIPEPESPAKPNVPTASTAPPADSRDRRRSYQMPVRDEESESQRKARSRLMRQSRRSTQGVTLTDLKEAEKAAGKAPESEKPAQSLDPSRRPRVPGVENSDSPAQREAPDGQGPGPQAAREHRKVGKEWRGPAEGEEAEPADRSQESSTLEGGPSARRQRWQRDLNPEPEPESEEPDGGFRTLYAELRRENERLREALTETTLRLAQLKVELERATQRQERFAERPALLELERFERRALERKAAELEEELKALSDLRADNQRLKDENAALIRVISKLSK

SEQ ID NO: 275949 - DNA, 183 bp, Artificial Sequence
  derived and/or modified sequence
aaaggctgggtgagccacctgttcctggcccccaccaactttgaggagttcaccgccccagccaccccaccccactgcagccagtgcctgcggagcaactgcagcacctgggccacagctgccatcatcgagaggagcctgcaggtgcccttcctgtacctgagcaccccaggcggccactag

SEQ ID NO: 275950 - DNA, 2124 bp, Artificial Sequence
  derived and/or modified sequence
atgcgtaatggcggaccttgccagccattggccgccgggccaagggccgagggggcctccgttaattggagtgtgactgcctgggggcccggtacccaggcctgtatagacgagaacttggaagtggtgaggttcctggtggagcagggagctactgtgaaccaggccgacaacgaaggatggacacccctgcacgtcgccgcgtcctgcggatatttagacattgccaggtacctgctgtctcacggggccaacatcgcagccgtcaatagcgatggcgacctccccctggacctcgccgagtccgacgccatggagggactgctcaaagccgagatcgcgcgacgcggggtcgacgtggaggccgccaaacgggctgaagaagagctattgctacatgatacgcggtgttggctgaatgggggagcaatgccagaggcacgccacccacggacaggtgcctcagctctccacgtcgccgctgcaaaggggtacatcgaagtgatgaggctgctgctccaggcaggctacgaccctgagctgcgcgatggagacgggtggacgccgcttcacgccgccgctcattggggcgtagaagatgcctgtaggctcttggccgagcatgggggcggtatggatagcttaacgcatgcaggtcaacggccatgtgatttagccgatgaggaggtgctgtccttactcgaagagctggccaggaaacaggaggacctgagaaatcagaaagaggcctcgcagagtcgaggacaggaacctcaggcaccatcctcctcgaaacaccggagatcttcagtgtgccgactgtcatctagagagaagatctcactgcaggacctctctaaagagaggagaccggggggggccggagggccccccatccaagatgaggatgaaggagaagaaggacccaccgagccaccccccgccgaaccccggactttaaacggcgtttctagccccccacatccaagtccaaagtctccggtgcagctagaggaagcccccttttccagaaggtttggactgctgaagacagggtccagcggcgcactcggcccacctgaaagaaggaccgccgaaggtgcccccggagctggcctccaaaggtccgcttccagcagctggctggagggcaccagcactcaggctaaggagttgcgccttgctagaatcacgccgactccatctccgaaactgccggagccctcggtgctctccgaggtgacaaaaccccctccgtgcttggagaattcttctccaccctccaggatcccagagccagagtcccccgcaaagcctaatgtcccaacggcaagcacagcgcccccggccgatagccgggaccgccggaggtcatatcaaatgccagtcagagacgaggaaagtgaatcacagcgcaaggcaaggtctcgcttgatgagacagtctcgccgaagtacccagggggtcacactgactgacctcaaggaagctgaaaaggcggcagggaaggcacctgaaagtgagaaacccgcccaaagcctggatcccagccgtaggcctcgcgttcctggtgtcgagaactctgatagtccagcccagcgtgaggcccccgacggccagggccctggaccacaggccgcccgcgagcaccgcaaggtgggtaaggaatggagggggccagccgaaggcgaggaagctgagccagccgatcgctctcaagaatcctctaccctagagggcggcccgagtgccagaagacagcgctggcaacgtgatcttaaccccgaaccagaacctgaaagcgaggaaccggacgggggatttaggaccctgtatgccgagctgcgtcgcgaaaatgaaaggcttcgagaagcattgactgagaccacactacgtctggcccagctgaaagtggaattggaacgggccactcaacggcaagaaaggtttgccgaaagacctgctttgctggagttagaacgtttcgagcgacgcgcacttgaacgcaaggccgcggagttagaggaagagctcaaggcactgtcagatctccgcgccgacaatcaacggcttaaggatgaaaatgcagcccttatcagagtaatttcaaagctgagcaaatag

SEQ ID NO: 275951 - DNA, 2124 bp, Artificial Sequence
  derived and/or modified sequence
atgagaaatggaggcccctgccagcccctggccgccggccccagggctgagggcgcctctgtgaactggagcgtgacagcctggggccctggcacccaggcctgcattgatgagaacctggaggtggtgcgcttcctggtggagcagggcgccaccgtgaaccaggccgacaatgaaggctggacccccctgcacgtggccgccagctgtggctacctggacatcgcccgctacctgctgagccacggggccaacattgctgctgtgaacagtgatggagacctgcccctggacctggccgagagtgatgccatggagggcctgctgaaggccgagatcgccaggagaggagtggatgtggaggccgccaagagagctgaggaggagctgctgctgcatgacacccgctgctggctgaatggaggagccatgcctgaggcccggcaccccaggactggagccagcgccctgcacgtggccgccgccaagggctacatcgaggtgatgaggctgctgctgcaggccggctatgaccctgagctgagagatggagatggctggacccccctgcacgccgccgcccactggggcgtggaggatgcctgccgcctgctggccgagcacggcggcggcatggacagcctgacccacgccggccagaggccctgtgacctggctgatgaggaggtgctgagcctgctggaggagctggccaggaagcaggaggacctgaggaaccagaaggaggccagccagagccggggccaggagccccaggcccccagcagcagcaagcacagaagaagctctgtgtgccgcctgagcagccgggagaagatcagcctgcaggacctgagcaaggagaggaggcctggaggagctgggggcccccccatccaggatgaagatgaaggagaggagggccccacagagcccccacctgctgagcccaggaccctgaatggagtgagcagccccccccaccccagccccaagagccctgtgcagctggaggaggcccccttcagccgccgcttcggcctgctgaagacaggcagcagcggggccctgggccccccagagaggagaacagctgagggcgcccctggagctggcctgcagaggtctgccagcagctcctggctggagggcaccagcacccaggccaaggagctgcggctggcccgcatcacccccacccccagccccaagctgcctgagcccagcgtgctgtctgaggtgaccaagcccccaccctgcctggagaacagcagcccccccagccgcatccctgagcctgagagccctgccaagcccaacgtgcccacagccagcacagcccccccagctgacagccgggacagaagaagaagctaccagatgcctgtgagagatgaggagagcgagagccagaggaaggcccggagccggctgatgaggcagagcagaagaagcacccagggcgtgaccctgacagacctgaaggaggccgagaaggctgctgggaaggcccctgagagcgagaagccagcccagagcctggaccccagccggcggccccgggtgcctggggtggagaacagcgacagccctgcccagcgggaggccccagatggccagggccctggcccccaggccgcccgggagcacaggaaggtgggcaaggagtggaggggccctgctgagggggaggaggccgagcctgctgacaggagccaggagagcagcaccctggagggcggccccagcgcccggcggcagcgctggcagagggacctgaaccctgagcctgagcctgagagcgaggagccagatggcggcttccgcaccctgtatgcagagctgcggcgggagaatgaaaggctgcgggaggccctgacagagaccaccctgcggctggcccagctgaaggtggagctggagcgggccacccagaggcaggagagatttgctgagaggcctgccctgctggagctggagagatttgagcggcgggccctggagaggaaggctgctgagctggaggaggagctgaaggccctgagtgacctgcgggctgacaaccagaggctgaaggatgaaaatgctgccctgatccgggtcatcagcaagctgagcaagtag

SEQ ID NO: 275952 - DNA, 2124 bp, Artificial Sequence
  derived and/or modified sequence
atgcggaacggcggcccctgccagcccctggccgccggcccccgggccgaaggtgccagtgtgaactggtccgtgacggcttgggggcccggaacacaagcctgcatcgatgagaacctggaagttgttcggttcttggtggagcaaggcgcaacagtgaaccaggcggataatgaaggttggacaccactccacgtcgctgcttcctgcgggtacctcgacattgcccgttaccttctgtcgcacggagcgaatatcgccgcagtgaactccgacggagatctgcccttggatctggcagagtccgatgccatggagggcctgctgaaagcagaaattgcaagacgtggcgttgacgtcgaggctgcgaagagagccgaagaagagttactgctccatgacacccgctgctggctgaacggcggagccatgcccgaggcccgtcacccacgcactggcgcttccgcccttcacgttgctgcagctaagggctacatcgaggtgatgcggctgcttcttcaggcaggttatgatccagagctgagagacggcgatggatggaccccgttgcacgctgctgctcattggggagtggaagatgcctgtagacttctcgcagaacacggaggcgggatggactccctcactcacgccggacagaggccgtgcgatttggctgacgaagaagtgctaagtctccttgaggaactcgccaggaaacaggaagacttacggaaccaaaaagaagcctctcagagcagggggcaggagccccaggcaccctcaagctccaagcaccgcaggtcctctgtatgtagactctcttcccgcgagaaaatctcactacaggatctcagtaaagagcgtcggccgggcggcgccggtggcccacctatacaggatgaggatgagggtgaggaaggccctaccgaaccacctcccgcagagccgagaacattgaacggcgtgagctctcctccgcacccatcgcctaagtccccggtgcagctcgaggaagctccattttctagacgattcggactactgaagaccggatcttcaggcgctctgggcccgcccgagcgccggactgctgagggggcacctggagcaggactgcagagaagcgctagtagctcctggctagaggggacctctactcaggcaaaagagcttaggttggcccggataacaccaactccctcccctaaattgcccgagcctagcgtattgtcagaggtaactaaaccccctccttgcctagagaactcctcgccccctagcaggatccctgagcccgaatccccagcaaaacctaatgtacccaccgccagtactgccccccccgccgactccagagatagaaggagaagctatcagatgccagttcgggatgaggaatcagagagtcagagaaaggcacggagtagactcatgcgccagagcaggcgcagcacccaaggcgtcaccctgacagacctgaaggaggccgaaaaggcagccgggaaggctcccgaatctgaaaagcccgcacagagtctggacccttcgcgcaggcctagggtacccggggtcgagaattctgactctccagcacagagagaagctcctgatgggcaaggccccggacctcaggccgcacgggagcaccgcaaggtcgggaaggaatggagagggcccgcggaaggcgaggaggcagagcccgcagacaggagccaggagtccagcacccttgaaggaggcccttcggcgcgtcgacagcggtggcagagagaccttaaccctgagcccgaacctgagtctgaagaaccagacggtggtttccgtactctgtatgccgagctgcgccgagaaaatgagcgcctaagggaggcccttacggagaccactctccggctggcacagctgaaggtcgagttggaaagagcgacacagcggcaggaaagatttgccgagcgcccagcattgttagagctggaaagatttgagcggagagcgttggagcggaaagccgcagagctcgaggaggaactgaaggcactgtctgaccttagggcagataatcagcgcttaaaggacgagaatgccgccttgatccgagtaatctcaaaactatccaagtag

SEQ ID NO: 275953 - DNA, 2124 bp, Artificial Sequence
  derived and/or modified sequence
atgcggaatgggggtccctgtcagccactcgccgcagggcctcgcgctgagggggcaagcgtgaactggagcgtaaccgcttggggtccaggcacacaggcctgcatcgacgagaatctcgaggtggtgaggtttttagtcgagcagggtgctacagttaatcaagccgataatgaaggatggacacccctgcacgtcgctgctagctgtggctacttagatatcgccaggtatctgctgtcacacggcgcaaatattgccgctgtgaacagcgacggtgacctcccactggacctggctgaatctgatgcaatggagggcctgctcaaagcggaaattgccagaagaggggtggatgtcgaggccgctaagagagccgaagaggagctcttacttcacgacacccggtgctggctcaacggcggtgccatgccagaagctagacatcccagaaccggagccagtgctttgcacgtggccgctgccaagggttatatcgaggttatgcgcctgctgctgcaggctggatatgaccctgaactgcgcgatggagatggctggaccccgcttcacgccgcagcgcactggggagttgaggacgcttgccggctgctggctgaacatgggggtggcatggactcactcacccatgccggtcagaggccttgcgacttggccgacgaggaggtgctctccctgctcgaggagcttgcgagaaaacaggaggatctgcgcaaccagaaagaagcatctcagtcaagaggccaggagcctcaggcaccctcttccagtaaacatagaaggtcctcagtgtgtagacttagttcccgagagaagattagtttacaggacctgagtaaggaacggcgacctggaggcgctggcggtccccctatccaggacgaagacgaaggcgaggaggggcctacggagccaccacctgctgaacctcgcacccttaatggggtttcctcaccccctcacccttcaccgaaatcaccagtacaactggaggaagctccattctccagacgctttggcttgttaaagaccggaagctcaggtgcactgggacccccagaaagacgcacagcggagggggcacctggggctggtctccagagaagcgcctcctcaagctggttagaaggcacatctactcaggccaaagaattgcggctcgcacgcattacgccgacccccagtccgaaactgccagaaccttccgtcttgagtgaggtgacgaagccccctccttgcctcgagaacagtagcccaccctcccggattcccgaacctgagagcccagctaagcccaatgttcccactgcttctactgcccctcctgcagactccagagacaggcggaggtcgtaccagatgccagtgcgggacgaagaatcggagtcacagcgtaaggcaaggtcacgcctaatgagacagagccgcagaagtacacagggagtaacactgacagatctgaaggaggccgaaaaagctgccggtaaagcccctgagtcagaaaaacccgcacagtccttagatcctagccggcgtcctcgggtgcctggagttgagaattcagacagtccggcacaaagggaggcacctgacggccagggtcctggccctcaggccgctagagaacacagaaaagtaggtaaggagtggcgaggacctgcagaaggcgaggaggctgagcctgccgacagatcccaggagtcctctaccctggagggtgggccatccgcccgaaggcagaggtggcagagggatttgaacccagagcctgaaccagagtctgaagagcccgacggaggtttcaggactctgtatgccgaacttcggagagagaacgaaagactacgggaagctctgaccgagacaaccctcagactggcccagctgaaggtagaacttgagagagcaacgcagcgccaggaacgattcgccgagagaccagccctgttggaacttgagagatttgaaaggcgggctctcgaaaggaaagccgctgagcttgaggaggaacttaaagcgctcagtgacctgcgagcggataatcagcgcctgaaagacgaaaatgctgctctgattcgggtaatctctaagctgtcgaaatag

SEQ ID NO: 275954 - DNA, 2363 bp, Artificial Sequence
  derived and/or modified sequence
actccttcctcagctccagttcaggtcccggagcccacccagtgtccacaaggcctggggcaagtccctcctccgaccccctggacttcggcttttgtccccccaagttttggacccctaagggaagaatgagaaacggtggcccgtgtcagcccctggctgcagggccccgtgcagagggggcctcagtgaactggagtgtgacagcctggggcccaggcacacaggcctgcattgatgagaacctggaggtggtgcgcttcttggtggagcagggcgccactgtgaaccaggcagacaacgagggctggacgccactgcacgtggccgcctcctgtggctacctagatatcgccaggtacctcctgagccacggggccaacatcgccgccgtcaacagtgacggggacctgcccctggacctggccgagtcggacgccatggaggggctgctgaaggcggagatcgcccgccgaggtgtggatgtggaagcagccaagcgggcagaagaggaattgctccttcatgacacgaggtgctggctgaatgggggcgccatgccagaggcccggcacccccgcacaggcgcctctgccctgcacgtggctgctgccaagggctacattgaggtgatgaggttgctccttcaggctggctacgacccagagctccgggacggggacggctggactcccctgcacgcagcggcacactggggcgtggaggatgcctgccgcctgctggccgagcatggcgggggcatggactcactgacccatgcggggcagcgtccctgtgacctggccgatgaggaagtactgagcctgttggaggaactggcccggaaacaggaggaccttcggaaccaaaaagaagcttcccagagccggggccaggagccccaagcgccctctagcagcaaacacagaaggagctctgtgtgtcgtctgagcagtcgcgagaagatttccctccaggacttgtccaaggagcgccggcctggtggggctggggggccccccatccaggacgaggatgagggggaagaaggtcccaccgaaccaccccctgcagaacccagaaccctcaatggcgtctcctccccgccgcaccccagccctaagagtcccgtgcagcttgaagaggcccccttctccaggcgctttggcctcctgaagacagggagttctggtgccctgggtccccctgaaaggcggacagcggagggagcccctggggctgggctgcagcgctcggcttcctcctcctggctggaagggacctccactcaggccaaggagctccgtcttgccagaattaccccgaccccctccccgaagctgccggagccctctgtcctgtctgaggtcaccaagcctcctccttgcttggagaactcctcgcctccctccaggattccggagcctgaatccccagcgaagccaaacgtccccacagcctccacggcgcccccagcggactcccgggaccgacggaggtcctaccagatgcctgtgcgggatgaggagtcggaatcccagagaaaagctcgctcccgtctcatgcgccagtctcggaggtccacacagggtgtgactcttacagacctgaaggaggcagagaaggctgcagggaaggccccagagtcagagaagccggcgcagagcctggacccttcccgaaggccccgcgtccctggagtggagaactctgacagccctgcccagagagaggcgcccgacgggcagggtccgggaccgcaggcggccagggagcaccgcaaggtcggaaaggagtggagggggcctgcggagggggaggaggcggagccggctgaccgcagccaggagtccagcaccctggagggcggcccctcggcccgcaggcagcggtggcagcgggacctcaacccagaacctgagccagaatcggaagagccagacggaggctttaggacgctgtatgcagagctgcgcagggagaacgagcggcttcgcgaggccctgaccgagaccacgctgcggctggcgcagctcaaggtggagctggagcgggccacgcagaggcaagaacgcttcgctgagaggccagccctcctggaactggagagattcgagcgcagggccctggaacgcaaggccgcagagctggaggaggagctgaaggccctgtctgacctccgcgctgacaaccagcgcctcaaggatgagaatgcagcgttgatccgcgtcatcagcaaactctccaagtgacccggagggactttcccgcacccgtatttatacagctgcttctgccacacgcaccccttcccccgtgtgaacacgagtgacagggctccgggggaagtctcagagaagcca

SEQ ID NO: 275955 - DNA, 2124 bp, Artificial Sequence
  derived and/or modified sequence
atgagaaacggcggcccctgccagcccctggccgccggccccagagccgagggcgccagcgtgaactggagcgtgaccgcctggggccccggcacccaggcctgcatcgacgagaacctggaggtggtgagattcctggtggagcagggcgccaccgtgaaccaggccgacaacgagggctggacccccctgcacgtggccgccagctgcggctacctggacatcgccagatacctgctgagccacggcgccaacatcgccgccgtgaacagcgacggcgacctgcccctggacctggccgagagcgacgccatggagggcctgctgaaggccgagatcgccagaagaggcgtggacgtggaggccgccaagagagccgaggaggagctgctgctgcacgacaccagatgctggctgaacggcggcgccatgcccgaggccagacaccccagaaccggcgccagcgccctgcacgtggccgccgccaagggctacatcgaggtgatgagactgctgctgcaggccggctacgaccccgagctgagagacggcgacggctggacccccctgcacgccgccgcccactggggcgtggaggacgcctgcagactgctggccgagcacggcggcggcatggacagcctgacccacgccggccagagaccctgcgacctggccgacgaggaggtgctgagcctgctggaggagctggccagaaagcaggaggacctgagaaaccagaaggaggccagccagagcagaggccaggagccccaggcccccagcagcagcaagcacagaagaagcagcgtgtgcagactgagcagcagagagaagatcagcctgcaggacctgagcaaggagagaagacccggcggcgccggcggcccccccatccaggacgaggacgagggcgaggagggccccaccgagcccccccccgccgagcccagaaccctgaacggcgtgagcagccccccccaccccagccccaagagccccgtgcagctggaggaggcccccttcagcagaagattcggcctgctgaagaccggcagcagcggcgccctgggcccccccgagagaagaaccgccgagggcgcccccggcgccggcctgcagagaagcgccagcagcagctggctggagggcaccagcacccaggccaaggagctgagactggccagaatcacccccacccccagccccaagctgcccgagcccagcgtgctgagcgaggtgaccaagccccccccctgcctggagaacagcagcccccccagcagaatccccgagcccgagagccccgccaagcccaacgtgcccaccgccagcaccgccccccccgccgacagcagagacagaagaagaagctaccagatgcccgtgagagacgaggagagcgagagccagagaaaggccagaagcagactgatgagacagagcagaagaagcacccagggcgtgaccctgaccgacctgaaggaggccgagaaggccgccggcaaggcccccgagagcgagaagcccgcccagagcctggaccccagcagaagacccagagtgcccggcgtggagaacagcgacagccccgcccagagagaggcccccgacggccagggccccggcccccaggccgccagagagcacagaaaggtgggcaaggagtggagaggccccgccgagggcgaggaggccgagcccgccgacagaagccaggagagcagcaccctggagggcggccccagcgccagaagacagagatggcagagagacctgaaccccgagcccgagcccgagagcgaggagcccgacggcggcttcagaaccctgtacgccgagctgagaagagagaacgagagactgagagaggccctgaccgagaccaccctgagactggcccagctgaaggtggagctggagagagccacccagagacaggagagattcgccgagagacccgccctgctggagctggagagattcgagagaagagccctggagagaaaggccgccgagctggaggaggagctgaaggccctgagcgacctgagagccgacaaccagagactgaaggacgagaacgccgccctgatcagagtgatcagcaagctgagcaagtag

SEQ ID NO: 275956 - protein, 860 aa, Artificial Sequence
  derived and/or modified sequence
MLTRIENATQAQLPCLLVAGSGGAADCLAETLEDTLAPGSGGARQGEARDRIRRFFPKGDLEVLQAQSFHLEASLMDALLNDRPEFVRLLISHGLSLGHFLTPMRLAQLYSAAPSNSLIRNLLDQASHSAGTKAPALKGGAAELRPPDVGHVLRMLLGKMCAPRYPSGGAWDPHPGQGFGESMYLLSDKATSPLSLDAGLGQAPWSDLLLWALLLNRAQMAMYFWEMGSNAVSSALGACLLLRVMARLEPDAEEAARRKDLAFKFEGMGVDLFGECYRSSEVRAARLLLRRCPLWGDATCLQLAMQADARAFFAQDGVQSLLTQKWWGDMASTTPIWALVLAFFCPPLIYTRLITFRKSEEEPTREELEFDMDSVINGEGPVGTADPAEKTPLGVPRQSGRPGCCGGRCGGRRCLRRWFHFWGAPVTIFMGNVVSYLLFLLLFSRVLLVDFQPAPPGSLELLLYFWAFTLLCEELRQGLSGGGGSLASGGPGPGHASLSQRLRLYLADSWNQCDLVALTCFLLGVGCRLTPGLYHLGRTVLCIDFMVFTVRLLHIFTVNKQLGPKIVIVSKMMKDVFFFLFFLGVWLVAYGVATEGLLRPRDSDFPSILRRVFYRPYLQIFGQIPQEDMDVALMEHSNCSSEPGFWAHPPGAQAGTCVSQYANWLVVLLLVIFLLVANILLVNLLIAMFSYTFGKVQGNSDLYWKAQRYRLIREFHSRPALAPPFIVISHLRLLLRQLCRRPRSPQPSSPALEHFRVYLSKEAERKLLTWESVHKENFLLARARDKRESDSERLKRTSQKVDLALKQLGHIREYEQRLKVLEREVQQCSRVLGWVAEALSRSALLPPGGPPPPDLPGSKD

SEQ ID NO: 275957 - DNA, 474 bp, Artificial Sequence
  derived and/or modified sequence
atggccccccaggcccagcccctgcccctgctgggcaagtgcaaggccagcaacgcccccacccccagaccccccagaagacccacctggaagagaaagagcggcaaggtgagcaccaccgtgccccagccccagaccgtgcccggcagctggcccagagagagagagagaaagagagagagagacagaatcaacagcctgctgctgcagatcatcggccacagcaagcaggccctgcccggccccggcgagcccgcccagagactgacccccgcccccgccgaccccggcggcagaggcgagcagggcggcgtggccgcccagggcgccggcctggccgccggcagaagaagcgccgtgggccccagcaagctgtgcaacctggtgagcgccagcggcgccctggccgtgttcagcatcaccggcatgtgccccggcagagacgtgagcgacggcctgagaatgggccagtag

SEQ ID NO: 275958 - protein, 402 aa, Artificial Sequence
  derived and/or modified sequence
MGPLPAPSCTQRITWKGLLLTASLLNFWNPPTTAEVTIEAQPPKVSEGKDVLLLVHNLPQNLPGYFWYKGEMTDLYHYIISYIVDGKIIIYGPAYSGRETVYSNASLLIQNVTRKDAGTYTLHIIKRGDETREEIRHFTFTLYLETPKPYISSSNLNPREAMEAVRLICDPETLDASYLWWMNGQSLPVTHRLQLSKTNRTLYLFGVTKYIAGPYECEIRNPVSASRSDPVTLNLLHGPDLPRIYPSFTYYRSGENLDLSCFTESNPPAEYFWTINGKFQQSGQKLFIPQITRNHSGLYACSVHNSATGKEISKSMTVKVSGKWIPASLAVGFYVESIWLSEKSQENIFIPSLCPMGTSKSQILLLNPPNLSLQTLFSLFFCFLMADLVSGLKKVGRGLYQP

SEQ ID NO: 275959 - DNA, 1209 bp, Artificial Sequence
  derived and/or modified sequence
atgggccccctgccagcgccaagttgcacccaaagaattacatggaagggcctgttactgacagcttcattactcaatttttggaatccgccgacaacagctgaggtgacaattgaagcgcagccgcccaaggtgtctgagggcaaggatgtgctacttctggtccataatctgccgcaaaatctgcccggctacttttggtataagggtgagatgactgatctctatcactatatcatttcctacattgtggatggcaaaatcatcatctacgggccggcctatagcggacgggagacagtgtactcaaatgccagcctcttgatccaaaatgtgacccggaaggacgcgggcacatacaccctgcatatcataaagcgaggggatgagacacgggaggagatcagacacttcactttcactctctacctggagactccaaagccttatatctcctcttccaacctcaacccacgcgaggctatggaagctgtgcggttgatatgcgatccggagacactcgatgctagctatctatggtggatgaacggccagtctttacccgtcacccataggctgcaattgagcaagacgaacaggactctatatctgtttggagtgaccaagtatatcgccgggccctatgaatgtgaaatacgaaatcctgtgtcagcatccagaagcgatcctgttacactgaacctgctgcacggaccagatctcccaagaatttacccatccttcacctactatcggagtggtgaaaacttggacctgagctgttttaccgagtccaatcccccagctgagtacttctggacaattaatggtaaatttcagcagtctggtcagaagctgtttatccctcaaatcactaggaaccatagcggcctgtacgcctgcagcgtgcataactccgctacggggaaggaaatcagcaaatccatgacagtaaaggtgtccggaaagtggattccggcttccttagctgtaggcttttacgtggaaagcatatggctttccgagaagagccaggagaacatttttatacccagtctgtgccctatgggcacctcaaagagtcagatcctactgctgaaccccccaaatttatctctgcagaccctcttttcgctgttcttctgcttcctgatggctgaccttgtgagtggccttaagaaagtcggccggggattgtaccaaccgtag

SEQ ID NO: 275960 - DNA, 1209 bp, Artificial Sequence
  derived and/or modified sequence
atgggccccctgcctgcccccagctgcacccagaggatcacctggaagggcctgctgctgacagccagcctgctgaacttctggaacccccccaccacagctgaggtgaccatcgaggcccagccccccaaggtgtctgagggcaaggatgtgctgctgctggtgcacaacctgccccagaacctgcccggctacttctggtacaagggggagatgacagacctgtaccactacatcatctcctacatcgtggatggcaagatcatcatctacggccctgcctacagcggccgggagaccgtgtacagcaatgccagcctgctgatccagaatgtgaccaggaaggatgctggcacctacaccctgcacatcatcaagagaggagatgagacccgggaggagatccgccacttcaccttcaccctgtacctggagacccccaagccctacatcagcagcagcaacctgaacccccgggaggccatggaggccgtgcggctcatctgtgaccctgagaccctggatgccagctacctgtggtggatgaatggccagagcctgcctgtgacccaccggctgcagctgagcaagaccaacagaaccctgtacctgtttggagtgaccaagtacatcgccggcccctatgaatgtgagatccggaaccctgtgtctgccagcagaagtgaccctgtgaccctgaacctgctgcacggccctgacctgccccgcatctaccccagcttcacctactacagaagtggagagaacctggacctgagctgcttcacagagagcaaccccccagctgagtacttctggaccatcaacgggaagttccagcagagcggccagaagctgttcatcccccagatcaccaggaaccacagcggcctgtatgcctgcagcgtgcacaacagcgccaccgggaaggagatcagcaagtccatgacagtgaaggtgtctgggaagtggatcccagccagcctggccgtgggcttctacgtggagagcatctggctgtctgagaagagccaggagaacatcttcatccccagcctgtgccccatgggcaccagcaagagccagatcctgctgctgaacccccccaacctgagcctgcagaccctcttcagcctcttcttctgcttcctgatggctgacctggtgtctggcctgaagaaggtgggccggggcctgtaccagccctag

SEQ ID NO: 275961 - DNA, 1209 bp, Artificial Sequence
  derived and/or modified sequence
atgggccccctgcccgcccccagctgcacccagcggatcacctggaaagggttgctgctcactgccagtcttctcaacttttggaacccgcccactacagccgaggtgaccatcgaggcccaacctcctaaggtgtccgaaggcaaggacgtgcttcttctcgtgcataacctcccccagaacttgcccgggtacttttggtacaagggcgagatgacagatctgtatcactatattattagttacatcgtcgacggaaaaatcataatttatggaccagcctatagcggcagggagacagtatatagcaacgcttcactgctcatccagaacgtgaccaggaaagatgctgggacgtacacactccatattataaagcggggggacgagacaagggaggagattcgtcattttacatttacactgtatctggagactcccaaaccctatatttccagctccaatttgaatcccagagaagccatggaagccgtccgcctgatctgtgatcccgagacattagacgctagctatctctggtggatgaatggacagtctcttccggtaacacaccgacttcagttgtccaaaaccaatcggacattatatctgtttggggtcactaaatacatcgcaggtccttatgagtgtgaaatacgtaatccagtatcagcctctaggtccgatccggtcacccttaacctcctgcacggacccgatctccccaggatatacccatcctttacttactataggtctggagaaaatctcgacctttcttgcttcaccgagtctaatcctccggcagagtacttttggactataaatgggaagttccagcagtcgggccagaagctattcataccccaaatcacccgtaatcacagcggcctctacgcgtgctcagttcacaatagtgccacagggaaagagataagcaagtctatgactgtcaaggttagcgggaaatggattcctgcgagcctggccgtggggttctatgttgagagtatttggttgagcgagaagtcccaggaaaatattttcatcccctctctgtgcccaatgggcacatctaagtctcagatcctgttacttaaccctcctaacctgtctctccagacgcttttcagtctgttcttctgcttccttatggccgacttagtttctgggctcaaaaaagtgggtcgggggctttaccagccctag

SEQ ID NO: 275962 - DNA, 2073 bp, Artificial Sequence
  derived and/or modified sequence
cgtgctcagacagcttctggatcccaggctcatctccacagaggagaacacacaggcagcagagaccatggggcccctcccagccccttcctgcacacagcgcatcacctggaaggggctcctgctcacagcatcacttttaaacttctggaacccgcccaccactgccgaagtcacgattgaagcccagccacccaaagtttctgaggggaaggatgttcttctacttgtccacaatttgccccagaatcttcctggctacttctggtacaaaggggaaatgacggacctctaccattacattatatcgtatatagttgatggtaaaataattatatatgggcctgcatacagtggaagagaaacagtatattccaacgcatccctgctgatccagaatgtcacccggaaggatgcaggaacctacaccttacacatcataaagcgaggtgatgagactagagaagaaattcgacatttcaccttcaccttatacttggagactcccaagccctacatctccagcagcaacttaaaccccagggaggccatggaggctgtgcgcttaatctgtgatcctgagactctggacgcaagctacctatggtggatgaatggtcagagcctccctgtgactcacaggttgcagctgtccaaaaccaacaggaccctctatctatttggtgtcacaaagtatattgcaggaccctatgaatgtgaaatacggaacccagtgagtgccagtcgcagtgacccagtcaccctgaatctcctccatggtccagacctccccagaatttacccttcattcacctattaccgttcaggagaaaacctcgacttgtcctgcttcacggaatctaacccaccggcagagtatttttggacaattaatgggaagtttcagcaatcaggacaaaagctctttatcccccaaattactagaaatcatagcgggctctatgcttgctctgttcataactcagccactggcaaggaaatctccaaatccatgacagtcaaagtctctggtaagtggatcccagcatccttggcagtagggttttatgtggagtctatctggctttcagagaagagtcaggaaaacatttttattcccagcctgtgtcccatgggcacaagcaaatcccaaattctcctcctgaaccctcccaatttgtctctacagactctcttctccttgtttttctgttttcttatggctgaccttgtgtctggcctgaaaaaggtagggagggggctttatcagccctgagccctatgtggtagaagaggcttcagagagggacaagaaggagagtcctcaagatcaagttgcttctcgctgtcaccgacacatccccttctgccacgtcttttttttcttgtacctattccatgagctacaagggacagctgaggctttgaaacaagctcacacttttcccccagatgagaggaggaagccccttgggtgagggaggagcagctcagactctgcttcctgctctgctccgggctcctctggtgactggccctgcctcactcaacctggggtgggactagcgtgtgtgtagaaagggccctggtggcctgtcctgaatttggctaaattgagctgccagttgaagccaagcctcccccgggccaggctgcagggaaataagaagagagggagcctcagggcagactcctgagctgcgtcctggctctgaagtcaccagctgtatgaggctttgggcacagcacgtgggacacagcacggaggacagtgactgatgcagagctggaggaatagggagattcaccgttggggttattcatggcaggaaaggggcagtgccaaaaagtgtgtaattatagagagggtaagactaccagacactttatatatatctaatataagacttaccattaactatttctatgtgtgcaatttagtgttgtgtaaccatcacactatccatttccagaactttttcctcttaccatattaaacctctgtacccaataaacagtaactctcactccttcttcccctaacccttagcacccatcattctactttgtctc

SEQ ID NO: 275963 - DNA, 1209 bp, Artificial Sequence
  derived and/or modified sequence
atgggtcctctaccagcgccatcctgcacacaaaggattacatggaagggcttactcttgactgcttcacttctgaatttttggaacccccctacgactgcggaagtgacgatcgaggcacagccgccaaaggtgtcagaggggaaggacgtcctcctcttagttcacaacctaccccaaaatctccccggttatttttggtacaagggggaaatgaccgacctgtatcactacatcatatcttatatcgtcgatggtaaaatcataatttatgggccagcctatagtggtcgtgagacagtttattctaatgcctcactgcttatccagaacgtgactcgaaaagacgctggcacctatactctccacatcatcaagcgcggagacgaaacacgcgaggaaattcgccactttacatttacactgtacctggagacacctaagccatacatctcttccagcaatctaaatcctcgggaggcaatggaggctgtgaggctcatctgcgatcctgagacactggatgcttcttatctctggtggatgaatggacaatccttgcctgtgacccatcgattgcagctaagcaagaccaaccgcacgctctacctgttcggggtcacgaaatacatagccggaccctatgagtgtgagatccgcaaccccgtttcagcatcgcggtccgatccagtgacacttaacctactgcacggccctgacctgccgaggatttatccctccttcacatattacagaagcggggagaatctagatctaagctgttttacagagtctaaccctcctgccgaatacttctggaccataaacggcaagttccagcagagcgggcaaaagctttttattccccagatcactcgcaaccactctgggttatacgcctgctcagtgcacaactcagcaaccggcaaagagatttctaagtccatgacagtcaaggtatctgggaagtggatccccgcttcgctggccgtaggcttctacgtcgaaagtatttggctgtctgagaagtctcaggagaacatctttataccctctctgtgtcctatggggacctctaaaagtcagattctgctgttaaacccacctaacctatccctgcagaccttatttagcctctttttctgctttttgatggccgacctagtgtcaggactgaagaaggtgggacgaggactgtaccaaccatag

SEQ ID NO: 275964 - DNA, 1209 bp, Artificial Sequence
  derived and/or modified sequence
atggggccattgcctgcaccttcttgtactcagaggatcacatggaaaggcctgctcctgaccgctagcttgctgaacttttggaaccccccaacaaccgcagaagtcactatcgaggcccagccccccaaagtatctgagggaaaagatgtgctgctgctcgtccataatctgccgcagaacctgcctgggtacttttggtataaaggtgaaatgacggacttgtatcactacatcatctcatatattgtggacggcaagattattatctatggaccagcgtactcaggcagagaaactgtgtactccaacgcatccctgctaattcagaacgtaacaaggaaagatgctggcacctataccttacacatcatcaagaggggcgacgaaacacgcgaggaaattaggcatttcactttcaccctatacctggaaacccctaagccttacatttcaagctccaatctcaatccccgcgaggctatggaggctgtccgcctgatctgcgaccccgagacattagacgccagttacctctggtggatgaatggtcagtctctacccgttacccaccggttgcagctgagcaaaactaacagaaccctgtacctgtttggcgtcacaaagtatattgcaggtccatacgagtgtgagatcaggaatccagtgtccgccagcaggagtgatccagtaaccttaaacctcctccacggtcccgatctgcccagaatttatcctagtttcacatactaccgtagcggagagaatcttgatctttcttgctttaccgaaagtaatccccctgccgagtatttttggactattaacggcaagttccagcaatctggccagaaactgttcatcccccaaattactagaaaccattccgggctgtacgcttgttccgttcataattctgctacaggcaaagaaatatcaaagtctatgacggtgaaagtcagtggtaaatggatccctgcgtcactagccgtgggattttacgttgaatccatttggttgagtgaaaaatcccaagaaaatatttttattccgtctctttgcccgatgggcacatccaaatcccagatactcttactgaatcccccaaatctctcattacagacattgttctccctcttcttttgcttccttatggctgatctggtgtcagggcttaaaaaggtggggagagggctctatcagccttag

SEQ ID NO: 275965 - DNA, 1209 bp, Artificial Sequence
  derived and/or modified sequence
atgggcccgctgcccgcccctagttgtacacaacggattacatggaagggcctcttactcaccgcttccctgttgaacttttggaatccccctaccaccgccgaggtcacaatagaagcccagcctcctaaagttagcgaaggtaaagacgttctactgctagttcacaatcttccacagaaccttccaggctacttttggtacaaaggggaaatgactgacttataccactacatcatctcctatattgtggacggcaagatcattatctacgggcctgcttactctggaagggaaacagtatatagtaacgcaagtctcctgattcaaaatgttactagaaaagacgccggaacctacactctgcacattatcaagcggggcgacgagacccgggaagagattcggcattttacgttcacgctatacctcgaaacccccaagccatatatatcctctagcaatttaaatccgcgggaagccatggaggccgtgcgactcatttgcgaccccgaaacactagatgcatcttacctgtggtggatgaacgggcaatccttaccagtcacacatcgtctgcagctgagtaaaacaaacaggaccctgtacctgtttggcgtcacaaagtatattgcaggtccatacgagtgtgagatcaggaatccagtgtccgccagcaggagtgatccagtaaccttaaacctcctccacggtcccgatctgcccagaatttatcctagtttcacatactaccgtagcggagagaatcttgatctttcttgctttaccgaaagtaatccccctgccgagtatttttggactattaacggcaagttccagcaatctggccagaaactgttcatcccccaaattactagaaaccattccgggctgtacgcttgttccgttcataattctgctacaggcaaagaaatatcaaagtctatgacggtgaaagtcagtggtaaatggatccctgcgtcactagccgtgggattttacgttgaatccatttggttgagtgaaaaatcccaagaaaatatttttattccgtctctttgcccgatgggcacatccaaatcccagatactcttactgaatcccccaaatctctcattacagacattgttctccctcttcttttgcttccttatggctgatctggtgtcagggcttaaaaaggtggggagagggctctatcagccctag

SEQ ID NO: 275966 - DNA, 1209 bp, Artificial Sequence
  derived and/or modified sequence
atgggccccctgcccgcccccagctgcacccagagaatcacctggaagggcctgctgctgaccgccagcctgctgaacttctggaacccccccaccaccgccgaggtgaccatcgaggcccagccccccaaggtgagcgagggcaaggacgtgctgctgctggtgcacaacctgccccagaacctgcccggctacttctggtacaagggcgagatgaccgacctgtaccactacatcatcagctacatcgtggacggcaagatcatcatctacggccccgcctacagcggcagagagaccgtgtacagcaacgccagcctgctgatccagaacgtgaccagaaaggacgccggcacctacaccctgcacatcatcaagagaggcgacgagaccagagaggagatcagacacttcaccttcaccctgtacctggagacccccaagccctacatcagcagcagcaacctgaaccccagagaggccatggaggccgtgagactgatctgcgaccccgagaccctggacgccagctacctgtggtggatgaacggccagagcctgcccgtgacccacagactgcagctgagcaagaccaacagaaccctgtacctgttcggcgtgaccaagtacatcgccggcccctacgagtgcgagatcagaaaccccgtgagcgccagcagaagcgaccccgtgaccctgaacctgctgcacggccccgacctgcccagaatctaccccagcttcacctactacagaagcggcgagaacctggacctgagctgcttcaccgagagcaacccccccgccgagtacttctggaccatcaacggcaagttccagcagagcggccagaagctgttcatcccccagatcaccagaaaccacagcggcctgtacgcctgcagcgtgcacaacagcgccaccggcaaggagatcagcaagagcatgaccgtgaaggtgagcggcaagtggatccccgccagcctggccgtgggcttctacgtggagagcatctggctgagcgagaagagccaggagaacatcttcatccccagcctgtgccccatgggcaccagcaagagccagatcctgctgctgaacccccccaacctgagcctgcagaccctgttcagcctgttcttctgcttcctgatggccgacctggtgagcggcctgaagaaggtgggcagaggcctgtaccagccctag

SEQ ID NO: 275967 - protein, 576 aa, Artificial Sequence
  derived and/or modified sequence
MLRSGPASGPSVPTGRAMPSRRVARPPAAPELGALGSPDLSSLSLAVSRSTEIIDEYIKENGFGLDGGQPGPGEGLPRLVSRGAASLSTVTLGPVAPPATPPPWGCPLGRLVSPAPGPGPQPHLVITEQPKQRGMRFRYECEGRSAGSILGESSTEASKTLPAIELRDCGGLREVEVTACLVWKDWPHRVHPHSLVGKDCTDGICRVRLRPHVSPRHSFNNLGIQCVRKKEIEAAIERKIQLGIDPYNAGSLKNHQEVDMNVVRICFQASYRDQQGQMRRMDPVLSEPVYDKKSTNTSELRICRINKESGPCTGGEELYLLCDKVQKEDISVVFSRASWEGRADFSQADVHRQIAIVFKTPPYEDLEIVEPVTVNVFLQRLTDGVCSEPLPFTYLPRDHDSYGVDKKRKRGMPDVLGELNSSDPHGIESKRRKKKPAILDHFLPNHGSGPFLPPSALLPDPDFFSGTVSLPGLEPPGGPDLLDDGFAYDPTAPTLFTMLDLLPPAPPHASAVVCSGGAGAVVGETPGPEPLTLDSYQAPGPGDGGTASLVGSNMFPNHYREAAFGGGLLSPGPEAT

SEQ ID NO: 275968 - DNA, 1731 bp, Artificial Sequence
  derived and/or modified sequence
atgctgagaagcggccccgccagcggccccagcgtgcccaccggcagagccatgcccagcagaagagtggccagaccccccgccgcccccgagctgggcgccctgggcagccccgacctgagcagcctgagcctggccgtgagcagaagcaccgagatcatcgacgagtacatcaaggagaacggcttcggcctggacggcggccagcccggccccggcgagggcctgcccagactggtgagcagaggcgccgccagcctgagcaccgtgaccctgggccccgtggccccccccgccaccccccccccctggggctgccccctgggcagactggtgagccccgcccccggccccggcccccagccccacctggtgatcaccgagcagcccaagcagagaggcatgagattcagatacgagtgcgagggcagaagcgccggcagcatcctgggcgagagcagcaccgaggccagcaagaccctgcccgccatcgagctgagagactgcggcggcctgagagaggtggaggtgaccgcctgcctggtgtggaaggactggccccacagagtgcacccccacagcctggtgggcaaggactgcaccgacggcatctgcagagtgagactgagaccccacgtgagccccagacacagcttcaacaacctgggcatccagtgcgtgagaaagaaggagatcgaggccgccatcgagagaaagatccagctgggcatcgacccctacaacgccggcagcctgaagaaccaccaggaggtggacatgaacgtggtgagaatctgcttccaggccagctacagagaccagcagggccagatgagaagaatggaccccgtgctgagcgagcccgtgtacgacaagaagagcaccaacaccagcgagctgagaatctgcagaatcaacaaggagagcggcccctgcaccggcggcgaggagctgtacctgctgtgcgacaaggtgcagaaggaggacatcagcgtggtgttcagcagagccagctgggagggcagagccgacttcagccaggccgacgtgcacagacagatcgccatcgtgttcaagacccccccctacgaggacctggagatcgtggagcccgtgaccgtgaacgtgttcctgcagagactgaccgacggcgtgtgcagcgagcccctgcccttcacctacctgcccagagaccacgacagctacggcgtggacaagaagagaaagagaggcatgcccgacgtgctgggcgagctgaacagcagcgacccccacggcatcgagagcaagagaagaaagaagaagcccgccatcctggaccacttcctgcccaaccacggcagcggccccttcctgccccccagcgccctgctgcccgaccccgacttcttcagcggcaccgtgagcctgcccggcctggagccccccggcggccccgacctgctggacgacggcttcgcctacgaccccaccgcccccaccctgttcaccatgctggacctgctgccccccgcccccccccacgccagcgccgtggtgtgcagcggcggcgccggcgccgtggtgggcgagacccccggccccgagcccctgaccctggacagctaccaggcccccggccccggcgacggcggcaccgccagcctggtgggcagcaacatgttccccaaccactacagagaggccgccttcggcggcggcctgctgagccccggccccgaggccacctag

SEQ ID NO: 275969 - DNA, 1731 bp, Artificial Sequence
  derived and/or modified sequence
atgcttcgctcggggcccgcctccgggcccagcgtgcctacaggtagagctatgccatcccgtcgggtcgcccggccaccagcagcccccgaactcggagcccttggatccccagatctgagcagcttgagcctggccgtgtctaggtctactgagataattgacgaatacatcaaggagaacggcttcggtctcgatggagggcagcctggtccaggcgaagggttgccccggttagtgtcccggggggcagcatccttgtctacagtcactctcggccctgtcgctccccctgcgacaccacccccttggggctgtccccttggacgcttggtatcccccgctcctggccccgggccccagccacaccttgtgataacagaacagccaaagcaaagggggatgagattccgctatgagtgtgagggcagatcagcaggctccatactgggcgaatccagcaccgaggcgtctaagacactgcctgcaattgagctgcgcgattgcggaggattaagagaggtcgaggtaaccgcctgcctggtgtggaaggattggccccaccgagtccacccccattccttggttggaaaggactgtacggatggtatttgcagggttagattgaggccacacgtgtcaccgagacattctttcaacaacttaggtatacaatgcgtacgaaaaaaagagatagaggcagccattgaacggaaaatccagctaggcatcgacccctataacgcaggcagtcttaaaaatcatcaagaagtggacatgaatgtcgtgaggatctgtttccaggcgagctaccgcgaccagcagggacagatgcggcgtatggaccccgtgttatctgagccggtgtacgataaaaagagcacaaatacgagtgagttgagaatatgccgcatcaataaggagtcagggccttgcaccggcggtgaagaactgtatctcctctgtgataaagtacaaaaagaagacattagcgtggtgttcagcagggcctcctgggaaggccgcgctgacttctcgcaagccgacgttcacagacaaatagccatcgtgtttaaaacccccccctatgaagacttagagatcgtcgagcccgttactgtgaatgtctttctgcagagactgacggacggagtctgttcggagcccctgccatttacgtatttgccacgcgatcacgacagctatggggtggacaagaagaggaagcgcggtatgccagacgtgctgggcgaactgaactctagtgacccccacggcatagaaagcaaacggcgcaagaagaagccggccatcttagaccacttcctgcccaatcacgggtccgggcccttcttacctccctccgccctcctccccgatcccgacttttttagcggcaccgtttccctgcccggtctcgagcccccagggggcccagatctgctcgacgatgggtttgcctacgatcccactgcccccaccttgtttactatgctcgacctgctgccgcccgccccccctcacgcatcagctgtggtgtgcagtggaggggccggcgcggtggtaggggagacgcccggcccggaacccttaacattggactcgtaccaggcaccgggacccggtgatgggggaactgctagtttggtgggaagcaatatgtttcctaatcactacagggaggccgccttcggcggtggcctcctttccccaggacctgaggccacctag

SEQ ID NO: 275970 - DNA, 1731 bp, Artificial Sequence
  derived and/or modified sequence
atgctgcggagcggccctgccagcggccccagcgtgcccaccggccgggccatgcccagcagaagagtggcccggcccccagctgcccctgagctgggcgccctgggcagcccagacctgagcagcctgagcctggccgtgagccgcagcacagagatcattgatgagtacatcaaggaaaatggatttggcctggatggcggccagcccggccctggagagggcctgccccggctggtgtccagaggagctgccagcctgagcacagtgaccctgggccctgtggcccccccagccaccccaccaccctggggctgccccctgggccgcctggtgtccccagcccctggccctggcccccagccccacctggtgatcacagagcagcccaagcagaggggcatgaggttccgctatgaatgtgagggccgctctgctggcagcatcctgggggagagcagcacagaggccagcaagaccctgcctgccatcgagctgcgggactgtggcggcctgcgggaggtggaggtgacagcctgcctggtgtggaaggactggccccaccgggtgcacccccacagcctggtgggcaaggactgcacagatggcatctgccgggtgcggctgcggccccacgtgagccccaggcacagcttcaacaacctgggcatccagtgtgtgaggaagaaggagattgaggccgccatcgagaggaagatccagctgggcatcgacccctacaatgccggcagcctgaagaaccaccaggaggtggacatgaatgtggtgcgcatctgcttccaggccagctacagagaccagcagggccagatgaggaggatggaccctgtgctgtctgagcctgtgtatgacaagaagagcaccaacaccagcgagctgcgcatctgccgcatcaacaaggagagcggcccctgcacaggaggagaggagctgtacctgctgtgtgacaaggtgcagaaggaggacatctctgtggtgttcagccgggcctcctgggagggccgggctgacttcagccaggctgatgtgcaccggcagatcgccatcgtgttcaagaccccaccctatgaggacctggagatcgtggagcctgtgacagtgaatgtgttcctgcagaggctgacagatggagtgtgcagcgagcccctgcccttcacctacctgccccgggaccatgacagctatggagtggacaagaagaggaagaggggcatgccagatgtgctgggggagctgaacagcagtgacccccatggaattgagagcaagaggaggaagaagaagccagccatcctggaccacttcctgcccaaccacggcagcggccccttcctgcccccatctgccctgctgcctgaccctgacttcttctctggaacagtgtccctgcccggcctggagcccccaggcggccctgacctgctggatgatggctttgcctatgaccccacagcccccaccctcttcaccatgctggacctgctgcccccagccccaccccacgccagcgctgtggtgtgcagcggcggggccggggctgtggtgggggagaccccaggccctgagcccctgaccctggacagctaccaggcccctggccctggagatggcggcacagccagcctggtgggcagcaacatgttccccaaccactaccgggaggccgccttcggcggcggcctgctgagccctggccctgaggccacctag

SEQ ID NO: 275971 - DNA, 1731 bp, Artificial Sequence
  derived and/or modified sequence
atgctgcggagcggccccgccagcggccccagcgtgcccaccggccgtgctatgcccagccgccgggtggctcgaccacctgcagcgcctgaactgggggccttggggagcccagacttgagctccctgagcctagcagtaagtcggtcgaccgagatcatcgacgagtatatcaaggagaacggatttgggttggatggagggcagccgggcccgggtgaaggattgcctcgccttgtgtcgcgtggcgccgccagtctatccacagtgactctcggtcctgtggcaccccccgctaccccccctccttggggatgcccccttgggagactcgtttctcctgccccaggtccagggccgcagccacatctcgtgatcaccgaacaacctaagcagcgtggcatgaggtttcgctatgaatgtgagggacgaagcgccgggtccattctgggagagagcagcactgaggcttctaagaccctcccggccatcgagcttcgtgactgcggtgggttgagggaggtcgaagtgactgcatgcctcgtctggaaggactggccacaccgagtccacccccacagtttggttggcaaggactgtaccgatggcatctgccgcgtgagattgcggccccatgtgagtcctcgtcattcttttaacaatctcgggatccagtgtgttcggaagaaggaaattgaggccgctattgagagaaagatccagctgggaattgatccctacaatgccggtagcctcaagaatcaccaggaagtcgatatgaatgtggtcaggatttgcttccaggcctcctaccgggatcagcagggccagatgcgtagaatggatccagtcctctctgagcctgtgtacgataagaaaagtacaaatactagcgaactgcgtatctgccgcataaacaaggaaagcggcccatgcaccggcggcgaagaactgtacctgctttgtgacaaagtccagaaggaggatatatctgtagtcttttctcgggcctcatgggaaggccgggccgattttagccaagcagacgtccaccgccagatcgccattgttttcaagacaccaccatatgaggacctggagattgtggaacctgtcactgtaaatgtcttcctccaaagactgaccgacggggtgtgttctgaacccctgcccttcacatacttgcctagggatcacgactcctatggcgtcgacaagaagagaaaaaggggtatgccagacgtgctgggggagctgaattcatccgaccctcacgggattgaatcaaaacgaagaaaaaaaaagcctgccatacttgaccactttttgccaaatcacggtagcggtccatttcttccaccaagcgcactgctgccagaccctgatttcttttcaggaacagtcagcctccccggtctggaaccccctggtgggccagatctgttggacgacggttttgcttatgatccaactgcccccacactattcacgatgttggatctcctcccccctgcgcctcctcacgcatccgctgttgtgtgtagcgggggagctggggctgtggtaggggagacacccgggcctgagcccttgacactggactcctatcaggctcccgggccgggagatgggggcactgcctcattggttggcagcaacatgttccctaatcactatcgggaggcagcattcggaggcggcctattgagtccaggccccgaggcaacctag

SEQ ID NO: 275972 - DNA, 1731 bp, Artificial Sequence
  derived and/or modified sequence
atgctaaggagcggcccagcctctgggcctagcgtccctaccggccgtgccatgccatcccgcagggttgctcgtccccctgcagctcccgaactgggcgctcttggtagtcctgacctgagttcattatcactggctgtgagtcgctccacagagattattgatgagtatatcaaggagaatggctttggtctagacggcggtcagcccggtccaggcgaaggacttccaagattggtgtccagaggggctgctagtctgtcaaccgttaccttaggccctgttgccccacccgctaccccccctccatggggttgccctctcggtcggctggtgtctcccgcacctggcccagggccacagccccacttggttattaccgagcagccaaagcagaggggaatgcgattccgctatgagtgtgagggcaggtcggccggatctatattgggagagtccagcactgaggctagcaaaacattacccgcaattgaactgcgggactgcgggggtctgagggaggtcgaggtcacagcatgtctggtctggaaggactggccccatagggtacacccacatagcctggtcgggaaagattgtaccgatggcatttgccgggtcaggttaagaccacatgtgtctcctcgccattccttcaataacctcggtatccagtgcgtacggaaaaaagaaatagaagccgctattgaacgaaaaatacagctggggatcgatccttacaatgccggatcactcaagaaccatcaggaagttgatatgaacgtagttagaatctgtttccaggcttcctatagggaccagcagggacagatgagacgcatggatcccgtccttagtgagcccgtgtatgacaaaaaaagcaccaatacaagcgaactgaggatatgccgaatcaacaaggagtctgggccttgtaccgggggtgaggaactttacctcttgtgtgataaagttcaaaaggaagacatctctgtagtcttttccagggccagttgggaggggcgagccgacttttcacaggccgacgtgcatagacagatagccatcgtttttaagacccccccatacgaagacctcgagattgtggaacctgtgaccgtgaatgtttttctacagaggttgactgacggcgtgtgcagcgaacccctgcctttcacgtatctgccacgggatcacgactcctacggagtcgataaaaaacggaaacgagggatgccagacgtgctgggcgagctgaactctagtgacccacacggtatcgaatccaaacgcaggaagaagaagcctgccattctcgaccatttcctgccgaaccacggatcagggccatttctgccaccaagcgccctgctcccagatcccgattttttttcaggcaccgtgtcattgcccggattagaacctcctggcggtccagatctgctcgatgacggattcgcttatgaccctaccgcccctaccctgtttactatgctggacctacttccgccagcacccccacacgcctctgccgtcgtgtgctctggtggtgctggtgctgttgtaggtgagacccctggccctgaacccctgacgctggattcatatcaggccccaggccctggtgatgggggtactgcgtccctggtagggtctaacatgttccccaaccattatcgggaggccgcattcgggggagggctattgtcccccggacccgaggcaacctag

SEQ ID NO: 275973 - DNA, 2219 bp, Artificial Sequence
  derived and/or modified sequence
cgcgcagccccgggcgccgcgcgtcctgcccggcctgcggccccagcccttgcgccgctcgtccgacccgcgatcgtccaccagaccgtgcctcccggccgcccggccggcccgcgtgcatgcttcggtctgggccagcctctgggccgtccgtccccactggccgggccatgccgagtcgccgcgtcgccagaccgccggctgcgccggagctgggggccttagggtcccccgacctctcctcactctcgctcgccgtttccaggagcacagagatcatcgacgagtacatcaaggagaacggcttcggcctggacgggggacagccgggcccgggcgaggggctgccacgcctggtgtctcgcggggctgcgtccctgagcacggtcaccctgggccctgtggcgcccccagccacgccgccgccttggggctgccccctgggccgactagtgtccccagcgccgggcccgggcccgcagccgcacctggtcatcacggagcagcccaagcagcgcggcatgcgcttccgctacgagtgcgagggccgctcggccggcagcatccttggggagagcagcaccgaggccagcaagacgctgcccgccatcgagctccgggattgtggagggctgcgggaggtggaggtgactgcctgcctggtgtggaaggactggcctcaccgagtccacccccacagcctcgtggggaaagactgcaccgacggcatctgcagggtgcggctccggcctcacgtcagcccccggcacagttttaacaacctgggcatccagtgtgtgaggaagaaggagattgaggctgccattgagcggaagattcaactgggcattgacccctacaacgctgggtccctgaagaaccatcaggaagtagacatgaatgtggtgaggatctgcttccaggcctcatatcgggaccagcagggacagatgcgccggatggatcctgtgctttccgagcccgtctatgacaagaaatccacaaacacatcagagctgcggatttgccgaattaacaaggaaagcgggccgtgcaccggtggcgaggagctctacttgctctgcgacaaggtgcagaaagaggacatatcagtggtgttcagcagggcctcctgggaaggtcgggctgacttctcccaggccgacgtgcaccgccagattgccattgtgttcaagacgccgccctacgaggacctggagattgtcgagcccgtgacagtcaacgtcttcctgcagcggctcaccgatggggtctgcagcgagccattgcctttcacgtacctgcctcgcgaccatgacagctacggcgtggacaagaagcggaaacgggggatgcccgacgtccttggggagctgaacagctctgacccccatggcatcgagagcaaacggcggaagaaaaagccggccatcctggaccacttcctgcccaaccacggctcaggcccgttcctcccgccgtcagccctgctgccagaccctgacttcttctctggcaccgtgtccctgcccggcctggagccccctggcgggcctgacctcctggacgatggctttgcctacgaccctacggcccccacactcttcaccatgctggacctgctgcccccggcaccgccacacgctagcgctgttgtgtgcagcggaggtgccggggccgtggttggggagacccccggccctgaaccactgacactggactcgtaccaggccccgggccccggggatggaggcaccgccagccttgtgggcagcaacatgttccccaatcattaccgcgaggcggcctttgggggcggcctcctatccccggggcctgaagccacgtagccccgcgatgccagaggaggggcactgggtggggagggaggtggaggagccgtgcaatcccaaccaggatgtctagcacccccatccccttggcccttcctcatgcttctgaagtggacatattcagccttggcgagaagctccgttgcacgggtttccccttgagcccattttacagatgaggaaactgagtccggagaggaaaagggacatggctcccgtgcactagcttgttacagctgcctctgtccccacatgtgggggcaccttctccagtaggattcggaaaagattgtacatatgggaggagggggcagattcctggccctccctccccagacttgaaggtggggggtaggttggttgttc

SEQ ID NO: 275974 - protein, 152 aa, Artificial Sequence
  derived and/or modified sequence
MPSKGPLQSVQVFGRKKTATAVAHCKRGNGLIKVNGRPLEMIEPRTLQYKLLEPVLLLGKERFAGVDIRVRVKGGGHVAQIYGESQELGAWRRWLWEGGLHSAPVPFNCVSFSQLSVSPSPKPWWPITRNMWMRLPRRRSKTSSSSMTGPCW

SEQ ID NO: 275975 - DNA, 459 bp, Artificial Sequence
  derived and/or modified sequence
atgccgagcaagggtcccctgcagagtgtacaggtgtttgggcggaaaaagacggcgactgccgtagcccactgtaaaagaggcaacgggctgatcaaagtgaacgggcgacctctggagatgatcgagcccaggacactacaatacaaactgcttgaacccgttctgttattaggaaaagaacgatttgccggcgtggatatccgggtgagagttaagggcgggggccatgtggctcaaatttatggcgagagccaggaactgggcgcttggaggcgatggctgtgggagggcggattacactccgctcctgtgcctttcaactgtgtatctttctcacagctcagcgtgtcaccctcacctaagccatggtggccaattacccggaacatgtggatgcgtctgccacgtcgacgatctaagacctcatccagcagtatgactggaccatgctggtag

SEQ ID NO: 275976 - DNA, 459 bp, Artificial Sequence
  derived and/or modified sequence
atgcccagcaagggccccctgcagagcgtgcaggtgtttggaaggaagaagacagccacagctgtggcccactgcaagagaggaaatggcctcatcaaggtgaatggccggcccctggagatgattgagcccaggaccctgcagtacaagctgctggagcctgtgctgctgctgggcaaggagagatttgctggggtggacatccgggtgcgggtgaagggcggcggccacgtggcccagatctacggggagagccaggagctgggcgcctggaggcgctggctgtgggagggcggcctgcacagcgcccctgtgcccttcaactgtgtgtccttcagccagctgtctgtgagccccagccccaagccctggtggcccatcaccaggaacatgtggatgaggctgccccggcggcgcagcaagaccagcagcagctccatgacaggcccctgctggtag

SEQ ID NO: 275977 - DNA, 459 bp, Artificial Sequence
  derived and/or modified sequence
atgcccagcaagggccccctgcagagcgtgcaggtgttcggccggaaaaaaacagcaactgcggtcgctcattgcaaacgagggaacgggctgatcaaagtgaacggtcggccactcgaaatgatagagccccggactttgcagtataaactcctcgaacccgtcctgttgctgggaaaagaacggttcgccggcgtggacattagagtccgagtgaagggagggggacacgtggcccaaatctacggagaaagtcaggagctcggcgcctggcgaagatggctgtgggagggtgggctgcacagcgcccctgtacctttcaattgcgtgtcttttagccagctctctgtctctccatctccgaagccttggtggcccatcactagaaatatgtggatgcgcttaccccggagacggtctaagacctcatcatctagtatgacaggcccctgttggtag

SEQ ID NO: 275978 - DNA, 459 bp, Artificial Sequence
  derived and/or modified sequence
atgccatccaagggacccctgcagagcgtgcaggtttttggcaggaaaaaaaccgccacggccgttgctcattgtaagcgcggaaatggattgattaaggtaaatgggagaccattagagatgatcgaacccaggacactccaatacaagctcctggagcctgtgctgctactgggcaaggagcgctttgccggagtggacatacgggtaagggtgaagggtgggggacacgtcgcccagatctacggtgagtcccaagagctaggtgcctggaggcgatggttatgggaggggggactgcattccgctccagttccattcaactgtgtgtctttttctcaattatccgtgagcccaagccctaaaccatggtggccaattacccggaacatgtggatgcgcctgccacgccgacgcagtaagacctcttctagctccatgacaggcccttgttggtag

SEQ ID NO: 275979 - DNA, 638 bp, Artificial Sequence
  derived and/or modified sequence
cggcgccgcgcggtgaggttgtctagtccacgctcggagccatgccgtccaagggcccgctgcagtctgtgcaggtcttcggacgcaagaagacagcgacagctgtggcgcactgcaaacgcggcaatggtctcatcaaggtgaacgggcggcccctggagatgattgagccgcgcacgctacagtacaagctgctggagccagttctgcttctcggcaaggagcgatttgctggtgtagacatccgtgtccgtgtaaagggtggtggtcacgtggcccagatttatggtgagtcccaggaactgggcgcatggaggaggtggctctgggagggaggccttcacagcgctcctgtaccctttaattgtgtgtctttctcacagctatccgtcagtccatctccaaagccctggtggcctattaccagaaatatgtggatgaggcttccaagaaggagatcaaagacatcctcatccagtatgaccggaccctgctggtagctgaccctcgtcgctgcgagtccaaaaagtttggaggccctggtgcccgcgctcgctaccagaaatcctaccgataagcccatcgtgactcaaaactcacttgtataataaacagtttttgagggattttaaagtttc

SEQ ID NO: 275980 - DNA, 459 bp, Artificial Sequence
  derived and/or modified sequence
atgcccagcaagggccccctgcagagcgtgcaggtgttcggcagaaagaagaccgccaccgccgtggcccactgcaagagaggcaacggcctgatcaaggtgaacggcagacccctggagatgatcgagcccagaaccctgcagtacaagctgctggagcccgtgctgctgctgggcaaggagagattcgccggcgtggacatcagagtgagagtgaagggcggcggccacgtggcccagatctacggcgagagccaggagctgggcgcctggagaagatggctgtgggagggcggcctgcacagcgcccccgtgcccttcaactgcgtgagcttcagccagctgagcgtgagccccagccccaagccctggtggcccatcaccagaaacatgtggatgagactgcccagaagaagaagcaagaccagcagcagcagcatgaccggcccctgctggtag

SEQ ID NO: 275981 - DNA, 1731 bp, Artificial Sequence
  derived and/or modified sequence
atgcggctcactattagctatctgaggatgcatagactttgcgccgccggagagtggaatcaggtaggagcaggaggcgagccactggacgcttgctaccttaaagctctggaaggcttcgtcatggtcttaacagcagaaggtgatatggcttatctctctgaaaatgtttctaagcacctcgggctgagccaactggagctcatcggtcactccatctttgatttcatccatccctgcgatcaggaagagctccaggatgcactcaccccacagcagacgctctctcggcggaaagtggaagcgcccacagagaggtgtttctccctgcggatgaaatctacactcacgtcccgcggccgcactctgaacctgaaggccgcgacgtggaaagtgctgaactgtagcggacatatgagggcttataaacctccggctcagactagcccagccggctctccagacagcgagcccccgcttcagtgtctcgtacttatctgtgaggctattccacacccaggctcgctggaaccacctctgggcagaggcgcttttctgagtcgccatagcttggatatgaagttcacttattgtgacgaccggatcgctgaagttgcgggttatagcccggacgacttaatcgggtgctcagcctatgaatatattcatgcactggattcagatgcagtgtccaagtctatacataccctgctatcaaagggccaggccgtgacaggccagtaccgctttctcgcgcgcagcggaggatacctctggacccagacccaagcaaccgtggtgagcggaggacggggaccacagtcagaaagcatcgtgtgtgtccatttcttaatcagccaggtggaggagaccggagtagttctgtccttagagcagactgagcagcacagtaggcgtcctatacagagaggcgccccctcacaaaaggacacacctaaccccggcgattcattggacacgccaggtccccggatcttggcctttctgcacccaccctcactgtccgaggcagctctggcagctgacccacggcgtttttgctcccctgacctaagacggctgttgggccccattctcgatggggcctctgtggctgccacaccgagtacccctctagccacccgccacccacagagtcccctgtctgccgacctaccagatgaactgccagtcgggacagaaaatgtgcacaggcttttcacaagcgggaaggataccgaagcagtcgagactgacttggatatagctcaggacgccgatgcactggatttagaaatgttggctccttatatctccatggatgatgatttccaactcaatgccagcgaacagctgccccgagcctatcatagacccctcggggcagtccccagacctagagcccggagcttccacggactgtctccacccgctctggagccgagcctcctgccgagatggggaagcgacccccggctgtcttgttccagcccatcaagaggcgacccctcagcctctagtcctatggctggggccaggaagagaacacttgcgcagtccagcgaagacgaagacgaaggagtggagcttttgggcgtcaggccacctaagaggtctcctagccctgaacatgaaaattttcttctttttcccctaagtctggtatgctggggaattaatgggattctgtggccatctctaccatcttggttgaagcctaccgtactgtag

SEQ ID NO: 275982 - DNA, 1842 bp, Artificial Sequence
  derived and/or modified sequence
atgcgtttaacaatttcttacctgaggatgcacaggttatgtgccgctggggagtggaatcaagtcggggccggcggcgaacctttggacgcttgttatcttaaggcactcgaggggttcgtcatggtccttaccgccgaaggagatatggcatacctgtccgagaacgtgtccaagcatctcggcctgagtcagctcgagctgataggccattccatcttcgacttcatccacccttgtgaccaggaggagttgcaggacgccctcaccccacagcagacactgagtaggcgaaaggtggaggctcctacagagcggtgctttagccttagaatgaagtctactctcacttcacgagggcgcaccctgaatttgaaggctgctacatggaaggttttgaactgctcaggccacatgcgagcctataagcctccagcacaaacatctcccgccgggagcccagattctgagccccccctgcagtgtctggtgctcatttgtgaggcgattccacaccctggtagcctggagccccccttgggccgcggtgcctttctcagtcggcatagtcttgacatgaagttcacatactgcgatgaccgtattgcggaggttgccgggtacagcccagatgacctgatcggatgctcagcctacgaatacattcacgcccttgactcagatgctgtgtcgaagagcatacacacactactttcgaaaggacaggccgttacgggacagtataggtttctggctaggtcaggcgggtatctgtggacccagactcaagctaccgtcgtgtctggcgggcgcggaccacagtccgagtctattgtctgcgtgcatttccttattagccaggtcgaggagactggtgtggttctctccctagagcaaaccgagcagcacagcaggcggcccatccagcggggcgcaccctcccagaaagacactccaaaccccggtgactccctcgacacgcccggcccaaggatactggcgttcctgcatccgccctcactctccgaagctgcactggcagcggacccaaggagattctgctccccggacttacggcgcctgcttgggcccattctcgatggagctagtgtcgccgcaacccctagcaccccactcgccacacggcacccgcagagccctctctccgcagatctgcctgatgaattacccgtgggcaccgaaaatgtacatagattgtttactagtggaaaggacacggaggctgtggagactgaccttgatattgcacaggatgctgacgccctcgacctggaaatgctggccccttacatttcaatggacgacgactttcaactcaatgcctctgagcagcttccacgcgcctaccacaggcccctcggcgctgtgccacgaccccgcgcccgcagctttcacggactgagcccaccagctctggagcctagtctgttgccacgctggggttcagatcctagattatcatgcagtagcccctcccgaggggacccatccgctagctcccccatggcgggcgcccgcaagcggacccttgcccagtcaagtgaggatgaagatgagggcgtggaactgctcggggtgcgaccccccaagagaagccctagcccagagcacgagaatttcttgcttttcccccttagtttgagcttcctgctcaccggtggcccggcccccggctctttgcaagatcctagcacgcccctcttgaacttgaatgagccactcggcttggggcccagccttctgtcgccttacagcgacgaggatacaacccagccgggtggcccttttcagccaagggccggatcggctcaagcggactag

SEQ ID NO: 275983 - DNA, 2101 bp, Artificial Sequence
  derived and/or modified sequence
cgcatcccctcctgcaccccctggatggcccttcagccaacgggggcctgggcgatggtcgaccacggagctgcgcaaggaaaagtcccgggatgcggcccgcagccggcgcagccaggagaccgaggtgctgtaccagctggctcacacgctgcccttcgcccgcggcgtcagcgcccacctggacaaggcctctatcatgcgcctcaccatcagctacctgcgcatgcaccgcctctgcgccgcaggggagtggaaccaggtgggagcagggggagaaccactggatgcctgctacctgaaggccctggagggcttcgtcatggtgctcaccgccgagggagacatggcttacctgtcggagaatgtcagcaaacacctgggcctcagtcagctggagctcattggacacagcatctttgatttcatccacccctgtgaccaagaggagcttcaggacgccctgaccccccagcagaccctgtccaggaggaaggtggaggcccccacggagcggtgcttctccttgcgcatgaagagtacactcaccagccgcgggcgcaccctcaacctcaaggcggccacctggaaggtgctgaactgctctggacatatgagggcctacaagccacctgcgcagacttctccagctgggagccctgactcagagcccccgctgcagtgcctggtgctcatctgcgaagccatcccccacccaggcagcctggagcccccactgggccgaggggccttcctcagccgccacagcctggacatgaagttcacctactgtgacgacaggattgcagaagtggctggctatagtcccgatgacctgatcggctgttccgcctacgagtacatccacgcgctggactccgatgcggtcagcaagagcatccacaccttgctgagcaagggccaggcagtaacagggcagtatcgcttcctggcccggagtggtggctacctgtggacccagacccaggccacagtggtgtcagggggacggggcccccagtcggagagtatcgtctgtgtccattttttaatcagccaggtggaagagaccggagtggtgctgtccctggagcaaacggagcaacactctcgcagacccattcagcggggcgccccctctcagaaggacacccctaaccctggggacagccttgacacccctggcccccggatccttgccttcctgcacccgccttccctgagcgaggctgccctggccgctgacccccgccgtttctgcagccctgacctccgtcgcctcctgggacccatcctggatggggcttcagtagcagccactcccagcaccccgctggccacacggcacccccaaagtcctctttcggctgatctcccagatgaactacctgtgggcaccgagaatgtgcacagactcttcacctccgggaaagacactgaggcagtggagacagatttagatatagctcaggatgctgatgctctggatttggagatgctggccccctacatctccatggatgatgacttccagctcaacgccagcgagcagctacccagggcctaccacagacctctgggggctgtcccccggccccgtgctcggagcttccatggcctgtcacctccagcccttgagccctccctgctaccccgctgggggagtgacccccggctgagctgctccagcccttccagaggggacccctcagcatcctctcccatggctggggctcggaagaggaccctggcccagagctcagaggacgaggacgagggagtggagctgctgggagtgagacctcccaaaaggtcccccagcccagaacacgaaaactttctgctctttcctctcagcctggtgtgttgggggattaatgggattctctggccctcattacctagctggcttaaacctactgttttatagataggaaaccagagaggggcaggggctggttgagggtcatacagaaagtcagtgggccagctgagactaaagcctgatcttctagtttcactaatgggtattaaaaacctctgcagtgaactgagattgcgccactgcaccccagcatgagcgacagaatgggaccttgtc

SEQ ID NO: 275984 - DNA, 5908 bp, Artificial Sequence
  derived and/or modified sequence
gtcatctcaccgccgtgcgcacccactcgtaactcgcacccgggtcctggctgcaccgcatcccctcctgcaccccctggatggcccttcagccaacgggggcctgggcgatggtcgaccacggagctgcgcaaggaaaagtcccgggatgcggcccgcagccggcgcagccaggagaccgaggtgctgtaccagctggctcacacgctgcccttcgcccgcggcgtcagcgcccacctggacaaggcctctatcatgcgcctcaccatcagctacctgcgcatgcaccgcctctgcgccgcaggggagtggaaccaggtgggagcagggggagaaccactggatgcctgctacctgaaggccctggagggcttcgtcatggtgctcaccgccgagggagacatggcttacctgtcggagaatgtcagcaaacacctgggcctcagtcagctggagctcattggacacagcatctttgatttcatccacccctgtgaccaagaggagcttcaggacgccctgaccccccagcagaccctgtccaggaggaaggtggaggcccccacggagcggtgcttctccttgcgcatgaagagtacactcaccagccgcgggcgcaccctcaacctcaaggcggccacctggaaggtgctgaactgctctggacatatgagggcctacaagccacctgcgcagacttctccagctgggagccctgactcagagcccccgctgcagtgcctggtgctcatctgcgaagccatcccccacccaggcagcctggagcccccactgggccgaggggccttcctcagccgccacagcctggacatgaagttcacctactgtgacgacaggattgcagaagtggctggctatagtcccgatgacctgatcggctgttccgcctacgagtacatccacgcgctggactccgatgcggtcagcaagagcatccacaccttgctgagcaagggccaggcagtaacagggcagtatcgcttcctggcccggagtggtggctacctgtggacccagacccaggccacagtggtgtcagggggacggggcccccagtcggagagtatcgtctgtgtccattttttaatcagccaggtggaagagaccggagtggtgctgtccctggagcaaacggagcaacactctcgcagacccattcagcggggcgccccctctcagaaggacacccctaaccctggggacagccttgacacccctggcccccggatccttgccttcctgcacccgccttccctgagcgaggctgccctggccgctgacccccgccgtttctgcagccctgacctccgtcgcctcctgggacccatcctggatggggcttcagtagcagccactcccagcaccccgctggccacacggcacccccaaagtcctctttcggctgatctcccagatgaactacctgtgggcaccgagaatgtgcacagactcttcacctccgggaaagacactgaggcagtggagacagatttagatatagctcaggatgctgatgctctggatttggagatgctggccccctacatctccatggatgatgacttccagctcaacgccagcgagcagctacccagggcctaccacagacctctgggggctgtcccccggccccgtgctcggagcttccatggcctgtcacctccagcccttgagccctccctgctaccccgctgggggagtgacccccggctgagctgctccagcccttccagaggggacccctcagcatcctctcccatggctggggctcggaagaggaccctggcccagagctcagaggacgaggacgagggagtggagctgctgggagtgagacctcccaaaaggtcccccagcccagaacacgaaaactttctgctctttcctctcagcctgagtttccttctgacaggaggaccagccccagggagcctgcaggaccccagcaccccactcctgaacctgaatgagcccctgggcctgggcccctcactgctctctccgtactcagacgaggacactacccagcccgggggccccttccagccaagggcaggctcagcccaggctgactgagccggctcctctccccatctgccttctcctcccccagaaaggacctcaaccacactccacgccggcagccaacgcacaggatgggggcgccaggagaggggcccctctctcctctatgtaccccctgcccacctcgggcctacctcagccctcacccctctgcctgctcccaatctgggggctctctggggtggtctcagctcagtgacctctgggaggtggtccctggccccctcctccttctctcaggatttctcttggggttctcaatacttggttacctcattatccctttctctgcctctcttggctttattttggggaatcaggggtgaggagggttgggggggtcatatctgtgtttccaggttctggggagaacaatgatccacgggtcaacgtgatcacatttccttctatccttcttgtattattatttttatttttgtcaatttcatgatatggtttttaatcatgatgaattgcctggggtctgtaagaatgtgggactctgatcttccccctcttcaggtgtcagtgcggagaggctctgggccagacctcacccccagtgacttccgattgaggccaaagaccccaagctgcccgccagctctgactgccccttgcgctctgggcttcctgccgcccccagctttgcctggacactgacttcattcatggtcctcctacttcaggggcagcctcccagttcctctgcttccaaactatgcaacctccaacctgctccagttccagactgtataacctctgacctgcactggttctagaccacacaacctccaatgtggtctgctttagatcaccttcttcttcttccttcttcctcttcctcttcctcctgctcctcttcctcttcttcttcttttttttttttgacagagtcttgctctgtcacccaggctggagtgcagtggcgcgatttcagcttactgcagcctccgcgccctgggttcaagtgattctcctgcctcaacttcccaaatagccgggactacgggcatgtgccacattgcccggctaatttttgtatttttagtagagatggggtttcaccacgttgtccagtctggtctcgaactcctgacctcaagtgctccacctgcctcagccttccaaagtgctgggattacaggcgtgagccactgcacccggctagaactcactttctccaaatccctctgcttcgaatttcaccgtcttcagctctttctagttctgggcctcaccagcctctcattctgcctgttttcaaaccttacgatccccaaaaattgtctggttctgggcctctaactccctctggctctatagtctatgactaccagattcttttggttctagaattcactaacttcctctggttctagacctcttcctataaattaatccctcttgttttagatctcacaccctccaacgccctccggttccagatcttatattcagtgatttcctctggttctggaccccacaactccaagcttcctattggttccagttctcctgatcggtaatacatttggttccaaatccagacctcttaatctctctctttttttttttttttttttgagacagagtcccactctgtcacccaggctggagtacagtggctcaatctcggctcactgcagcctccacctcctgggttcaagcaattcttgggcctcagcctcccaaatagctgggattacaggcatgtgccaccacgcccagctaagttttatatttttagtagagacagtgtttcaccatgttggccaggctggtcttgaactcccgacctcaactgatccacccgcctcagcctcccaaagtgctgaaattacaggagtgagcctggccagacttcttaatttctaaatcacttttgttttagaccttatgaggctcagcttattcttctgcagttctctataaccaagactcattttctctcatcaaaaacaagtacagagagtttgatgtgtttatctcttttttcttcctcttcttttttttttttttcttttttgagatggagtctctctctgttgcccaggctggagtataatggtgccatctaggctcactgcaacctccgcctcctgattcaagtgattctcctgcctcagcctcctaaattggtgggattacaggagcccaccaccacatccggctacctttgtgtattttttagtagagacggggttttgccaagttggaggggctggtcttgaactcttgacctcagatgatccacccgcctcagcctcccaaagtgctgggattacaggcataagccaccgtgcccgaccctgtccttatcttataataaccagttcttctagaaccagacgatgctctagttctcctagattctgaacctcatgacctgtaccactcactagttccagactacacaacttctagaaggtgccacctccagggtcctgattcaagatctggtgatctgctgtttctctggttctagaactgacttacaagtgccttctgattctagacctcattccgtaagttcccttggctctagacttcatcatttccagctcctcctcactcaagatctgactccaaattaccctgggtctagaattcagccttcaaatatcttctgattttagactttgccttatacatttctctggttttagatcttaccaccctcaactccttctgattctagatcttatggttcccaaatctctctggttctagaactcagattttaggcttttgtttttccttttttttgttaaaaaaaaaaaaatagagacggggtttcaccatgttgcccaggctggtcgcgaactactgagctcaagcaattctccctccttggcctcaccaaagtgctgggactacaggcatgagccactgagcccagccaggctttttctaattctatgctttattctataaattcctctgcttctaagcctcacagcttccaactgcctttgatttcagatccaaattcctctgattctataattcagcctccaaatgcttctgattctggaatctagacttttccctaaagattcctctggttctgaatcttataacctcaactccctaattccagaccccagcctcctaaatctattctgggcttcccaccccactgaacttacccaattccttctttcagtcttaagttttcccattctaaacccctaccctctaggctgtgctgctcctggacttcatgcctctccattctcattgcctacaatctctgtgccccagaaccccctccacttcccaccccagccctccagacatgcacttaccttgactttaccccacatgtttggggcacctggggctccctcaccccttgggtggtttgcaatctgaagacttctccagccacacaggcacatgcacaggcacggtgctgtctgcatattgccaggtggggagagaagccaggacccctcagctgtctgccaccatctatgtgcctcccttaccccccagctttctttctacagatggtgctactcttggtctcccacaggaaaaggcctccccccttcttagccccatttaccccgtttgtggaaggcactgctcgctctgttttgtcagagagtggcctatccagattggtgctatgggggggtctgacccctccctcctccctctggaggtgatgtgggccctcaatggagggaattgtgctgggctagggaaaggggagggactagactggccacactggctctgaaactcaccaatctctatacaccataaagacctcaccttggtaggcaccaga

SEQ ID NO: 275985 - DNA, 1731 bp, Artificial Sequence
  derived and/or modified sequence
atgaggctgaccatctcctacctgaggatgcaccggctgtgtgccgccggggagtggaaccaggtgggcgctggaggagagcccctggatgcctgctacctgaaggccctggagggctttgtgatggtgctgacagctgagggggacatggcctacctgtctgaaaatgtgtccaagcacctgggcctgagccagctggagctgattggccacagcatctttgacttcatccacccctgtgaccaggaggagctgcaggatgccctgaccccccagcagaccctgagcaggaggaaggtggaggcccccacagagcgctgcttcagcctgaggatgaagagcaccctgaccagccggggccgcaccctgaacctgaaggccgccacctggaaggtgctgaactgcagcggccacatgagggcctacaagcccccagcccagaccagccctgctggcagcccagacagcgagccccccctgcagtgcctggtgctgatctgtgaggccatcccccaccctggcagcctggagccccccctgggccgcggggccttcctgagccgccacagcctggacatgaagttcacctactgtgatgacagaattgctgaggtggccggctacagcccagatgacctgattggctgcagcgcctatgagtacatccacgccctggacagtgatgctgtgtccaagagcatccacaccctgctgagcaagggccaggccgtgacaggccagtaccgcttcctggcccggagcggcggctacctgtggacccagacccaggccaccgtggtgtctgggggccggggcccccagagcgagagcatcgtgtgtgtgcacttcctgatcagccaggtggaggagactggagtggtgctgagcctggagcagacagagcagcacagcagaagacccatccagagaggagcccccagccagaaggacacccccaaccctggggacagcctggacaccccaggcccccgcatcctggccttcctgcacccccccagcctgtctgaggccgccctggccgctgacccccggcgcttctgcagcccagacctgcggcggctgctgggccccatcctggatggagcctctgtggccgccacccccagcacccccctggccaccaggcacccccagagccccctgtctgctgacctgcctgatgagctgcctgtgggcacagaaaatgtgcacaggctcttcaccagcggcaaggacacagaagctgtggagacagacctggacatcgcccaggatgctgatgccctggacctggagatgctggccccctacatctccatggatgatgacttccagctgaatgccagcgagcagctgccccgggcctaccaccggcccctgggcgctgtgccccggccccgggcccggagcttccacggcctgagccccccagccctggagcccagcctgctgccccgctggggcagtgacccccggctgagctgcagcagccccagcagaggagaccccagcgccagcagccccatggccggggccaggaagaggaccctggcccagagcagtgaagatgaagatgaaggagtggagctgctgggcgtgcggccccccaagaggagccccagccctgagcacgagaacttcctgctcttccccctgagcctggtgtgctggggcatcaatggcatcctgtggcccagcctgcccagctggctgaagcccaccgtgctgtag

SEQ ID NO: 275986 - DNA, 1842 bp, Artificial Sequence
  derived and/or modified sequence
atgaggctgaccatctcctacctgaggatgcaccggctgtgtgccgccggggagtggaaccaggtgggcgctggaggagagcccctggatgcctgctacctgaaggccctggagggctttgtgatggtgctgacagctgagggggacatggcctacctgtctgaaaatgtgtccaagcacctgggcctgagccagctggagctgattggccacagcatctttgacttcatccacccctgtgaccaggaggagctgcaggatgccctgaccccccagcagaccctgagcaggaggaaggtggaggcccccacagagcgctgcttcagcctgaggatgaagagcaccctgaccagccggggccgcaccctgaacctgaaggccgccacctggaaggtgctgaactgcagcggccacatgagggcctacaagcccccagcccagaccagccctgctggcagcccagacagcgagccccccctgcagtgcctggtgctgatctgtgaggccatcccccaccctggcagcctggagccccccctgggccgcggggccttcctgagccgccacagcctggacatgaagttcacctactgtgatgacagaattgctgaggtggccggctacagcccagatgacctgattggctgcagcgcctatgagtacatccacgccctggacagtgatgctgtgtccaagagcatccacaccctgctgagcaagggccaggccgtgacaggccagtaccgcttcctggcccggagcggcggctacctgtggacccagacccaggccaccgtggtgtctgggggccggggcccccagagcgagagcatcgtgtgtgtgcacttcctgatcagccaggtggaggagactggagtggtgctgagcctggagcagacagagcagcacagcagaagacccatccagagaggagcccccagccagaaggacacccccaaccctggggacagcctggacaccccaggcccccgcatcctggccttcctgcacccccccagcctgtctgaggccgccctggccgctgacccccggcgcttctgcagcccagacctgcggcggctgctgggccccatcctggatggagcctctgtggccgccacccccagcacccccctggccaccaggcacccccagagccccctgtctgctgacctgcctgatgagctgcctgtgggcacagaaaatgtgcacaggctcttcaccagcggcaaggacacagaagctgtggagacagacctggacatcgcccaggatgctgatgccctggacctggagatgctggccccctacatctccatggatgatgacttccagctgaatgccagcgagcagctgccccgggcctaccaccggcccctgggcgctgtgccccggccccgggcccggagcttccacggcctgagccccccagccctggagcccagcctgctgccccgctggggcagtgacccccggctgagctgcagcagccccagcagaggagaccccagcgccagcagccccatggccggggccaggaagaggaccctggcccagagcagtgaagatgaagatgaaggagtggagctgctgggcgtgcggccccccaagaggagccccagccctgagcacgagaacttcctgctcttccccctgagcctgtccttcctgctgactggaggccctgcccctggcagcctgcaggaccccagcacccccctgctgaacctgaatgagcccctgggcctgggccccagcctgctgagcccctacagtgatgaggacaccacccagcccggcggccccttccagcccagggctggcagcgcccaggccgactag

SEQ ID NO: 275987 - DNA, 1731 bp, Artificial Sequence
  derived and/or modified sequence
atgcggctgaccatcagctacctgcggatgcaccggctgtgcgccgcaggagaatggaatcaggtgggggcaggaggggagccactagacgcatgttatctgaaggctctggagggctttgtcatggtactgacggccgaaggtgatatggcttatctgtcagaaaacgtctccaaacatttgggcctgagtcagctggaactcatcgggcacagtatcttcgatttcatccatccctgtgatcaggaggagttgcaggacgcattgacgccccagcaaaccctgagccgccgaaaggtggaagcacccaccgagcgctgctttagcctcaggatgaagagcacactcacgagtagaggacgaaccctgaacctcaaagctgccacctggaaagtcttgaactgcagtggtcacatgcgcgcatataagccacccgctcagacttctcccgctggtagtcctgactccgagccccctcttcagtgcctggtactgatttgtgaagcaattccccaccctggtagcctggagccacccctggggcggggggcttttttgtcacgtcactctttggacatgaaattcacgtattgtgatgatagaattgccgaagtggctggctacagccccgacgatctcatcggatgcagcgcctacgaatatatacacgctttagacagtgatgcagtgtccaagtccatacacacactgctgtctaaaggccaagctgtaactggtcagtaccgcttcctcgcccggtcagggggatacctctggacacagacgcaggcgacagtcgtctcagggggaagaggcccccagtctgagtcaatagtttgtgtgcattttttgatctcgcaggttgaagaaacgggcgttgtgctgtccttggagcaaacagaacagcactcccgacgccccatccagagaggagctccctcacagaaggacacccctaaccccggagactctttggacacacctggaccaagaatcttggctttcctgcatcccccttcactctccgaagctgcactagccgccgatcccaggcggttctgtagtcccgacctccgccgcttactgggtccaattctggacggcgccagtgtggccgcgacaccttctacacccttggcaacccgacacccacagagccccctgagcgccgacttacccgacgaacttccggtggggactgagaatgtccatagactgtttacatctggaaaagatacagaagccgtggagacggacctcgacatagcacaggacgccgatgcccttgatctggaaatgctcgcgccttacatctccatggatgacgacttccagttgaacgcatccgagcagttgcctcgtgcctaccaccggcctctcggtgctgtgcctagaccccgggccaggtcttttcacggtctctctccccccgcgctggaaccaagcctgctgccacgatgggggagtgacccccgtctgagctgttcctctccatcccgaggagacccttccgcctcctcccctatggcaggagcccgcaaacgaactctggcccaatcttcagaagacgaggacgagggggttgagctgctgggagtgaggccaccaaagagatcaccgagccccgagcatgagaacttcctgcttttccctctgtctctcgtgtgctggggtattaacgggattttatggccttcgcttcccagctggctcaagcctactgtcctttag

SEQ ID NO: 275988 - DNA, 1842 bp, Artificial Sequence
  derived and/or modified sequence
atgcggctgaccatcagctacctgcggatgcaccggctgtgcgccgcaggcgagtggaaccaggttggagcaggaggcgaacctcttgacgcgtgctacctgaaagcattggaggggttcgtgatggttcttactgcagagggggacatggcgtacctttcagaaaacgtctctaagcacttaggccttagccaactggaactcattggccacagcattttcgactttatacacccttgcgatcaggaagaattgcaggacgccctcacaccacagcaaaccttgtccaggcgaaaagtggaggctcccaccgaaaggtgttttagcctgcgcatgaagtctaccctcacgtcccgggggaggactctgaatttgaaggctgcaacatggaaggttctaaattgttcaggccacatgagggcttacaagccgcccgctcaaacctccccagccggcagccccgacagcgagccccccctgcagtgtttagtgcttatttgcgaggccattcctcacccggggtctttagagcccccactgggccgaggagcatttctttctcgtcactccctcgacatgaaatttacatactgtgacgatcggatcgccgaggtggccggttactctccagatgatctaatcggctgctccgcttatgaatatattcatgcactcgacagtgatgcagtatctaagagcatccataccctcctttccaaggggcaggcagtcacgggacagtaccggttcctagctagatcgggtgggtacctgtggactcagacacaagcgaccgttgtgtctggcggcagagggcctcagtccgagtccatagtgtgcgtgcacttcctcatttcccaggtagaagagacaggagttgttctgtccctggagcaaactgaacagcattccaggaggccaatccagagaggagctccttctcaaaaggacacgcccaacccaggtgattcgctggacacccctggcccacgcattctggcatttctccacccgcccagcttaagtgaagccgccctcgcggccgatccacgaaggttttgtagccctgatttgcgcagattactgggccccatactggatggcgcctctgttgccgcaacaccatcaacgcctctggccacaaggcacccccagagtccgcttagcgccgacctgcccgatgagcttcctgttggaaccgagaatgtgcataggctttttacttccggaaaagacaccgaggcagtggaaacggatctagacatagcccaagacgccgacgccctggatttagaaatgctagcgccctacatttccatggacgacgattttcagctcaacgcatccgagcagttgccacgagcgtaccacagacccctgggtgcagtcccacggcctagagcccgctcatttcacggactgagcccaccagccctcgagccaagtctgctccccaggtgggggtccgaccccagactctcatgcagctcaccttcacggggtgatccgtccgcctcttcacccatggctggcgcccggaagagaactctggctcaaagcagcgaagatgaggacgagggagtggaactgctaggtgtccgtccaccaaaacgatcacctagccccgaacacgagaatttccttctgtttcccctctctctctcatttctgttgaccggtggccctgcacctgggagcctgcaggacccatctactcccctgctcaatctgaacgaaccactcggtctagggccttcccttctcagtccttattcagatgaggacacgacacagcccggtggtccttttcaacctagagcggggtccgcacaggcagactag

SEQ ID NO: 275989 - DNA, 1731 bp, Artificial Sequence
  derived and/or modified sequence
atgcggctcaccatctcctacctgagaatgcacaggctgtgcgcagctggggaatggaaccaggttggagctgggggtgagccactcgatgcatgttacctaaaggccctagaaggatttgttatggtactcacggcagaaggtgatatggcctacctcagcgagaacgtgagcaaacatctgggcttgtcccagctggagctgattggtcacagtattttcgactttattcacccctgtgaccaggaagagctgcaagatgccctgacaccgcagcaaaccttaagcaggcgaaaggtcgaggccccaaccgagcgctgtttttctctgcgaatgaagtcgacactcacctcgaggggacgcactctgaatctgaaggccgctacttggaaagtgctcaattgctcaggccatatgcgcgcttacaaaccacccgcacagacgagccccgctggctcacccgattccgaacctcccctccagtgccttgtgttgatatgtgaggcaattcctcatcccggttccctcgaaccccctttgggcaggggggctttcctgtcacgccacagcctggatatgaagtttacatattgcgacgatcggatagctgaggtggctggttatagtcccgatgatttgatcggctgtagcgcttatgagtacatacacgcactggactccgatgcggtgtctaaaagtattcatacgttgctgtctaaaggacaggctgtgaccggccagtaccgtttccttgcaagatctgggggatacctgtggacacaaacccaggccacagtcgtatccggagggagggggcctcagagcgagtcaatcgtatgcgtgcacttcctcatatcccaggtggaggaaactggagtagtgctaagcctggaacagaccgagcagcattctcggaggcccattcagaggggtgctccatcccaaaaagatacccccaacccgggagactccctcgatacaccagggcctcgcatccttgcgtttttacatccacccagtttatcagaggccgcactggcagccgatccaagacggttttgtagtcctgatttaaggcgtctgctgggcccaattctggacggcgcatcagtcgcggctacgccttctacgccattggcaacccgtcacccacagagtcccctcagcgctgatctccctgacgaattgccagtgggtactgagaacgttcatagactattcacatctggcaaggataccgaagccgtggaaactgaccttgatatcgcccaggatgcagacgcattagatctggagatgctggcaccttacatctctatggacgacgatttccagcttaatgcatcggagcagctgccaagggcctatcatcggccactcggagccgtgcctcgacccagagccaggtccttccatgggctctcaccccctgccctagagccgagtttgctgccacggtggggttcagacccacgcttgagctgtagctccccttctagaggagatcctagcgcctccagtcctatggctggggctagaaaacggaccctggctcaatcatcagaagacgaggatgaaggtgtcgaattgctcggagttaggccaccaaaaagatcccccagccccgagcatgagaactttctgctctttccactttcattggtctgctggggcatcaatggcatactgtggccttctctacctagctggctgaagcctactgtcctctag

SEQ ID NO: 275990 - DNA, 1842 bp, Artificial Sequence
  derived and/or modified sequence
atgagactaactattagttacttacgaatgcatagactttgtgcagcaggcgagtggaatcaggtcggggctggaggcgagccactggatgcgtgttatctcaaggcactagagggcttcgttatggtgttaacagccgagggcgacatggcttacctttctgagaatgtgtcaaaacacctcggtctttctcagctcgaacttattgggcatagcatcttcgatttcatccacccctgtgatcaggaggaacttcaagacgctctgacaccacaacaaaccttgtctcggcgaaaggttgaggctccgaccgagaggtgcttctctctaagaatgaaatctacgctgaccagtagaggacgtacattgaatctaaaagcagccacctggaaggtcctgaactgcagcggtcatatgcgcgcttacaagccgccagcccagactagcccagctgggagtccagactctgaaccccctttgcagtgtctcgtgttgatctgcgaagctattcctcaccccggaagtctggaacccccacttggcagaggtgcttttcttagtagacattcactagacatgaaattcacctactgcgatgaccgaattgcggaggtggcaggttactcccccgatgacttgatcggctgttccgcctatgagtatatccatgctcttgactccgacgcggtgtcaaaatccattcatacactcctcagcaagggccaagctgttaccggccagtacaggtttctggccagatccggtggttacctttggactcagacacaggccaccgttgtgtccggtggtagaggccctcaaagcgagtcaatcgtctgtgttcatttcttaatctcccaagtggaagaaaccggcgtcgtcttgagcctggagcagacggagcaacactcacgtaggccaatccagcgcggtgcgcctagtcagaaggatacacccaacccgggtgactccttggatacaccaggtccacgcatcttggccttccttcatccacccagtctgtccgaagctgcgttagcagcagatcctcggagattctgctcccccgacctgcgcagacttctaggcccaattctggacggagcttcagtggcagctaccccctccactccactcgctacaagacatcctcagagcccgctctcagccgacttaccggatgagctgccagtgggcacggaaaatgtacacagactgttcacgtctggaaaggatacagaagcagtggaaaccgacctagacatcgcccaagatgccgacgcacttgaccttgagatgttagccccttatatttccatggatgacgactttcagctgaacgccagcgagcagctgcctagagcctaccaccgcccactcggtgcggtgcctcgccctcgagcgagatcatttcacggcctcagcccccctgcactagaaccctccctgcttccaaggtgggggagtgatccaaggctttcatgttcatcaccttccaggggagacccatccgcatctagccctatggcgggagctcgcaagcgaaccctcgcccaaagtagtgaagacgaggatgaaggggtcgagctgctcggggtgaggcccccaaaaagatctccgtctcccgagcacgagaattttctactgtttccactgtctctctcgttcctactgactggaggaccagcccctgggtccttgcaagacccgtccacgccactgctgaacctcaatgagccattaggactggggcctagcttgctttctccgtactccgatgaagatacgactcaacctggcggaccatttcagcctcgcgcaggttcagcgcaagcagattag

SEQ ID NO: 275991 - DNA, 1731 bp, Artificial Sequence
  derived and/or modified sequence
atgagactgaccatcagctacctgagaatgcacagactgtgcgccgccggcgagtggaaccaggtgggcgccggcggcgagcccctggacgcctgctacctgaaggccctggagggcttcgtgatggtgctgaccgccgagggcgacatggcctacctgagcgagaacgtgagcaagcacctgggcctgagccagctggagctgatcggccacagcatcttcgacttcatccacccctgcgaccaggaggagctgcaggacgccctgaccccccagcagaccctgagcagaagaaaggtggaggcccccaccgagagatgcttcagcctgagaatgaagagcaccctgaccagcagaggcagaaccctgaacctgaaggccgccacctggaaggtgctgaactgcagcggccacatgagagcctacaagccccccgcccagaccagccccgccggcagccccgacagcgagccccccctgcagtgcctggtgctgatctgcgaggccatcccccaccccggcagcctggagccccccctgggcagaggcgccttcctgagcagacacagcctggacatgaagttcacctactgcgacgacagaatcgccgaggtggccggctacagccccgacgacctgatcggctgcagcgcctacgagtacatccacgccctggacagcgacgccgtgagcaagagcatccacaccctgctgagcaagggccaggccgtgaccggccagtacagattcctggccagaagcggcggctacctgtggacccagacccaggccaccgtggtgagcggcggcagaggcccccagagcgagagcatcgtgtgcgtgcacttcctgatcagccaggtggaggagaccggcgtggtgctgagcctggagcagaccgagcagcacagcagaagacccatccagagaggcgcccccagccagaaggacacccccaaccccggcgacagcctggacacccccggccccagaatcctggccttcctgcacccccccagcctgagcgaggccgccctggccgccgaccccagaagattctgcagccccgacctgagaagactgctgggccccatcctggacggcgccagcgtggccgccacccccagcacccccctggccaccagacacccccagagccccctgagcgccgacctgcccgacgagctgcccgtgggcaccgagaacgtgcacagactgttcaccagcggcaaggacaccgaggccgtggagaccgacctggacatcgcccaggacgccgacgccctggacctggagatgctggccccctacatcagcatggacgacgacttccagctgaacgccagcgagcagctgcccagagcctaccacagacccctgggcgccgtgcccagacccagagccagaagcttccacggcctgagcccccccgccctggagcccagcctgctgcccagatggggcagcgaccccagactgagctgcagcagccccagcagaggcgaccccagcgccagcagccccatggccggcgccagaaagagaaccctggcccagagcagcgaggacgaggacgagggcgtggagctgctgggcgtgagaccccccaagagaagccccagccccgagcacgagaacttcctgctgttccccctgagcctggtgtgctggggcatcaacggcatcctgtggcccagcctgcccagctggctgaagcccaccgtgctgtag

SEQ ID NO: 275992 - DNA, 1842 bp, Artificial Sequence
  derived and/or modified sequence
atgagactgaccatcagctacctgagaatgcacagactgtgcgccgccggcgagtggaaccaggtgggcgccggcggcgagcccctggacgcctgctacctgaaggccctggagggcttcgtgatggtgctgaccgccgagggcgacatggcctacctgagcgagaacgtgagcaagcacctgggcctgagccagctggagctgatcggccacagcatcttcgacttcatccacccctgcgaccaggaggagctgcaggacgccctgaccccccagcagaccctgagcagaagaaaggtggaggcccccaccgagagatgcttcagcctgagaatgaagagcaccctgaccagcagaggcagaaccctgaacctgaaggccgccacctggaaggtgctgaactgcagcggccacatgagagcctacaagccccccgcccagaccagccccgccggcagccccgacagcgagccccccctgcagtgcctggtgctgatctgcgaggccatcccccaccccggcagcctggagccccccctgggcagaggcgccttcctgagcagacacagcctggacatgaagttcacctactgcgacgacagaatcgccgaggtggccggctacagccccgacgacctgatcggctgcagcgcctacgagtacatccacgccctggacagcgacgccgtgagcaagagcatccacaccctgctgagcaagggccaggccgtgaccggccagtacagattcctggccagaagcggcggctacctgtggacccagacccaggccaccgtggtgagcggcggcagaggcccccagagcgagagcatcgtgtgcgtgcacttcctgatcagccaggtggaggagaccggcgtggtgctgagcctggagcagaccgagcagcacagcagaagacccatccagagaggcgcccccagccagaaggacacccccaaccccggcgacagcctggacacccccggccccagaatcctggccttcctgcacccccccagcctgagcgaggccgccctggccgccgaccccagaagattctgcagccccgacctgagaagactgctgggccccatcctggacggcgccagcgtggccgccacccccagcacccccctggccaccagacacccccagagccccctgagcgccgacctgcccgacgagctgcccgtgggcaccgagaacgtgcacagactgttcaccagcggcaaggacaccgaggccgtggagaccgacctggacatcgcccaggacgccgacgccctggacctggagatgctggccccctacatcagcatggacgacgacttccagctgaacgccagcgagcagctgcccagagcctaccacagacccctgggcgccgtgcccagacccagagccagaagcttccacggcctgagcccccccgccctggagcccagcctgctgcccagatggggcagcgaccccagactgagctgcagcagccccagcagaggcgaccccagcgccagcagccccatggccggcgccagaaagagaaccctggcccagagcagcgaggacgaggacgagggcgtggagctgctgggcgtgagaccccccaagagaagccccagccccgagcacgagaacttcctgctgttccccctgagcctgagcttcctgctgaccggcggccccgcccccggcagcctgcaggaccccagcacccccctgctgaacctgaacgagcccctgggcctgggccccagcctgctgagcccctacagcgacgaggacaccacccagcccggcggccccttccagcccagagccggcagcgcccaggccgactag

SEQ ID NO: 275993 - protein, 612 aa, Artificial Sequence
  derived and/or modified sequence
MLPMPSGRPRSCARKSPGMRPAAGAARRPRCCTSWLTRCPSPAASAPTWTRPLSCASPSATCACTASAPQLELIGHSIFDFIHPCDQEELQDALTPQQTLSRRKVEAPTERCFSLRMKSTLTSRGRTLNLKAATWKVLNCSGHMRAYKPPAQTSPAGSPDSEPPLQCLVLICEAIPHPGSLEPPLGRGAFLSRHSLDMKFTYCDDRIAEVAGYSPDDLIGCSAYEYIHALDSDAVSKSIHTLLSKGQAVTGQYRFLARSGGYLWTQTQATVVSGGRGPQSESIVCVHFLISQVEETGVVLSLEQTEQHSRRPIQRGAPSQKDTPNPGDSLDTPGPRILAFLHPPSLSEAALAADPRRFCSPDLRRLLGPILDGASVAATPSTPLATRHPQSPLSADLPDELPVGTENVHRLFTSGKDTEAVETDLDIAQDADALDLEMLAPYISMDDDFQLNASEQLPRAYHRPLGAVPRPRARSFHGLSPPALEPSLLPRWGSDPRLSCSSPSRGDPSASSPMAGARKRTLAQSSEDEDEGVELLGVRPPKRSPSPEHENFLLFPLSLSFLLTGGPAPGSLQDPSTPLLNLNEPLGFHFVTQSGVQWHKHSSPQPRPPGLK

SEQ ID NO: 275994 - DNA, 1839 bp, Artificial Sequence
  derived and/or modified sequence
atgctgccaatgccttccggacgccccagatcttgcgccagaaagagtcccggtatgcgccctgctgcaggcgcagccaggagaccacgctgctgtactagctggctgaccaggtgtccgtcaccggccgcatcggctccaacttggactcgacctctgagctgtgctagtcctagcgcaacctgcgcctgcactgcgtctgctccacaactggagcttattggacactctatttttgacttcatccacccctgtgatcaggaagaactgcaggatgctctcactccacaacagaccctctccaggagaaaagtggaggctccgactgagagatgcttcagcctgaggatgaaaagcactttgacctccaggggaagaactctaaacttgaaggcagcaacatggaaagtgctgaactgcagcgggcatatgcgggcttacaagccccctgcccaaaccagtccagccggaagccccgactctgaaccgccactgcagtgcctggtcctgatctgcgaggccatcccacatccgggtagtctagaacccccactgggaagaggggccttcctctcacggcacagccttgacatgaaattcacttactgtgacgataggatcgccgaagtggctggatatagccctgatgacctcattggatgcagcgcctacgaatatatccatgcgttggactccgacgctgtgtcaaagtctatccacactctcctgtccaaagggcaggctgtgaccggccagtacaggttccttgctcgctctggtggctacctctggacacaaactcaggccaccgtggtatcagggggcagggggccacaatcagaaagcatcgtctgcgtacactttctgattagtcaggtggaggagacgggtgttgtcctgagcttggaacagactgaacagcatagccgtagaccaatccagcgcggggctccttctcaaaaagatactcccaaccctggagatagcctggacactcccggacctaggatattggccttcctgcatcctcccagtctatcggaggcagctctggctgccgatccccgccgtttctgttcccccgacttacgaaggcttctgggaccaattcttgatggagcttcagtggccgctaccccatctactcccctggctacacggcatccccagtcccctctgtccgctgatctgcccgacgaactaccggttggtaccgaaaacgtgcacaggctatttacctcagggaaagacaccgaagctgtcgaaacagacctcgatattgcgcaggatgccgatgcactcgacctggagatgctggccccctatatcagcatggacgacgatttccagttgaacgcaagcgaacagttacccagagcgtaccacagacccctgggcgccgtgcctcgccctcgtgcccgctctttccacggactttcacctccggcattagagccctccctgttgccacggtggggcagtgatccccggctgagctgctccagtccctcaaggggagacccttctgcctcatcccccatggccggggcaaggaagcgcacactggctcaaagcagtgaggatgaggacgagggcgtagagttattgggagtgcgccccccaaaaagaagcccctcacctgagcacgagaacttcctactgtttcccctttcgctgtcatttctgctcacgggcggtccagcaccggggtcacttcaagacccaagcacccccctcttgaatttaaacgaaccactggggtttcacttcgtcacccagagtggcgtacagtggcataagcacagctccccacagccaaggccaccaggcctcaaatag

SEQ ID NO: 275995 - DNA, 2101 bp, Artificial Sequence
  derived and/or modified sequence
cttttctctttcccgagtcaccaccagtgaatgctgcccatgccctcaggtcgaccacggagctgcgcaaggaaaagtcccgggatgcggcccgcagccggcgcagccaggagaccgaggtgctgtaccagctggctcacacgctgcccttcgcccgcggcgtcagcgcccacctggacaaggcctctatcatgcgcctcaccatcagctacctgcgcatgcaccgcctctgcgccgcagctggagctcattggacacagcatctttgatttcatccacccctgtgaccaagaggagcttcaggacgccctgaccccccagcagaccctgtccaggaggaaggtggaggcccccacggagcggtgcttctccttgcgcatgaagagtacactcaccagccgcgggcgcaccctcaacctcaaggcggccacctggaaggtgctgaactgctctggacatatgagggcctacaagccacctgcgcagacttctccagctgggagccctgactcagagcccccgctgcagtgcctggtgctcatctgcgaagccatcccccacccaggcagcctggagcccccactgggccgaggggccttcctcagccgccacagcctggacatgaagttcacctactgtgacgacaggattgcagaagtggctggctatagtcccgatgacctgatcggctgttccgcctacgagtacatccacgcgctggactccgatgcggtcagcaagagcatccacaccttgctgagcaagggccaggcagtaacagggcagtatcgcttcctggcccggagtggtggctacctgtggacccagacccaggccacagtggtgtcagggggacggggcccccagtcggagagtatcgtctgtgtccattttttaatcagccaggtggaagagaccggagtggtgctgtccctggagcaaacggagcaacactctcgcagacccattcagcggggcgccccctctcagaaggacacccctaaccctggggacagccttgacacccctggcccccggatccttgccttcctgcacccgccttccctgagcgaggctgccctggccgctgacccccgccgtttctgcagccctgacctccgtcgcctcctgggacccatcctggatggggcttcagtagcagccactcccagcaccccgctggccacacggcacccccaaagtcctctttcggctgatctcccagatgaactacctgtgggcaccgagaatgtgcacagactcttcacctccgggaaagacactgaggcagtggagacagatttagatatagctcaggatgctgatgctctggatttggagatgctggccccctacatctccatggatgatgacttccagctcaacgccagcgagcagctacccagggcctaccacagacctctgggggctgtcccccggccccgtgctcggagcttccatggcctgtcacctccagcccttgagccctccctgctaccccgctgggggagtgacccccggctgagctgctccagcccttccagaggggacccctcagcatcctctcccatggctggggctcggaagaggaccctggcccagagctcagaggacgaggacgagggagtggagctgctgggagtgagacctcccaaaaggtcccccagcccagaacacgaaaactttctgctctttcctctcagcctgagtttccttctgacaggaggaccagccccagggagcctgcaggaccccagcaccccactcctgaacctgaatgagcccctgggttttcactttgtcacccagtctggagtgcagtggcacaaacacagctcaccgcagcctcgacctcctgggctcaagtgatcctcctacttcagctcccacaagtagctgggactgcagctatgtgccatcatgcctggctgatgtttatatgttttgtagagacgaggtttcaccatgttgcccaggctggtcttgaactcctgagttcaagcgatccacctgccttggcctcccaaagtgctgggattactggtatgaaccaccacgcccgacagtaaatatgttttgaatgaataaactctcataaatg

SEQ ID NO: 275996 - DNA, 1839 bp, Artificial Sequence
  derived and/or modified sequence
atgctgcccatgcccagcggccggcccaggagctgtgccaggaagagccctggcatgaggcctgctgctggagctgcccggcggccccgctgctgcacctcctggctgacccgctgccccagccctgctgccagcgcccccacctggacccggcccctgagctgtgccagccccagcgccacctgtgcctgcacagccagcgccccccagctggagctgattggccacagcatctttgacttcatccacccctgtgaccaggaggagctgcaggatgccctgaccccccagcagaccctgagcaggaggaaggtggaggcccccacagagcgctgcttcagcctgaggatgaagagcaccctgaccagccggggccgcaccctgaacctgaaggccgccacctggaaggtgctgaactgcagcggccacatgagggcctacaagcccccagcccagaccagccctgctggcagcccagattctgagccccccctgcagtgcctggtgctgatctgtgaggccatcccccaccctggcagcctggagccccccctgggccgcggggccttcctgagccgccacagcctggacatgaagttcacctactgtgatgacagaattgctgaggtggccggctacagcccagatgacctgattggctgcagcgcctatgagtacatccacgccctggacagtgatgctgtgtccaagagcatccacaccctgctgagcaagggccaggccgtgacaggccagtaccgcttcctggcccggagcggcggctacctgtggacccagacccaggccaccgtggtgtctgggggccggggcccccagagcgagagcatcgtgtgtgtgcacttcctgatcagccaggtggaggagaccggggtggtgctgagcctggagcagacagagcagcacagccggcggcccatccagagaggagcccccagccagaaggacacccccaaccctggggacagcctggacaccccaggcccccgcatcctggccttcctgcacccccccagcctgtctgaggccgccctggccgctgacccccggcgcttctgcagcccagacctgcggcggctgctgggccccatcctggatggagcctctgtggccgccacccccagcacccccctggccaccaggcacccccagagccccctgtctgctgacctgcctgatgagctgcctgtgggcacagaaaatgtgcacaggctcttcaccagcggcaaggacacagaggccgtggagacagacctggacatcgcccaggatgctgatgccctggacctggagatgctggccccctacatctccatggatgatgacttccagctgaatgccagcgagcagctgccccgggcctaccaccggcccctgggcgctgtgccccggccccgggcccgctccttccacggcctgagccccccagccctggagcccagcctgctgccccgctggggcagtgacccccggctgagctgcagcagccccagcagaggagaccccagcgccagcagccccatggccggggccaggaagaggaccctggcccagagcagtgaagatgaagatgagggcgtggagctgctgggcgtgcggccccccaagaggagccccagccctgagcacgagaacttcctgctcttccccctgagcctgtccttcctgctgaccggcggccctgcccctggcagcctgcaggaccccagcacccccctgctgaacctgaatgagcccctgggcttccactttgtgacccagagcggcgtgcagtggcacaagcacagcagcccccagccccggcccccaggcctgaagtag

SEQ ID NO: 275997 - DNA, 1839 bp, Artificial Sequence
  derived and/or modified sequence
atgctgcccatgcccagcggccggccccggagctgcgcccggaagtctccagggatgaggccagcagccggagcggcgcgtcggcctaggtgttgcacaagctggctcaccagatgtccctcaccagccgccagcgcccctacatggacccgtcctctgtcttgtgctagcccatccgccacctgcgcttgtactgcaagcgcgccacaactggaactcattggacacagcatctttgattttattcatccttgtgaccaggaggagctacaggacgctcttacaccccagcaaacattgagccgcaggaaagtggaggcaccaacagagagatgctttagcctgcgcatgaagtccactttgactagccgcggtcgtaccctaaacctgaaagcagcaacctggaaggtgctgaattgtagcggtcacatgcgagcttacaagcctcccgcccagacaagtcctgctggcagccccgactctgaaccccccctgcagtgcctggtgctgatctgtgaggcaataccccacccgggttcgctcgagccacctctgggcagaggcgccttcctgagccggcacagcctcgacatgaagtttacctactgcgacgacaggatcgccgaagtggcagggtactcccctgatgatctgattggatgctcagcctatgagtacattcatgcgttagatagcgatgcggtgagcaagagtatccacactttgctctctaagggacaggccgttacagggcagtaccggttcctggcaaggagcggtgggtacctgtggacacagacccaagcgacagtggtgagtgggggcaggggcccacaaagcgaatcaatcgtctgcgtgcacttccttataagccaggtggaagaaactggagtggtcctgagcctcgaacagaccgaacaacactctcggcgccccattcaacggggggcaccctcacaaaaggatacccctaatccaggcgattctctcgacacacctgggccgcgcatcctagcatttctgcatcctcccagcctatccgaggcggctctggccgccgaccccaggagattctgctcaccggacctgcgccggctgctgggcccgatcctggacggcgcgagcgtggccgccacaccatctacacctctggctacccgccatccacaaagtcccctgtctgccgatctgcctgatgagcttcctgtcgggaccgaaaacgttcacagactcttcacttcagggaaagacacagaggcggtcgagaccgacctcgatattgcccaggatgctgacgcactcgacctggagatgttggctccctacatctcaatggacgacgactttcagttaaatgcatctgaacagctaccgcgagcctatcaccgtcccctcggcgcggtgcctagacctcgggccagatcctttcatggcttgtcccctccggccctggaaccctcgctgttacctcggtgggggagcgatcctcgcttgtcatgctcttctcccagcagaggagatcccagcgcttcctccccaatggcaggcgcccgtaaaagaactctcgctcaatcatcagaagacgaagacgagggggtggagttactgggagtgcggcctccgaagcggtcaccttcccccgaacatgaaaatttccttctctttccgctgtccttgtcattcctgctcaccgggggaccggctccaggttccctccaagacccaagcacgcccttactgaacctgaatgaacccttaggttttcactttgtgactcaatcgggcgtgcagtggcacaaacatagttctcctcagcccaggccaccaggtctcaagtag

SEQ ID NO: 275998 - DNA, 1839 bp, Artificial Sequence
  derived and/or modified sequence
atgctgccaatgccctcaggcagacccaggagttgcgccagaaagtcacccggaatgcgcccagcagccggagcagccaggaggccacggtgctgcacttcatggctgaccaggtgtccttcacctgccgcttccgccccaacctggacaaggcccttaagctgcgccagcccgtctgcaacttgcgcctgtactgcttccgcaccgcagctggagctgatcggtcatagtatcttcgactttattcacccgtgtgaccaggaagagctccaggacgcccttaccccgcagcagacactcagccgaaggaaagtggaagcccctactgagaggtgcttttcgctccgcatgaaaagcacacttactagccgcggacgaacactgaatctgaaagccgcaacctggaaggttcttaattgtagcggacacatgcgcgcatacaagccccctgcacagacttcaccagctggaagccccgattccgaaccacccctgcagtgcctggtgctgatctgcgaggccattccacaccccggttccctagagcccccactgggaaggggggcatttttgagcaggcacagtctggacatgaaatttacatactgcgacgatcggattgctgaagtcgccggatacagccccgacgacctaattggctgctcggcctacgaatatattcacgcactggactcagacgcggtgtccaaaagcatccatacgctactgtcaaaaggacaagccgttacaggtcagtatcgttttctggcccgtagcggcggatacctatggacgcaaacccaggctacggtggtttcggggggtagagggcctcagagcgaatccattgtttgcgtccacttcctcatatcccaggtggaggaaaccggcgtggtgctgtcgctcgagcagactgagcagcacagtcggcgtccaatccagaggggagcgccaagccagaaagacacccccaatccgggtgacagtcttgatacccccggacctcggatcttggcatttctccaccctcctagcctgtctgaggccgctttagcggctgacccacggagattctgcagtccagacctgcgtaggcttctgggccctattctggacggtgcttccgtcgcagcgacacccagtacaccactggcaaccagacacccacagagccctctgtctgccgaccttcccgatgagttacccgtagggactgaaaatgtgcataggttattcaccagcgggaaagacactgaagctgtggaaactgacctagacatcgcccaggatgccgatgccctggatctcgaaatgcttgccccatacatcagcatggatgatgatttccagctgaacgcttctgaacagcttcccagggcctaccatagacccctcggcgctgtgccgaggccacgagctcgctcctttcatggcctctcgcccccagccctcgagccaagtttgctgccaaggtgggggtctgatcccagactgagctgtagttctccaagtcgcggtgaccctagtgcttcctcccccatggctggagctcgcaaacggacactggcacagtcctctgaagatgaagatgaaggtgtggagcttctgggggtgcgacctccgaaacggtcaccttcaccagagcacgagaactttctgcttttcccattgtcgctgagtttcctgcttacgggtggcccagcgccaggctccctccaagatccatcaaccccccttctcaatctcaacgagccgctgggatttcactttgtgacccagtccggggtgcagtggcataagcattcatccccccagcctcgtcccccaggccttaagtag

SEQ ID NO: 275999 - DNA, 1839 bp, Artificial Sequence
  derived and/or modified sequence
atgctgcccatgcccagcggcagacccagaagctgcgccagaaagagccccggcatgagacccgccgccggcgccgccagaagacccagatgctgcaccagctggctgaccagatgccccagccccgccgccagcgcccccacctggaccagacccctgagctgcgccagccccagcgccacctgcgcctgcaccgccagcgccccccagctggagctgatcggccacagcatcttcgacttcatccacccctgcgaccaggaggagctgcaggacgccctgaccccccagcagaccctgagcagaagaaaggtggaggcccccaccgagagatgcttcagcctgagaatgaagagcaccctgaccagcagaggcagaaccctgaacctgaaggccgccacctggaaggtgctgaactgcagcggccacatgagagcctacaagccccccgcccagaccagccccgccggcagccccgacagcgagccccccctgcagtgcctggtgctgatctgcgaggccatcccccaccccggcagcctggagccccccctgggcagaggcgccttcctgagcagacacagcctggacatgaagttcacctactgcgacgacagaatcgccgaggtggccggctacagccccgacgacctgatcggctgcagcgcctacgagtacatccacgccctggacagcgacgccgtgagcaagagcatccacaccctgctgagcaagggccaggccgtgaccggccagtacagattcctggccagaagcggcggctacctgtggacccagacccaggccaccgtggtgagcggcggcagaggcccccagagcgagagcatcgtgtgcgtgcacttcctgatcagccaggtggaggagaccggcgtggtgctgagcctggagcagaccgagcagcacagcagaagacccatccagagaggcgcccccagccagaaggacacccccaaccccggcgacagcctggacacccccggccccagaatcctggccttcctgcacccccccagcctgagcgaggccgccctggccgccgaccccagaagattctgcagccccgacctgagaagactgctgggccccatcctggacggcgccagcgtggccgccacccccagcacccccctggccaccagacacccccagagccccctgagcgccgacctgcccgacgagctgcccgtgggcaccgagaacgtgcacagactgttcaccagcggcaaggacaccgaggccgtggagaccgacctggacatcgcccaggacgccgacgccctggacctggagatgctggccccctacatcagcatggacgacgacttccagctgaacgccagcgagcagctgcccagagcctaccacagacccctgggcgccgtgcccagacccagagccagaagcttccacggcctgagcccccccgccctggagcccagcctgctgcccagatggggcagcgaccccagactgagctgcagcagccccagcagaggcgaccccagcgccagcagccccatggccggcgccagaaagagaaccctggcccagagcagcgaggacgaggacgagggcgtggagctgctgggcgtgagaccccccaagagaagccccagccccgagcacgagaacttcctgctgttccccctgagcctgagcttcctgctgaccggcggccccgcccccggcagcctgcaggaccccagcacccccctgctgaacctgaacgagcccctgggcttccacttcgtgacccagagcggcgtgcagtggcacaagcacagcagcccccagcccagaccccccggcctgaagtag

SEQ ID NO: 276000 - protein, 600 aa, Artificial Sequence
  derived and/or modified sequence
MRPAAGAARRPRCCTSWLTRCPSPAASAPTWTRPLSCASPSATCACTASAPQLELIGHSIFDFIHPCDQEELQDALTPQQTLSRRKVEAPTERCFSLRMKSTLTSRGRTLNLKAATWKVLNCSGHMRAYKPPAQTSPAGSPDSEPPLQCLVLICEAIPHPGSLEPPLGRGAFLSRHSLDMKFTYCDDRIAEVAGYSPDDLIGCSAYEYIHALDSDAVSKSIHTLLSKGQAVTGQYRFLARSGGYLWTQTQATVVSGGRGPQSESIVCVHFLISQVEETGVVLSLEQTEQHSRRPIQRGAPSQKDTPNPGDSLDTPGPRILAFLHPPSLSEAALAADPRRFCSPDLRRLLGPILDGASVAATPSTPLATRHPQSPLSADLPDELPVGTENVHRLFTSGKDTEAVETDLDIAQDADALDLEMLAPYISMDDDFQLNASEQLPRAYHRPLGAVPRPRARSFHGLSPPALEPSLLPRWGSDPRLSCSSPSRGDPSASSPMAGARKRTLAQSSEDEDEGVELLGVRPPKRSPSPEHENFLLFPLSLSFLLTGGPAPGSLQDPSTPLLNLNEPLGLGPSLLSPYSDEDTTQPGGPFQPRAGSAQAD

SEQ ID NO: 276001 - protein, 199 aa, Artificial Sequence
  derived and/or modified sequence
MRPAAGAARRPRCCTSWLTRCPSPAASAPTWTRPLSCASPSATCACTASAPQLELIGHSIFDFIHPCDQEELQDALTPQQTLSRRKVEAPTERCFSLRMKSTLTSRGRTLNLKAATWKVLNCSGHMRAYKPPAQTSPAGSPDSEPPLQCLVLICEAIPHPGSLEPPLGRGAFLSRHSLDMKFTYCDDRIAEVAGYSPMT

SEQ ID NO: 276002 - protein, 237 aa, Artificial Sequence
  derived and/or modified sequence
MRPAAGAARRPRCCTSWLTRCPSPAASAPTWTRPLSCASPSATCACTASAPQEELQDALTPQQTLSRRKVEAPTERCFSLRMKSTLTSRGRTLNLKAATWKVLNCSGHMRAYKPPAQTSPAGSPDSEPPLQCLVLICEAIPHPGSLERFVPVSSAATSLCLPSLSPSKVAGYSPDDLIGCSAYEYIHALDSDAPQDALPPHLNTSSLLPKPQGTVSFLAPSYPVPRYFSPHLPPWWP

SEQ ID NO: 276003 - DNA, 1803 bp, Artificial Sequence
  derived and/or modified sequence
atgcgtcccgcagctggagccgcacgcagaccgcggtgctgcaccagttggttaacaaggtgcccaagtccagccgcttcagctcctacgtggacccgaccactgagctgcgcctccccgtccgcgacctgtgcctgtaccgccagtgccccccagttggagctcattggtcacagcatctttgatttcattcatccctgtgatcaggaggagctgcaggacgcactgacaccgcagcagaccctgtccaggcgcaaggtcgaggctcctactgagcgctgcttttccctgcgtatgaagagcactttgacttctcgtggcagaacccttaacttgaaggccgccacatggaaggtgcttaattgttcaggccatatgagagcctacaaacctccggctcaaacatcacctgcaggcagtccagattccgaacccccgcttcaatgtttggtccttatctgtgaagcaatccctcaccccggctccctcgagcctcccctaggccggggggcatttctttcaagacacagcctggacatgaagttcacatattgcgacgaccggatcgccgaggtggccggttattcacccgacgatctcattggatgtagcgcctatgaatatatacacgcccttgattccgacgccgtaagcaaatcaatccacacactgttgagcaaaggtcaagccgttactggccagtacagattcctggcacggtcaggtggctacctctggacccagacacaggccacagttgtcagcggtggacgtggccctcagtcagagtctatagtgtgtgtccactttctgatctcccaagtagaggagaccggggttgttttatctctggaacagactgaacagcactctagaagaccaattcaacgcggtgctccatcacagaaagataccccgaatcccggcgactctttggatacaccaggcccccgaattttagcctttcttcacccacccagcctgtccgaagcagccctggcggctgacccccggagattctgttctcctgacttgcgccgcctccttgggcctatcctcgacggagctagtgtggctgcgacgccttcaacccctctcgccaccaggcacccacagtcgccattgagcgcagaccttcccgatgaactgcccgtaggcacagaaaatgtgcacaggctgtttacgagcggtaaagacacggaagccgtggagaccgacctagacatcgctcaggatgccgatgccctggacctggagatgcttgccccctacatttctatggatgatgatttccagctcaatgcgtcggaacagttgccacgggcctatcaccgccctctgggcgcagttcctcgccctcgtgccaggtcttttcacgggctgagtccccctgcattggaaccctccctcctgcctcgttgggggtcagacccacgactctcttgttcctccccctccagaggcgacccctccgccagctcccctatggccggggccagaaagcgtacattggcccagtccagtgaggacgaggatgagggggttgagttgctcggcgtgcgaccgcccaaacgctctccctcgcccgaacatgagaacttcctgctgtttcctcttagcctttcatttctgttgactgggggaccggccccgggtagtctccaggatccttctacaccactgcttaaccttaacgagccgctaggacttggcccttctcttctgtcaccgtacagcgatgaggatacaacccagcctggtgggcccttccaaccaagagccggctccgcccaggccgattag

SEQ ID NO: 276004 - DNA, 2250 bp, Artificial Sequence
  derived and/or modified sequence
ctttcctgtggagtcatctcaccgccgtgcgcacccactcgtaactcgcacccgggtcctggctgcaccgcatcccctcctgcaccccctggatggcccttcagccaacgggggcctgggcgatggtcgaccacggagctgcgcaaggaaaagtcccgggatgcggcccgcagccggcgcagccaggagaccgaggtgctgtaccagctggctcacacgctgcccttcgcccgcggcgtcagcgcccacctggacaaggcctctatcatgcgcctcaccatcagctacctgcgcatgcaccgcctctgcgccgcagctggagctcattggacacagcatctttgatttcatccacccctgtgaccaagaggagcttcaggacgccctgaccccccagcagaccctgtccaggaggaaggtggaggcccccacggagcggtgcttctccttgcgcatgaagagtacactcaccagccgcgggcgcaccctcaacctcaaggcggccacctggaaggtgctgaactgctctggacatatgagggcctacaagccacctgcgcagacttctccagctgggagccctgactcagagcccccgctgcagtgcctggtgctcatctgcgaagccatcccccacccaggcagcctggagcccccactgggccgaggggccttcctcagccgccacagcctggacatgaagttcacctactgtgacgacaggattgcagaagtggctggctatagtcccgatgacctgatcggctgttccgcctacgagtacatccacgcgctggactccgatgcggtcagcaagagcatccacaccttgctgagcaagggccaggcagtaacagggcagtatcgcttcctggcccggagtggtggctacctgtggacccagacccaggccacagtggtgtcagggggacggggcccccagtcggagagtatcgtctgtgtccattttttaatcagccaggtggaagagaccggagtggtgctgtccctggagcaaacggagcaacactctcgcagacccattcagcggggcgccccctctcagaaggacacccctaaccctggggacagccttgacacccctggcccccggatccttgccttcctgcacccgccttccctgagcgaggctgccctggccgctgacccccgccgtttctgcagccctgacctccgtcgcctcctgggacccatcctggatggggcttcagtagcagccactcccagcaccccgctggccacacggcacccccaaagtcctctttcggctgatctcccagatgaactacctgtgggcaccgagaatgtgcacagactcttcacctccgggaaagacactgaggcagtggagacagatttagatatagctcaggatgctgatgctctggatttggagatgctggccccctacatctccatggatgatgacttccagctcaacgccagcgagcagctacccagggcctaccacagacctctgggggctgtcccccggccccgtgctcggagcttccatggcctgtcacctccagcccttgagccctccctgctaccccgctgggggagtgacccccggctgagctgctccagcccttccagaggggacccctcagcatcctctcccatggctggggctcggaagaggaccctggcccagagctcagaggacgaggacgagggagtggagctgctgggagtgagacctcccaaaaggtcccccagcccagaacacgaaaactttctgctctttcctctcagcctgagtttccttctgacaggaggaccagccccagggagcctgcaggaccccagcaccccactcctgaacctgaatgagcccctgggcctgggcccctcactgctctctccgtactcagacgaggacactacccagcccgggggccccttccagccaagggcaggctcagcccaggctgactgagccggctcctctccccatctgccttctcctcccccagaaaggacctcaaccacactccacgccggcagccaacgcacaggatgggggcgccaggagaggggcccctctctcctctatgtaccccctgcccacctcgggcctacctcagccctcacccctctgcctgctcccaatctgggggctctctggggtggtctcagctcagtgacctctgggaggtggtccctggccccctcctccttctctcaggatttctcttggggttctcaatacttggttacctcatt

SEQ ID NO: 276005 - DNA, 1803 bp, Artificial Sequence
  derived and/or modified sequence
atgaggcctgctgctggagctgcccggcggccccgctgctgcacctcctggctgacccgctgccccagccctgctgccagcgcccccacctggacccggcccctgagctgtgccagccccagcgccacctgtgcctgcacagccagcgccccccagctggagctgattggccacagcatctttgacttcatccacccctgtgaccaggaggagctgcaggatgccctgaccccccagcagaccctgagcaggaggaaggtggaggcccccacagagcgctgcttcagcctgaggatgaagagcaccctgaccagccggggccgcaccctgaacctgaaggccgccacctggaaggtgctgaactgcagcggccacatgagggcctacaagcccccagcccagaccagccctgctggcagcccagattctgagccccccctgcagtgcctggtgctgatctgtgaggccatcccccaccctggcagcctggagccccccctgggccgcggggccttcctgagccgccacagcctggacatgaagttcacctactgtgatgacagaattgctgaggtggccggctacagcccagatgacctgattggctgcagcgcctatgagtacatccacgccctggacagtgatgctgtgtccaagagcatccacaccctgctgagcaagggccaggccgtgacaggccagtaccgcttcctggcccggagcggcggctacctgtggacccagacccaggccaccgtggtgtctgggggccggggcccccagagcgagagcatcgtgtgtgtgcacttcctgatcagccaggtggaggagaccggggtggtgctgagcctggagcagacagagcagcacagccggcggcccatccagagaggagcccccagccagaaggacacccccaaccctggggacagcctggacaccccaggcccccgcatcctggccttcctgcacccccccagcctgtctgaggccgccctggccgctgacccccggcgcttctgcagcccagacctgcggcggctgctgggccccatcctggatggagcctctgtggccgccacccccagcacccccctggccaccaggcacccccagagccccctgtctgctgacctgcctgatgagctgcctgtgggcacagaaaatgtgcacaggctcttcaccagcggcaaggacacagaggccgtggagacagacctggacatcgcccaggatgctgatgccctggacctggagatgctggccccctacatctccatggatgatgacttccagctgaatgccagcgagcagctgccccgggcctaccaccggcccctgggcgctgtgccccggccccgggcccgctccttccacggcctgagccccccagccctggagcccagcctgctgccccgctggggcagtgacccccggctgagctgcagcagccccagcagaggagaccccagcgccagcagccccatggccggggccaggaagaggaccctggcccagagcagtgaagatgaagatgagggcgtggagctgctgggcgtgcggccccccaagaggagccccagccctgagcacgagaacttcctgctcttccccctgagcctgtccttcctgctgaccggcggccctgcccctggcagcctgcaggaccccagcacccccctgctgaacctgaatgagcccctgggcctgggccccagcctgctgagcccctacagtgatgaggacaccacccagcccggcggccccttccagccccgggccggcagcgcccaggccgactag

SEQ ID NO: 276006 - DNA, 1803 bp, Artificial Sequence
  derived and/or modified sequence
atgcggcccgccgccggcgccgcccggcggccccggtgctgcacctcttggttgacacgctgcccatcacccgctgcctctgcccctacttggacccgcccactgtcctgcgcgtctcctagcgcaacatgcgcctgtacagccagtgctccacagctagaacttatcggtcattctatattcgatttcatccacccatgtgaccaggaggaactgcaggacgcccttaccccccagcagacactgagcaggaggaaggtcgaggctcccacagaacgatgcttttcactgaggatgaagtcgactttgacctctagaggccgaactctcaacctcaaggccgccacttggaaagtattaaattgttccggacatatgcgggcgtataaacctcctgcccagactagcccggcaggatctcctgacagcgaaccaccactgcaatgcctggtgctgatttgtgaggcaatcccgcatcctggctcattagaacctcctcttgggcgcggcgcctttctaagtcggcacagcttagacatgaaatttacttactgcgatgatagaatagcagaggtggctggctacagtcccgacgacttgatcggttgttccgcatacgagtacattcacgccctcgatagcgacgccgtgagtaaatcgattcatactcttctgagcaaggggcaagccgtgacgggacagtatcggttcctggctcggagcggtggctacctttggacgcagacccaggccactgtggtgagcggaggccggggaccccagtcagagagcatcgtgtgtgtccacttccttatcagccaagttgaagagacgggggtcgtgctgagcctggagcagacagaacagcactcacgtagaccaattcagaggggtgctccgtcccagaaggacacgcctaacccaggagattcgctggatactcccggcccaaggatcctagctttcctccacccacccagcttgagtgaagccgccctggctgcagacccacggagattctgctctcccgacctacggaggctgctcgggccaatacttgacggggccagtgtagccgccaccccttccacccccttagcgacgcggcacccgcagtccccgctgtccgccgatctgccagacgaactgccggtcggaacagaaaatgtacataggctcttcacttcggggaaggacacagaggccgtcgaaacagacctcgatattgctcaggacgcagatgcgttggacctcgagatgctggcgccatacatctctatggacgatgactttcagctaaacgcctcagagcagctccctcgcgcctatcacagacccctgggcgccgtgcctcggcctcgcgccagatcctttcatggtctgagcccgccggcgctagaacctagcctgttgcctcgatgggggagtgatcccagacttagttgctcctcccctagtcggggcgacccaagcgcgtcttcacctatggccggggctcggaaacggactctggcccagtcgagtgaagatgaggacgaaggagtcgaactgctgggggtgcggccccctaaacgttcaccatctcccgagcatgagaacttccttctctttcctcttagcttgagcttcctgttaaccggagggcccgcccctggcagtctacaggatccatcaacacccctgctgaatctgaatgagccactaggacttggcccttccctgctctctccttactccgatgaagatacaactcagcctggcggccccttccagcctagagccggttcagctcaagctgactag

SEQ ID NO: 276007 - DNA, 1803 bp, Artificial Sequence
  derived and/or modified sequence
atgagaccagctgccggagcagcccgacgtcctaggtgctgtacctcatggctcacccgctgtccaagtcctgctgcaagcgctccgacctggactcggcctcttagctgtgctagtccaagtgccacctgtgcctgcacagcatctgccccacaactcgaacttatcggccactcaatctttgatttcatccacccttgcgatcaggaagagttgcaggacgcgctgacgcctcagcagacattatcaagaaggaaggttgaggcccctacagagcggtgcttctccctgcgaatgaagtcaacactgacttctcggggtcgcaccctaaacttgaaggctgccacctggaaagtgcttaattgctcgggccacatgcgcgcttacaaacctcccgctcagacttctccagctggaagccctgactctgaaccccctcttcagtgcttggtgctcatatgcgaagccatcccccatccaggatctctggagcccccactcggacgcggtgccttcctcagtcggcatagccttgatatgaagtttacttattgcgatgacaggatcgccgaagtggcaggctactcgccagatgatttgatagggtgctcggcctacgaatatatccatgcattggactccgacgcagtttccaagagtatccatacactgctgtccaagggtcaggccgtgactggtcaataccgcttcttggctcggtcaggaggttatctctggacacaaacccaggccaccgtggtctccgggggtcgcggaccccagtcagaatctatcgtgtgcgtgcacttcctgatatctcaagttgaagagacaggcgttgtgctgagtctggaacagaccgaacagcatagtcggaggcccattcaacgcggtgctccctcccaaaaggatactcctaatccaggcgattcgttagacacaccaggtcctaggatattggcctttctgcatcccccttccctgtctgaagcggctcttgccgctgatcctcggaggttctgcagtcctgacctgaggaggctcctgggacctattctggacggcgcaagcgtggccgcaacaccctctacccctcttgccacaaggcatccccaatcccccctatcagccgatttgcctgatgagcttcctgtcggaacagaaaatgtacatcgactgtttacatctggaaaggacacagaggcagttgaaacggacctggacatcgcccaagacgcagacgccctggacctcgagatgctggccccatatatttcaatggacgacgatttccagctgaacgcgtcagaacagttaccgagagcataccacagacctttgggagccgtccccaggccccgagctagaagctttcatgggctgtcaccaccagcccttgagccctcccttctgccccgttgggggtcggaccctcggctgtcctgcagcagccccagccgtggagacccttccgcaagcagccccatggcaggggcacgtaagcgaacgcttgcccagtcaagtgaggatgaggatgaaggtgtggagttactcggtgttcggcctcccaagagatcaccatcgcccgaacatgaaaacttcctcctgttccccctgtctctgagcttcctcttaactggtggccctgccccaggaagtctccaggacccctcgacccccctgttaaacctgaacgaacccctagggttaggcccttccctgctgtctccttattctgacgaagacaccacgcagccaggtggacccttccaaccgagggcaggctccgcccaggccgactag

SEQ ID NO: 276008 - DNA, 1803 bp, Artificial Sequence
  derived and/or modified sequence
atgagacccgccgccggcgccgccagaagacccagatgctgcaccagctggctgaccagatgccccagccccgccgccagcgcccccacctggaccagacccctgagctgcgccagccccagcgccacctgcgcctgcaccgccagcgccccccagctggagctgatcggccacagcatcttcgacttcatccacccctgcgaccaggaggagctgcaggacgccctgaccccccagcagaccctgagcagaagaaaggtggaggcccccaccgagagatgcttcagcctgagaatgaagagcaccctgaccagcagaggcagaaccctgaacctgaaggccgccacctggaaggtgctgaactgcagcggccacatgagagcctacaagccccccgcccagaccagccccgccggcagccccgacagcgagccccccctgcagtgcctggtgctgatctgcgaggccatcccccaccccggcagcctggagccccccctgggcagaggcgccttcctgagcagacacagcctggacatgaagttcacctactgcgacgacagaatcgccgaggtggccggctacagccccgacgacctgatcggctgcagcgcctacgagtacatccacgccctggacagcgacgccgtgagcaagagcatccacaccctgctgagcaagggccaggccgtgaccggccagtacagattcctggccagaagcggcggctacctgtggacccagacccaggccaccgtggtgagcggcggcagaggcccccagagcgagagcatcgtgtgcgtgcacttcctgatcagccaggtggaggagaccggcgtggtgctgagcctggagcagaccgagcagcacagcagaagacccatccagagaggcgcccccagccagaaggacacccccaaccccggcgacagcctggacacccccggccccagaatcctggccttcctgcacccccccagcctgagcgaggccgccctggccgccgaccccagaagattctgcagccccgacctgagaagactgctgggccccatcctggacggcgccagcgtggccgccacccccagcacccccctggccaccagacacccccagagccccctgagcgccgacctgcccgacgagctgcccgtgggcaccgagaacgtgcacagactgttcaccagcggcaaggacaccgaggccgtggagaccgacctggacatcgcccaggacgccgacgccctggacctggagatgctggccccctacatcagcatggacgacgacttccagctgaacgccagcgagcagctgcccagagcctaccacagacccctgggcgccgtgcccagacccagagccagaagcttccacggcctgagcccccccgccctggagcccagcctgctgcccagatggggcagcgaccccagactgagctgcagcagccccagcagaggcgaccccagcgccagcagccccatggccggcgccagaaagagaaccctggcccagagcagcgaggacgaggacgagggcgtggagctgctgggcgtgagaccccccaagagaagccccagccccgagcacgagaacttcctgctgttccccctgagcctgagcttcctgctgaccggcggccccgcccccggcagcctgcaggaccccagcacccccctgctgaacctgaacgagcccctgggcctgggccccagcctgctgagcccctacagcgacgaggacaccacccagcccggcggccccttccagcccagagccggcagcgcccaggccgactag

SEQ ID NO: 276009 - protein, 510 aa, Artificial Sequence
  derived and/or modified sequence
MLPLEKAFASPRSSPAPPDLPTPGSAAGVQQEEPETIPERTPADLEFSRLRFREFVYQEAAGPHQTLARLHELCRQWLMPEARSKEQMLELLVLEQFLGILPDKVRPWVVAQYPESCKKAASLVEGLADVLEEPGMLLGSPAGSSSILSDGVYERHMDPLLLPGELASPSQALGAGEIPAPSETPWLSPDPLFLEQRRVREAKTEEDGPANTEQKLKSFPEDPQHLGEWGHLDPAEENLKSYRKLLLWGYQLSQPDAASRLDTEELRLVERDPQGSSLPEGGRRQESAGCACEEAAPAGVLPELPTEAPPGDALADPPSGTTEEEEEQPGKAPDPQDPQDAESDSATGSQRQSVIQQPAPDRGTAKLGTKRPHPEDGDGQSLEGVSSSGDSAGLEAGQGPGADEPGLSRGKPYACGECGEAFAWLSHLMEHHSSHGGRKRYACQGCWKTFHFSLALAEHQKTHEKEKSYALGGARGPQPSTREAQAGARAGGPPESVEGEAPPAPPEAQR

SEQ ID NO: 276010 - DNA, 1533 bp, Artificial Sequence
  derived and/or modified sequence
atgctgcccctggagaaggccttcgccagccccagaagcagccccgccccccccgacctgcccacccccggcagcgccgccggcgtgcagcaggaggagcccgagaccatccccgagagaacccccgccgacctggagttcagcagactgagattcagagagttcgtgtaccaggaggccgccggcccccaccagaccctggccagactgcacgagctgtgcagacagtggctgatgcccgaggccagaagcaaggagcagatgctggagctgctggtgctggagcagttcctgggcatcctgcccgacaaggtgagaccctgggtggtggcccagtaccccgagagctgcaagaaggccgccagcctggtggagggcctggccgacgtgctggaggagcccggcatgctgctgggcagccccgccggcagcagcagcatcctgagcgacggcgtgtacgagagacacatggaccccctgctgctgcccggcgagctggccagccccagccaggccctgggcgccggcgagatccccgcccccagcgagaccccctggctgagccccgaccccctgttcctggagcagagaagagtgagagaggccaagaccgaggaggacggccccgccaacaccgagcagaagctgaagagcttccccgaggacccccagcacctgggcgagtggggccacctggaccccgccgaggagaacctgaagagctacagaaagctgctgctgtggggctaccagctgagccagcccgacgccgccagcagactggacaccgaggagctgagactggtggagagagacccccagggcagcagcctgcccgagggcggcagaagacaggagagcgccggctgcgcctgcgaggaggccgcccccgccggcgtgctgcccgagctgcccaccgaggccccccccggcgacgccctggccgacccccccagcggcaccaccgaggaggaggaggagcagcccggcaaggcccccgacccccaggacccccaggacgccgagagcgacagcgccaccggcagccagagacagagcgtgatccagcagcccgcccccgacagaggcaccgccaagctgggcaccaagagaccccaccccgaggacggcgacggccagagcctggagggcgtgagcagcagcggcgacagcgccggcctggaggccggccagggccccggcgccgacgagcccggcctgagcagaggcaagccctacgcctgcggcgagtgcggcgaggccttcgcctggctgagccacctgatggagcaccacagcagccacggcggcagaaagagatacgcctgccagggctgctggaagaccttccacttcagcctggccctggccgagcaccagaagacccacgagaaggagaagagctacgccctgggcggcgccagaggcccccagcccagcaccagagaggcccaggccggcgccagagccggcggcccccccgagagcgtggagggcgaggccccccccgccccccccgaggcccagagatag

SEQ ID NO: 276011 - DNA, 1533 bp, Artificial Sequence
  derived and/or modified sequence
atgctccctcttgagaaggcattcgcctcacccagatcctcacccgcccctccagatttgcctacaccaggatcggctgccggcgttcagcaggaagaaccagaaaccattccagagagaaccccagctgatctggagttttctaggctgcgttttagggaattcgtctaccaggaggcggccggaccccaccagacactggcgcggctgcacgagctttgcaggcagtggcttatgccagaggctcgctccaaggaacagatgttagagttgcttgttttagaacagttcctgggcatactcccagacaaggtgagaccgtgggtggtcgcacaatatcccgaatcctgtaagaaagcagcgtcgctggtcgagggcttggctgacgttcttgaggaacctggaatgctcctgggcagccccgctggtagttcatcaatcctgagtgacggtgtttatgaacgccacatggacccactgctgctcccaggggagctcgcttctccctctcaggcactgggggccggcgagattcctgccccctcagagactccctggctgtctcccgatccacttttcttggaacaacgcagagtgcgcgaagctaagactgaggaggacggacccgcgaatactgaacaaaaacttaagtctttccccgaggatcctcagcatctaggagaatggggccatctggaccctgccgaggagaacttgaagtcttaccggaagctgctgttatggggctaccagctctcccagcctgacgcggcctctaggctggatactgaagagctgaggctggtggagagggatccccaaggctctagcctgcctgagggcggacgacgtcaggagtcagctgggtgcgcctgcgaagaagccgcacccgcgggggtgttaccagagctgccaaccgaagcccccccaggggatgcgcttgctgatcctccatcaggtaccacagaagaggaggaagagcagcccggaaaagcccctgatcctcaggatcctcaggacgccgagtccgattctgctacgggaagccaacggcagtcggtgattcagcagcccgccccggacaggggcactgccaagctggggactaaacggccacaccccgaggacggggacggacagtccctagaaggtgtaagttcctccggtgacagcgctggccttgaagccggtcaggggcctggtgccgatgaaccggggctctcgcggggaaaaccttacgcctgtggagagtgtggtgaagctttcgcctggttgtcacacctcatggagcaccactcctctcatggcgggcggaagaggtacgcctgccagggctgttggaaaacgtttcacttcagcctagctttagcagaacaccagaagacccacgagaaagaaaaaagctatgccttgggtggcgctcgaggacctcagccttcgacgcgggaagctcaggcgggcgctagagctggggggccgcccgagtcagtggaaggagaggctccacctgcaccacccgaggcccagcgatag

SEQ ID NO: 276012 - DNA, 1533 bp, Artificial Sequence
  derived and/or modified sequence
atgctgcccctggagaaggcctttgccagccccaggagcagccctgcccccccagacctgcccaccccaggcagcgctgctggggtgcagcaggaggagcctgagaccatccctgagaggaccccagctgacctggagttcagccggctgcgcttccgggagtttgtgtaccaggaggccgccggcccccaccagaccctggcccggctgcacgagctgtgccggcagtggctgatgcctgaggcccggagcaaggagcagatgctggagctgctggtgctggagcagttcctgggcatcctgcctgacaaggtgcggccctgggtggtggcccagtacccagagagctgcaagaaggccgccagcctggtggagggcctggctgatgtgctggaggagcccggcatgctgctgggcagccctgctggcagcagcagcatcctgagtgatggagtgtatgagcggcacatggaccccctgctgctgcctggagagctggccagccccagccaggccctgggcgctggggagatcccagcccccagcgagaccccctggctgagcccagaccccctcttcctggagcagaggagagtgcgggaggccaagacagaggaggatggccctgccaacacagagcagaagctgaagagcttccctgaggacccccagcacctgggggagtggggccacctggaccctgctgaggagaacctgaagagctacaggaagctgctgctgtggggctaccagctgagccagccagatgctgccagccggctggacacagaggagctgcggctggtggagcgggacccccagggcagcagcctgcctgagggcggccggcggcaggagagcgctggctgtgcctgtgaggaggccgccccagctggggtgctgcctgagctgcccacagaggcccctcctggagatgccctggccgaccccccatctggcaccacagaggaggaggaggagcagcccgggaaggccccagacccccaggacccccaggatgctgagagtgacagcgccaccggcagccagaggcagagcgtcatccagcagcctgccccagaccggggcacagccaagctgggcaccaagaggccccacccagaagatggagatggccagagcctggagggcgtgagcagcagcggggacagcgctggcctggaggccggccagggccctggagcagatgagcccggcctgagccggggcaagccctatgcctgtggagaatgtggggaggcctttgcctggctgagccacctgatggagcaccacagcagccatggaggcaggaagagatatgcctgccagggctgctggaagaccttccacttcagcctggccctggccgagcaccagaagacccatgagaaggagaagagctatgccctgggcggggcccggggcccccagcccagcacccgggaggcccaggccggggcccgggccggcggccccccagagagcgtggagggggaggcccccccagcccctcctgaggcccagaggtag

SEQ ID NO: 276013 - DNA, 1533 bp, Artificial Sequence
  derived and/or modified sequence
atgctgcccctggagaaggccttcgccagcccccggagcagccccgctcctccagacctgcctacacccggatccgcggcgggggtacagcaagaggaaccggagaccataccagagcgtacgcccgctgacctggaatttagcaggctcaggttccgcgaattcgtgtaccaggaagctgcggggcctcaccagacgctagcacggctccacgaactgtgccgccagtggctgatgcctgaggcacgtagtaaggagcagatgctggaactgctggttctggagcaattcttaggtattttacctgataaagttcggccctgggtggtggcgcagtaccctgaatcctgtaagaaggcagcgtccttggtggagggactggctgacgtactggaggagcctggaatgttattgggctcacccgctggcagctcatctatcctgtcggacggcgtttacgagcgtcatatggatccgctgctccttcccggtgaactagcctctccttctcaagccctgggagcaggagaaatccctgcgcccagcgaaacaccctggctgagtcctgaccccctatttctggagcagagaagagtcagggaggccaaaacagaggaagatggacccgccaatacagaacagaaactcaagagcttccctgaagacccacaacaccttggcgaatggggtcacttagatcccgccgaggagaacctcaagtcctacagaaagttgctactgtggggttaccagcttagccagcctgatgcagcgtccagactggacacggaagagcttcgcctcgtagagagagacccccagggtagcagcctccctgagggcggacgtcggcaggaatctgccggctgcgcctgtgaggaggctgcccctgcaggagtgctccccgaactgccaacagaggctcctccgggcgacgcattagcagacccacccagcgggacgactgaggaagaagaggagcagccagggaaagcccccgacccccaggatccacaggatgctgaatccgattcagccacaggatcccagcgacaatccgtgattcagcagccagcacccgacagagggacggccaagctgggtaccaaaagaccacatccagaagatggggatggccagtcactggaaggcgtgagtagctcaggtgactctgccggcctggaagccggccagggccctggcgccgacgaaccagggctgtctagaggaaaaccatatgcgtgcggtgagtgcggggaggcatttgcctggcttagccatctcatggagcatcacagctctcatgggggtagaaaacggtacgcttgtcaagggtgctggaaaacttttcatttctctctagctctcgccgagcaccagaagacccacgagaaggagaagagttacgctctcggtggggcaagagggcctcagccctcgacccgggaagcgcaggctggagcccgagccggcggccctccagagtccgttgagggcgaggctccgccagctcccccagaagcccagcgctag

SEQ ID NO: 276014 - DNA, 1533 bp, Artificial Sequence
  derived and/or modified sequence
atgttgccactggagaaggcattcgcttcaccaagatcctcaccagctccacccgacctgcccacaccgggttcagcagctggggtgcagcaagaggagcccgaaacaatcccggagaggacccctgccgatcttgagttcagtcgcttacgcttcagagaattcgtgtaccaggaggctgcaggtcctcaccagacactcgcaaggctgcatgaactgtgccgacagtggttgatgcctgaggccagatctaaggaacaaatgctcgagctgctggtccttgagcagtttctaggtatcctgccagataaagttcggccatgggtcgtggcccagtatcctgagtcttgtaagaaggccgcttctctcgtcgaaggcttggctgacgttttagaggagccgggaatgcttctgggttctcccgcaggctcctcctctatcctttccgacggggtgtacgagcggcatatggatcccttactcttaccgggagagctcgcctcaccctctcaggcgctgggagccggagagatacctgcaccgtccgagaccccctggctcagcccagatccgttgttcctggagcagcgcagggtgagggaagctaagacagaagaggatggacctgccaatacggagcaaaaactgaagtcatttccagaggaccctcagcatctcggagaatggggtcatctggaccccgcagaagagaacctcaaaagctatcgcaaactgttgctttgggggtatcaactgtcacagcccgacgcagcctccaggcttgatacagaagagcttcgacttgtggagcgtgacccacagggatcttctctgcccgagggcggtaggcgccaggaatctgctggatgcgcgtgcgaagaagccgcacccgctggagtgctgcctgagcttccgacagaggcaccacctggagacgctctggccgatccgccatccggaactaccgaggaggaggaggagcagccaggtaaagctccagatccccaggacccgcaagacgcagaatcagactccgccaccggctcacagaggcaatccgtgatccagcagcccgctcctgataggggtaccgctaaattgggcacaaaacgccctcaccccgaggatggggatgggcagtcactcgagggggtgagtagctctggtgactcagccggacttgaagccggacagggcccaggtgctgacgaacctgggctatccagaggcaaaccttacgcatgtggcgagtgtggcgaggcctttgcctggctgagtcacctgatggagcaccactcatcccatggaggaagaaagcgttatgcctgtcaaggctgctggaaaactttccacttttccctcgccctcgcagagcaccaaaagacacacgagaaagaaaaatcctacgccctcggcggagccaggggtccccagccctcgacaagggaggcccaggctggggcaagggccggtggccctcctgagtcagtggagggggaggcccctccagcgcctcctgaggctcaacggtag

SEQ ID NO: 276015 - DNA, 1143 bp, Artificial Sequence
  derived and/or modified sequence
atgagcgagaccgtgatctgcagcagcagagccaccgtgatgctgtacgacgacggcaacaagagatggctgcccgccggcaccggcccccaggccttcagcagagtgcagatctaccacaaccccaccgccaacagcttcagagtggtgggcagaaagatgcagcccgaccagcaggtggtgatcaactgcgccatcgtgagaggcgtgaagtacaaccaggccacccccaacttccaccagtggagagacgccagacaggtgtggggcctgaacttcggcagcaaggaggacgccgcccagttcgccgccggcatggccagcgccctggaggccctggagggcggcggccccccccccccccccgccctgcccacctggagcgtgcccaacggccccagccccgaggaggtggagcagcagaagagacagcagcccggccccagcgagcacatcgagagaagagtgagcaacgccggcggcccccccgccccccccgccggcggccccccccccccccccggccccccccccccccccggccccccccccccccccggcctgccccccagcggcgtgcccgccgccgcccacggcgccggcggcggccccccccccgccccccccctgcccgccgcccagggccccggcggcggcggcgccggcgcccccggcctggccgccgccatcgccggcgccaagctgagaaaggtgagcaagcaggaggaggccagcggcggccccaccgcccccaaggccgagagcggcagaagcggcggcggcggcctgatggaggagatgaacgccatgctggccagaagaagaaaggccacccaggtgggcgagaagacccccaaggacgagagcgccaaccaggaggagcccgaggccagagtgcccgcccagagcgagagcgtgagaagaccctgggagaagaacagcaccaccctgcccagaatgaagagcagcagcagcgtgaccaccagcgagacccagccctgcacccccagcagcagcgactacagcgacctgcagagagtgaagcaggagctgctggaggaggtgaagaaggagctgcagaaggtgaaggaggagatcatcgaggccttcgtgcaggagctgagaaagagaggcagcccctag

SEQ ID NO: 276016 - DNA, 1143 bp, Artificial Sequence
  derived and/or modified sequence
atgtccgaaacagtaatctgctcatcccgggctacagttatgttatacgacgatggtaataagagatggcttcccgctgggacaggaccacaggccttctctagggtacagatctaccataaccccacagcaaactctttcagagtagtgggcaggaaaatgcagcccgaccagcaagtggttatcaactgcgccatcgtgaggggtgttaaatataaccaggcaaccccaaactttcaccagtggcgcgacgccagacaggtgtggggtctcaacttcgggtctaaggaagatgccgctcaattcgccgccggtatggctagtgcactggaggccctcgaagggggagggcccccccctcctccggccttaccaacctggagcgtccctaacgggccttcccccgaggaggtggaacagcagaagagacagcagcctgggccaagtgagcacatagagcggagggtgagcaacgcaggcggccctccagcaccaccggctggagggcctcccccaccaccaggtcctccccccccaccaggacccccccctccgccaggcctgcccccttcaggcgtgcctgccgcggcccatggtgctggtgggggccccccgcccgctccacccttacccgctgctcagggccctggaggaggcggcgccggcgctcctggactagccgcagctatcgccggagcaaaactgagaaaagttagtaagcaggaggaagctagcggcgggcctaccgcacctaaggctgaatccggtcggagcggaggaggcgggctaatggaagagatgaacgccatgctggctcgtcgtcggaaagctacacaggtaggtgagaaaacccccaaagatgaatcagccaaccaagaggaacctgaggcacgagtccctgctcagagcgagtcagtacgaaggccttgggagaaaaactccaccaccctgccccgcatgaagtccagctcttccgtgactacttcagagacccagccttgcacgcccagctcatccgactacagcgacctccagcgcgtcaagcaggaactgctcgaagaggttaagaaagagctgcaaaaggtaaaagaggagatcattgaggccttcgtgcaagagctgaggaagcgggggtcaccttag

SEQ ID NO: 276017 - DNA, 1143 bp, Artificial Sequence
  derived and/or modified sequence
atgtctgagaccgtcatctgcagcagccgggccaccgtgatgctgtatgatgatggcaacaagcgctggctgcctgctggcaccggcccccaggccttcagccgggtgcagatctaccacaaccccacagccaacagcttccgggtggtgggcaggaagatgcagcctgaccagcaggtggtgatcaactgtgccatcgtgcggggcgtgaagtacaaccaggccacccccaacttccaccagtggagagatgcccggcaggtgtggggcctgaactttggcagcaaagaagatgctgcccagtttgctgctggcatggccagcgccctggaggccctggagggcggcggccccccacctcctccagccctgcccacctggagcgtgcccaacggccccagccctgaggaggtggagcagcagaagaggcagcagcccggccccagcgagcacatcgagcggcgggtgtccaatgccggcggccccccagcccctcctgctgggggccccccacctcctcctggccccccacctcctcctggccccccacctcctcctggcctgcccccatctggagtgcctgctgctgcccacggggccggcggcggccccccaccagccccacccctgcctgctgcccagggccctgggggcggcggggccggggcccctggcctggccgccgccatcgccggggccaagctgaggaaggtgtccaagcaggaggaggccagcggcggccccacagcccccaaggccgagagcggccgcagcggcggcggcggcctgatggaggagatgaatgccatgctggcccggcggaggaaggccacccaggtgggggagaagacccccaaggatgaaagtgccaaccaggaggagcctgaggcccgggtgcctgcccagagcgagagcgtgagaagaccctgggagaagaacagcaccaccctgcccaggatgaagagcagcagctctgtgaccaccagcgagacccagccctgcacccccagcagcagtgactacagcgacctgcagagggtgaagcaggagctgctggaggaggtgaagaaggagctgcagaaggtgaaggaggagatcatcgaggcctttgtgcaggagctgaggaagaggggcagcccctag

SEQ ID NO: 276018 - DNA, 1143 bp, Artificial Sequence
  derived and/or modified sequence
atgagcgagaccgtgatctgcagcagccgggccaccgtgatgctgtatgatgatggcaacaagcgctggctacccgccggtactggccctcaagccttcagccgtgttcagatttaccacaacccaacggccaactcctttcgggtcgtgggtagaaagatgcagcccgaccagcaggtggttatcaactgcgctattgtccgcggtgtcaagtacaaccaggctacacctaacttccatcagtggagggatgccaggcaggtgtgggggctgaatttcggatcgaaagaggacgcagctcagtttgctgcgggaatggccagcgctctcgaggccctggaaggtggaggcccgcccccaccccccgccctcccaacatggtctgtccccaacggaccatcacccgaggaagtggagcagcagaagcgtcagcaacccggcccaagtgaacacatcgagcgccgtgtgtccaatgccggcgggcctccagctcctcctgctggtggacctccccctcctccaggccctccgccaccacctgggcctccgccacccccagggcttcctccatcaggagtgcccgctgctgcccacggtgctggtgggggcccacctccggctcctcccctccctgctgcacagggaccgggaggaggcggggccggtgctccgggcctggccgcggctattgctggcgcaaagttacgaaaagtgtccaaacaggaagaggcatccggaggccccacagcccccaaagcggaaagtggccggagcgggggaggtggcttgatggaggagatgaacgccatgttggccagacgccgaaaggcaacccaggttggcgaaaagaccccaaaagacgagtcagccaatcaagaggagcccgaagctcgagtgccggcccaaagcgaaagtgtgcgccggccatgggaaaagaacagtactacactgccgcgtatgaaatccagttcgtcagtgaccaccagtgagacgcagccatgtactccatctagctctgattatagtgatctccagagagtgaagcaggagttgctagaagaggtcaagaaagagctgcaaaaggtcaaagaggagataatagaagccttcgtccaggagctgcggaagcgcggaagcccctag

SEQ ID NO: 276019 - DNA, 1143 bp, Artificial Sequence
  derived and/or modified sequence
atgagcgagactgtgatctgttctagccgcgctacggtcatgctgtacgacgacgggaataagcgctggctgcctgcaggaaccgggccacaggcattcagccgagtccagatatatcataatcccacagccaacagtttcagggtcgtcggccgtaagatgcagcccgaccagcaggtcgtcatcaactgcgccatagtgcgtggggtgaaatataatcaggccactccaaactttcaccagtggagggacgctcggcaggtgtggggactgaatttcggcagcaaggaagatgctgctcaatttgcagctggtatggcgtccgccctcgaagctctagaggggggaggaccccctccaccccctgccctccccacgtggtcagtcccaaacggaccatcgcctgaagaagttgagcagcaaaagagacagcagcccggaccctcggaacatatcgagagacgcgtgtcgaatgctggaggaccccctgcgccacctgcaggcggtccacccccacctccagggccacctccgccacctggccctccgccaccacccggactaccgccatcaggtgtccctgctgccgcacacggggctggcggagggcctccacctgcacctcctctgcctgctgcacagggccctggcggagggggagcaggtgcaccagggctggcagcggctatagctggcgctaaattgaggaaggtcagtaaacaggaagaggcaagcggtggacccactgcgcctaaggccgaaagtgggaggtctgggggaggcggtttgatggaggaaatgaatgccatgctggcccgaaggcggaaggccactcaagtaggtgagaaaactccaaaagacgagtccgccaatcaagaggagcccgaggcaagagtcccagcccaaagtgaatccgttaggcggccttgggagaagaactccaccactctgccgaggatgaaatctagtagctcagtaacaactagtgagacacaaccctgtacacctagcagcagtgactattctgatctccagcgggttaaacaggaactcttagaagaagttaaaaaggaattgcaaaaggtgaaggaggagatcatcgaggccttcgtccaggaactgcggaagcgcggatctccatag

SEQ ID NO: 276020 - DNA, 2286 bp, Artificial Sequence
  derived and/or modified sequence
tgtgggtgcggggagtggaattttggaacgaaatgtaacgaagagaagtacagtagtaagagtaacactgtagccgccaccggcaaggggtgcgcgctggggagcggacgctgcatcccctttctgctgcaggaacctctcatcagaccgcctgagggaagcggcgcccggagacccgccccggcccggtccacattctccccaggaagccggactctatggggcgggaccctgggggagcctgagccgagcccggagccagccccgaacccctgaacctccagccaggggcgccccgggagcagccagcccgtgggcgagccgcccgcccgccgagcagccatgagcgagacggtcatctgttccagccgggccactgtgatgctttatgatgatggcaacaagcgatggctccctgctggcacgggtccccaggccttcagccgcgtccagatctaccacaaccccacggccaattcctttcgcgtcgtgggccggaagatgcagcccgaccagcaggtggtcatcaactgtgccatcgtccggggtgtcaagtataaccaggccacccccaacttccatcagtggcgcgacgctcgccaggtctggggcctcaacttcggcagcaaggaggatgcggcccagtttgccgccggcatggccagtgccctagaggcgttggaaggaggtgggccccctccacccccagcacttcccacctggtcggtcccgaacggcccctccccggaggaggtggagcagcagaaaaggcagcagcccggcccgtcggagcacatagagcgccgggtctccaatgcaggaggcccacctgctccccccgctgggggtccacccccaccaccaggacctccccctcctccaggtccccccccacccccaggtttgcccccttcgggggtcccagctgcagcgcacggagcagggggaggaccaccccctgcaccccctctcccggcagcacagggccctggtggtgggggagctggggccccaggcctggccgcagctattgctggagccaaactcaggaaagtcagcaagcaggaggaggcctcaggggggcccacagcccccaaagctgagagtggtcgaagcggaggtgggggactcatggaagagatgaacgccatgctggcccggagaaggaaagccacgcaagttggggagaaaacccccaaggatgaatctgccaatcaggaggagccagaggccagagtcccggcccagagtgaatctgtgcggagaccctgggagaagaacagcacaaccttgccaaggatgaagtcgtcttcttcggtgaccacttccgagacccaaccctgcacgcccagctccagtgattactcggacctacagagggtgaaacaggagcttctggaagaggtgaagaaggaattgcagaaagtgaaagaggaaatcattgaagccttcgtccaggagctgaggaagcggggttctccctgaccacagggacccagaagacccgcttctcctttccgcacacccggcctgtcaccctgctttccctgcctctacttgacttggaattggctgaagactacacaggaatgcatcgttcccactccccatcccacttggaaaactccaagggggtgtggcttccctgctcacacccacactggctgctgattggctggggaggcccccgcccttttctccctttggtccttcccctctgccatccccttggggccggtccctctgctggggatgcaccaatgaaccccacaggaagggggaaggaaggagggaatttcacattcccttgttctagattcactttaacgcttaatgccttcaaagttttggtttttttaagaaaaaaaaatatatatatatttgggttttgggggaaaagggaaatttttttttctctttggttttgataaaatgggatgtgggagtttttaaatgctatagccctgggcttgccccatttggggcagctatttaaggggaggggatgtctcaccgggctgggggtgagatatccccccaccccagggactccccttccctctggctccttccccttttctatgaggaaataagatgctgtaactttttggaacctcagttttttgattttttatttgggtaggttttggggtccaggccattttttttaccccttggaggaaataagatgagggagaaaggagaaggggaggaaacttctcccctcccaccttcacctttagcttcttgaaaatgggcccctgcagaataaatctgccagttttt

SEQ ID NO: 276021 - DNA, 315 bp, Artificial Sequence
  derived and/or modified sequence
atgggccgcatccctgggggctgcagcagcaaggccttcatcggccgggcccagtggctgacccctgtgatcccagccctgtgggaggccaagggcctgaccctgctgagccggctggagtgcagtgatgtgatcatggaccactgcagcccccagctgaccggcctgaggatgaagggcttcctggcccagaccccacccctggagttccctgtgcaccagtaccagcccggggaccacgtgctgatcaagtcctggaagcgggagagcctgaaccagctgcggaggaccagcagcggcaccctggatgaatag

SEQ ID NO: 276022 - DNA, 1191 bp, Artificial Sequence
  derived and/or modified sequence
cccaccctgaagagcatggtgaccttcgaggacgtggccgtgtacttcagccaggaggagtgggagctgctggacgccgcccagagacacctgtaccacagcgtgatgctggagaacctggagctggtgaccagcctgggcaacgccctgagccagcacgtgtgcctgttccccatcgagagcagcgtgcaccccaaggccagaagctgggtgctgctgcccagcagagtgagctgctgcagatgctggggcgccgaggtgctgctgggcgtggagggcgagggcgcccaccccaagcagaacgtgagcgtggaggtgctgcagcaccagaaggagcacagcggcggcaagcccttcagatggtacaaggacagcagcggccagaagccctacagcaacctgggccagctgcccgaggtgtgcaccacccagaagctgttcgagtgcagcaactgcggcaaggccttcctgaagagcagcaccctgcccaaccacctgagaacccacagcgaggagatccccttcacctgccccaccggcggcaacttcctggaggagaagagcatcctgggcaacaagaagttccacaccggcgagatcccccacgtgtgcaaggagtgcggcaaggccttcagccacagcagcaagctgagaaagcaccagaagttccacaccgaggtgagaccctacgagtgcagccagtgcggcaagagcttcagcagaagcagcgccctgatccagcactggagaatccacaccggcgagaagccctacgagtgcagcgagtgcggcaaggccttcgcccacagcagcaccctgatcgagcactggagagtgcacaccaaggagagaccctacgagtgcaacgagtgcggcaagttcttcagccagaacagcatcctgatcaagcaccagaaggtgcacaccggcgagaagccctacaagtgcagcgagtgcggcaagttcttcagcagaaagagcagcctgatctgccactggagagtgcacaccggcgagagaccctacgagtgcagcgagtgcggcagagccttcagcagcaacagccacctggtgagacaccagagagtgcacacccaggagagaccctacgagtgcatccagtgcggcaaggccttcagcgagagaagcaccctggtgagacaccagaaggtgcacaccagagagagatag

SEQ ID NO: 276023 - DNA, 1191 bp, Artificial Sequence
  derived and/or modified sequence
ccaactctgaagagcatggtcacattcgaagatgtggcagtgtatttcagccaagaagagtgggagctactggacgccgcacaacggcacttatatcactcagtgatgcttgagaatttggaactggtcaccagcttgggtaatgctctgtcacaacacgtgtgccttttccccattgagtccagcgtgcaccctaaggccagatcctgggtgcttctcccctccagagtctcatgttgcagatgctggggcgccgaggtcctgttaggtgtagaaggcgaaggagctcacccaaaacagaacgtaagtgtagaggttctgcagcatcagaaagaacattccggaggcaaaccattccgctggtacaaagatagctccggtcagaagccatacagcaatctcggccagctgccagaggtgtgtacaacccagaagctatttgaatgtagtaactgcggcaaggccttcctcaagtcatcaacgctgcctaaccatctgcgaacgcattctgaggaaatcccctttacttgtcctacaggaggaaattttttggaagagaagagtattcttgggaacaaaaaattccatacaggagagatcccacacgtctgtaaagaatgcggcaaggcattctcacacagctctaagctgaggaagcaccagaagtttcataccgaggttaggccttatgaatgctctcaatgcggaaagtctttttctcgtagctccgctcttatccagcactggcgcattcacacaggcgagaagccgtacgagtgctccgagtgcggcaaagcgttcgcacacagctcgactctgatcgagcattggagagtgcacaccaaggaaaggccttacgagtgtaacgaatgtggcaaattcttctctcagaactccattctgattaagcatcagaaagtgcacaccggcgaaaaaccctacaaatgttcggagtgcgggaaattcttcagtagaaagagctccctgatctgccactggcgagtgcacacaggcgagaggccatatgagtgtagcgagtgcggtcgggcattctccagtaacagtcacctggtgaggcaccagcgcgtgcacacgcaggagcggccatatgaatgtatacagtgtggcaaggctttttccgagaggtccactctggtgcgacaccagaaggttcatacacgagagagatag

SEQ ID NO: 276024 - DNA, 1191 bp, Artificial Sequence
  derived and/or modified sequence
cccaccctgaagtccatggtgacctttgaagatgtggccgtgtacttcagccaggaggagtgggagctgctggatgctgcccagaggcacctgtaccacagcgtgatgctggagaacctggagctggtgaccagcctgggcaatgccctgagccagcacgtgtgcctcttccccatcgagagctctgtgcaccccaaggcccgctcctgggtgctgctgcccagccgggtgtcctgctgccgctgctggggcgctgaggtgctgctgggcgtggagggggagggcgcccaccccaagcagaatgtgtctgtggaggtgctgcagcaccagaaggagcacagcggcggcaagcccttccgctggtacaaggacagcagcggccagaagccctacagcaacctgggccagctgcctgaggtgtgcaccacccagaagctgtttgagtgcagcaactgtgggaaggccttcctgaagagcagcaccctgcccaaccacctgcggacccacagcgaggagatccccttcacctgccccactggaggcaacttcctggaggagaagagcatcctgggcaacaagaagttccacactggagagatcccccacgtgtgcaaggaatgtgggaaggccttcagccacagcagcaagctgaggaagcaccagaagttccacacagaggtgcggccctatgaatgttcccagtgtgggaagagcttcagccgcagcagcgccctgatccagcactggaggatccacactggagagaagccctatgaatgttctgaatgtgggaaggcctttgcccacagcagcaccctcatcgagcactggagggtgcacaccaaggagcggccctatgaatgtaatgaatgtgggaagttcttcagccagaacagcatcctgatcaagcaccagaaggtgcacactggagagaagccctacaagtgcagtgaatgtgggaagttcttcagcaggaagagcagcctcatctgccactggagggtgcacactggagagcggccctatgaatgttctgaatgtggccgggccttcagcagcaacagccacctggtgcgccaccagagggtgcacacccaggagcggccctatgagtgcatccagtgtgggaaggccttcagcgagaggagcaccctggtgcgccaccagaaggtgcacacccgggagaggtag

SEQ ID NO: 276025 - DNA, 1191 bp, Artificial Sequence
  derived and/or modified sequence
cccaccctgaagagcatggtgaccttcgaggacgtggccgtgtacttttcccaggaggaatgggaactactggacgccgcgcagcgccacttgtaccactccgtgatgctcgagaaccttgagctggtcacctccctggggaatgccctgagtcagcatgtttgcctgttccctatcgagtcctccgtgcatcctaaggctcgcagctgggtactgctgccctctcgcgtgagttgctgccgctgctggggcgctgaggtcttgctgggagtagagggtgaaggggctcacccaaagcaaaatgtgtctgtggaggttctccagcaccagaaggagcactctgggggcaagcctttcagatggtacaaggattcgagcgggcaaaaaccttatagcaacctgggtcaattgcctgaagtgtgtacaactcagaagctgttcgaatgttccaactgtggcaaggcctttctaaaaagcagcaccctccccaaccacttgaggacccactccgaggagatccccttcacatgccctaccggagggaatttcctggaggagaaatcaatcttaggtaataagaaattccatacgggggagatcccgcacgtctgtaaggaatgtgggaaggctttcagccatagtagtaagttgcgcaagcatcagaaattccatacggaagtgagaccatatgagtgctctcaatgtgggaaatccttctcgagatccagcgctttgatccagcactggcggatacatacaggagagaagccatacgagtgctctgaatgcggcaaagctttcgctcacagctctactcttatcgaacattggcgcgtgcataccaaggagagaccctatgagtgcaatgaatgcgggaagttcttcagtcaaaacagtatcctgatcaaacatcagaaagtacacaccggagaaaaaccatataaatgtagtgaatgtggcaagttcttttcccgaaaatccagtctcatatgtcactggagagtccacaccggtgagcgtccttacgaatgttctgagtgtggtagggccttctcatccaacagccaccttgtgagacaccagcgggtgcatacccaggagcgaccctacgagtgcatccagtgcgggaaggcgttctccgagagaagcaccctggtcagacatcagaaggtccatacccgggagcggtag

SEQ ID NO: 276026 - DNA, 1191 bp, Artificial Sequence
  derived and/or modified sequence
cctacacttaagagtatggttacattcgaagacgtggctgtctacttctcccaggaggaatgggaactcctcgatgcagctcagaggcacctttaccattccgttatgctcgagaacctcgaactggtgacttccctggggaacgccctgagccaacatgtgtgtttgttccccatagagagttcagtacatcctaaggcccgatcttgggtcctcctgcctagtagggtgagttgttgtaggtgctggggggctgaggtattattaggagttgagggtgagggggctcatcctaaacagaacgtgtctgttgaggttctacagcaccaaaaggagcacagtggtggaaagccgtttaggtggtataaggatagttccgggcagaagccatacagcaatctggggcaacttcccgaggtgtgtactacccaaaaactcttcgaatgtagcaactgtggtaaggcctttctgaaatcttcaactttgcccaatcatttacgaacacactccgaggagatccctttcacatgccccaccggcggtaatttcttagaagagaagagcatcctaggtaacaagaaatttcatacaggtgagattccgcatgtgtgcaaagagtgcggaaaggctttcagccattcttctaagctccggaagcatcagaagtttcatacagaggtccgtccctatgagtgttcccaatgcgggaagagttttagtcggagtagcgccttgatacagcactggaggatacacacgggcgagaagccatacgagtgctcagagtgtgggaaagcatttgctcactcctccacgctgatcgagcactggcgtgtccataccaaagaacgcccatatgaatgtaacgagtgcggcaagtttttctcccagaatagcatcttaatcaaacatcagaaagtccacacgggcgagaagccctacaaatgttccgagtgtggaaagtttttctctcggaaatcatccttaatatgccactggagagtccataccggagaacgcccatatgagtgttccgaatgtggcagagcattctcctccaattcgcatctggtaaggcatcaacgcgtgcatacgcaagaaaggccctacgaatgcatccagtgtggcaaggctttttccgagcgcagcacactggtgcgacaccagaaggtgcacactagggagagatag

SEQ ID NO: 276027 - DNA, 1188 bp, Artificial Sequence
  derived and/or modified sequence
cccacattgaagagcatggtaacctttgaagatgtggctgtatacttctcccaagaggagtgggagctccttgatgcagcccagaggcacctgtaccacagtgtgatgctggaaaaccttgagcttgtgacctcacttggtaatgccctgtctcagcatgtgtgtcttttccccatagaaagctctgttcatcccaaagccagatcatgggtactgcttccttctcgggtttcctgttgtaggtgctggggtgctgaggttctgcttggagtagagggtgagggggcccatcccaagcagaatgtttctgtagaagtgttacagcaccagaaggagcacagtggagggaagccctttagatggtacaaggacagcagtgggcagaagccatattccaatcttgggcagcttccagaagtctgtaccacacagaaactcttcgagtgcagcaactgtggaaaagccttcctgaagagctccactctccccaaccatctgagaactcactctgaagagataccatttacatgcccaacaggtggaaatttcttagaggagaaatcaatccttggtaataaaaagtttcacactggggaaataccccatgtgtgtaaggagtgtgggaaggcctttagtcactcatctaagctgaggaagcaccagaaatttcacactgaagtaagaccttatgagtgcagtcaatgtggtaaatccttcagccgaagctctgctctcattcagcactggagaattcacactggagaaaagccttacgagtgtagtgagtgtgggaaagcctttgctcacagctccactctcattgaacactggagagttcacacaaaagaaaggccttatgagtgcaatgaatgtgggaaattctttagccaaaactccattctcattaagcatcagaaagttcatactggagaaaagccttataaatgcagtgaatgtgggaaattctttagccgaaaatccagccttatttgtcactggagagttcacactggagaaaggccttacgaatgcagtgaatgtgggagagcctttagcagtaactcccacctggttcgtcatcagagagttcacacacaagaaaggccctatgagtgcatccagtgtggaaaagcctttagtgaaagatctacacttgttcggcaccagaaagttcacaccagagaaagg

SEQ ID NO: 276028 - protein, 292 aa, Artificial Sequence
  derived and/or modified sequence
MSHLSQQRIYSGENPFACKVCGKVFSHKSNLTEHEHFHTREKPFECNECGKAFSQKQYVIKHQNTHTGEKLFECNECGKSFSQKENLLTHQKIHTGEKPFECKDCGKAFIQKSNLIRHQRTHTGEKPFVCKECGKTFSGKSNLTEHEKIHIGEKPFKCSECGTAFGQKKYLIKHQNIHTGEKPYECNECGKAFSQRTSLIVHVRIHSGDKPYECNVCGKAFSQSSSLTVHVRSHTGEKPYGCNECGKAFSQFSTLALHLRIHTGKKPYQCSECGKAFSQKSHHIRHQKIHTH

SEQ ID NO: 276029 - DNA, 3880 bp, Artificial Sequence
  derived and/or modified sequence
aggactcccagacccctcaccttctgcctcccctggtcgcgtccgggtccttgcggagctaactagctcgccacgacgtcaagaacgacgtaacgtcaggccgctgtgggctctgggaattgtagtccagagctagatcggccacggacagaatggcgttctcttatctctgagtcggggcctggctcgttttgacatttttgcgcccacgagtcttcggagagggcgtcgccactccagaccttccagcaagcttgaagtcatctgacgctaaaggactacttacctcaagagctccatcgtcacagaaggaggcggccaagttcgcggggggaggggaggagacagagagtcgaccagtaaagcctcaagggaaatgtagtccaaggcctgagaagcgacgttgctggtaatagaaggtaattcagtaccagcctgggcctggccgcggtgaccgaggcgggccgcgtcgcggagacttctgggagtgcttcctcgctctccgagtgcgcaagcgcagcgcaccgagtggacattttggtctttgtccgcgggtcagtacggcccctgggtccacgtggcgcgaaagtaggaggaagacataggccaaggagccagacttcctgtgttaactccttcctctgccactttttaccttggggacctcagttaatatgatcctctgttgaagcaagaagacaaactgtatggtggagaaagaagtgggaaggatctgcgcggaagaagcctgagaagatgatgcacagatagagaggcaccaggacttgagaggcaccaggacttgggaggcatgttgatccatctccaggaaagactgagaaaaagagcgttgaatataagaaaaaatacttcctctgttctcagatcgtatttgttttaaggccacacctttttgaagttttcagtttgaaacacaacctggactgaaatcatgagggaggttgtgtaggaaagaatcatcaagggacttagttgggagcttctctaccacagcttactccttatggtattaaccccctttaagtgtaaatgtctttggtttaaaacgtttgtacctcatctgttaccagagtgttcatactggagagaaaccctatgaatttactgaatgtgggggaactgttactcatatgttgcatttcgtcgaacgtgcaagtcatgctgaagagaaaccctgtgcttctaaggagtattgacaagcccttagctagatgacaatctcattgagaagcagaaaattcatgctggagagaaactagtgaaggtagcaatacttcattgaatattagaaaatttttctagagagaaagcattgaatatactgagtatgataacatttcctctcaaaccttatcccttactctgcatttgggagatcatacacagagaagccttataaatgtaagagatgtggaaatatcttcagccaaaagtaaatcctcactcatcaagaaatttttactggagagaaaccttgtgaatgtgggaaagcttccattcagatgtcacacctcagccagcagagaatttacagtggggaaaacccctttgcctgtaaggtatgtggaaaagtcttcagccacaaatcaaacctcactgagcatgagcattttcacacgagagagaaaccttttgaatgtaacgagtgtggaaaagcctttagccaaaagcagtatgtcattaaacatcagaacacccatactggcgagaagcttttcgaatgtaatgaatgtggaaaatcatttagccagaaggaaaacctccttacgcaccagaaaattcacactggagaaaaaccttttgagtgtaaagattgcgggaaagctttcattcagaagtcaaacctcatcagacaccagagaactcacacaggagagaagccctttgtatgtaaggagtgtggaaaaaccttcagtggcaaatccaaccttactgagcatgagaaaatccatattggagagaagccttttaaatgtagtgaatgtggaacagcctttggccagaagaagtacctcataaaacatcagaacattcacactggagagaaaccctatgaatgtaacgaatgtggaaaagccttctctcagcgaacatcacttattgtacatgtgaggattcattcaggtgataaaccttacgaatgcaatgtttgtggaaaagccttctctcagagctcatctctcactgtgcatgtgagaagccatacaggggagaagccctatggttgtaatgaatgtgggaaagctttctctcagttctcaacccttgctctgcatttgagaatacacacaggtaagaagccttatcagtgcagtgaatgtgggaaagctttcagccagaagtcacaccacattagacaccagaaaattcatactcactaaaaaccccatgaaagccttgaaagtgggaaagctttcattagaaatttgcacctcatcatgccccagaaataatccttctgaagcaaagcaccacgaatgaggttaactttaacaagtactaaaaacttaagggacaccagaaaatttgtactgaagagaaagacatgcatatgattaaaaccctgtgtccaacagagaaacctgcagcagagataatggtgaaagtttaggcacattttcactaaaagtgggaacagaaaatggaggcctgttttttattgctaccaccatagatctggagatcttcgccagtaacaagaaaaattaagttgtaaatattggaaaggaacagacaaaaatagatgacatggtcatctacaactaatattaagactcctgtggtattgattgagcagagcagaagagatttcaaaaaaagacctatgcatttattagaatttggaatatgatacaagtggcatcaggaaatgaggaaataatggaactattttttttaagtggaggtagtttgttctccaagggggaaaaatagaccatgaactatacacaaaagtgaatccagagattaaaaacagaaatatggaaaagctatgtactaaaatgcatatgaccttgggaatagggaaacattccttggaacaatttgagaaatacttagcggttctacttatgagtatgaatgctcaggaaatacgcactaggatatttactgtggcttgatttgtagtagccaaaaattagaaacaactgagaaagcccatcacgaacaatatgggaaattcttatgtaatactatatatctgtaaaatgcaacaaatgaaatccacatgtattaacagaaagatcccagaattgttgaggggggatcaagttgcagaatgatacagatagtacaatgacttttttgtaaatttgaattaaaagtttcctcataaaactcagtactatctattggtaatggatgcatatatgtatgtacatgtttttgaaacggattggaaggatacagaccaaactcttgatagtggtcacctgtgaagagtggagaagggaaaataatgagtgtgggaggtgggatgggtattggttaaaggggacttcagctttttatataaacatccacttctctttcaaaagacttcaagtaaatataagaagatactgattgattctggattgtggtatagggatatcttgtcttattttttgtacttttctgtatttttaaaatttctcaaaataggaatgggagtgaggatgggaatgctgtatctgtggaagtcatgttatactggattcatttccaattaaatactaaacattttatagaaaatatttctaaaattttatcacggatgaatggatggacttgctctctatgtaatatgaaattaatctattttattaaaatttaaaaggacagcacaatccaaaaaaaaaaaaaaaaaaaaaaaaaa

SEQ ID NO: 276030 - DNA, 879 bp, Artificial Sequence
  derived and/or modified sequence
atgagccacctgagccagcagagaatctacagcggcgagaaccccttcgcctgcaaggtgtgcggcaaggtgttcagccacaagagcaacctgaccgagcacgagcacttccacaccagagagaagcccttcgagtgcaacgagtgcggcaaggccttcagccagaagcagtacgtgatcaagcaccagaacacccacaccggcgagaagctgttcgagtgcaacgagtgcggcaagagcttcagccagaaggagaacctgctgacccaccagaagatccacaccggcgagaagcccttcgagtgcaaggactgcggcaaggccttcatccagaagagcaacctgatcagacaccagagaacccacaccggcgagaagcccttcgtgtgcaaggagtgcggcaagaccttcagcggcaagagcaacctgaccgagcacgagaagatccacatcggcgagaagcccttcaagtgcagcgagtgcggcaccgccttcggccagaagaagtacctgatcaagcaccagaacatccacaccggcgagaagccctacgagtgcaacgagtgcggcaaggccttcagccagagaaccagcctgatcgtgcacgtgagaatccacagcggcgacaagccctacgagtgcaacgtgtgcggcaaggccttcagccagagcagcagcctgaccgtgcacgtgagaagccacaccggcgagaagccctacggctgcaacgagtgcggcaaggccttcagccagttcagcaccctggccctgcacctgagaatccacaccggcaagaagccctaccagtgcagcgagtgcggcaaggccttcagccagaagagccaccacatcagacaccagaagatccacacccactag

SEQ ID NO: 276031 - DNA, 879 bp, Artificial Sequence
  derived and/or modified sequence
atgagtcatctcagtcagcagaggatctatagcggtgaaaacccgttcgcatgtaaggtgtgcggtaaggtgttctcccacaaatctaatctcacggaacacgaacacttccacacaagagagaagccgtttgagtgtaatgagtgtgggaaagcttttagtcaaaaacagtatgtaatcaagcatcagaatacacatacaggcgagaaacttttcgagtgcaacgagtgcggcaagagcttctcacagaaagaaaacctgcttacacatcaaaagatccatacaggggaaaaaccattcgagtgcaaggattgtggtaaagcctttatacagaagtccaacctgatccgccaccagaggacgcatactggcgagaagccctttgtttgtaaggagtgtggcaagaccttctccggcaaatctaacctcaccgagcatgagaagatacacatcggcgagaaacccttcaaatgcagcgagtgcggcacagcatttgggcagaaaaaatatcttataaaacaccagaatattcacaccggcgagaaaccttacgagtgtaacgagtgcggaaaagcatttagtcagagaacctctctgatcgttcacgtgcggatccatagcggcgataaaccgtacgaatgtaacgtgtgcgggaaggctttctcccaatcttcttccctgactgtccacgtgaggtcccacaccggagagaagccttatggatgtaacgagtgcgggaaggccttcagccagttctcgactcttgctctgcacctgcgcatccataccgggaaaaaaccttatcagtgtagtgagtgcggaaaggccttctcacagaagagccaccacatccgtcaccagaaaatccacacacactag

SEQ ID NO: 276032 - DNA, 879 bp, Artificial Sequence
  derived and/or modified sequence
atgtcacatctctcgcaacagcgcatctacagtggagagaaccctttcgcctgcaaggtctgcggaaaggtattctcccataagagcaatctcactgaacatgagcactttcatactcgcgaaaaaccattcgagtgcaatgaatgcggtaaagccttctcccagaaacagtatgttatcaagcaccaaaacactcacaccggtgaaaagttgtttgagtgtaacgaatgtggtaaatcatttagtcagaaagagaatctattaactcaccaaaagattcacacaggggagaagcccttcgagtgtaaggattgcggcaaggcattcatccagaagtctaatctgattagacaccagagaactcacacgggcgaaaaaccttttgtctgcaaagaatgtggtaagacattttctggcaagtctaacctgaccgagcatgaaaagattcacattggggagaagccgtttaagtgctctgagtgcggaaccgcttttggacagaagaagtacctcattaaacatcagaatattcatactggcgaaaagccctatgaatgtaacgaatgcggcaaggctttcagccagagaacttctttgattgtccatgtgcgcatccattccggggacaaaccatacgaatgtaatgtctgtgggaaagcgttcagccagagctcttctttgacagtccacgtccgctctcataccggcgagaaaccttacggctgcaatgagtgcgggaaagcttttagtcagtttagcacactggcactgcatttgcgcatccacacgggaaagaagccctaccagtgctcagaatgtgggaaggctttcagccagaaaagtcatcacatcaggcatcagaagatacacacccactag

SEQ ID NO: 276033 - DNA, 879 bp, Artificial Sequence
  derived and/or modified sequence
atgagccacctgagccagcagaggatctacagcggggagaacccctttgcctgcaaggtgtgtgggaaggtgttcagccacaagagcaacctgacagagcacgagcacttccacacccgggagaagccctttgaatgtaatgaatgtgggaaggccttcagccagaagcagtatgtgatcaagcaccagaacacccacactggagagaagctgtttgaatgtaatgaatgtgggaagagcttcagccagaaggagaacctgctgacccaccagaagatccacactggagagaagccctttgagtgcaaggactgtgggaaggccttcatccagaagagcaacctgatccgccaccagaggacccacactggagagaagccctttgtgtgcaaggaatgtgggaagaccttcagcggcaagagcaacctgacagagcacgagaagatccacatcggggagaagcccttcaagtgcagtgaatgtggcacagccttcggccagaagaagtacctgatcaagcaccagaacatccacactggagagaagccctatgaatgtaatgaatgtgggaaggccttcagccagaggaccagcctcatcgtgcacgtgcgcatccacagcggggacaagccctatgaatgtaatgtgtgtgggaaggccttcagccagagcagcagcctgactgtgcacgtgcgcagccacactggagagaagccctacggctgcaatgaatgtgggaaggccttcagccagttcagcaccctggccctgcacctgcgcatccacacaggcaagaagccctaccagtgcagtgaatgtgggaaggccttcagccagaagagccaccacatccgccaccagaagatccacacccactag

SEQ ID NO: 276034 - DNA, 879 bp, Artificial Sequence
  derived and/or modified sequence
atgagccacctgagccagcagcggatctacagcggcgagaacccctttgcttgcaaagtttgcgggaaggtgttcagtcacaaaagcaatctgacagaacatgagcactttcataccagagagaaacccttcgagtgcaatgaatgcggcaaggccttctctcagaagcagtacgtaatcaagcaccagaatacccacaccggggagaagctctttgaatgcaatgagtgtggtaagagtttctcgcagaaagagaacctgttaacccatcagaaaattcacacgggtgagaaaccttttgaatgtaaagactgcggcaaagctttcatccagaagtccaacctgatacgccaccaaagaactcacaccggggaaaagccatttgtgtgtaaagaatgtggcaaaacatttagtggcaagagcaacctgacagagcacgagaaaattcatattggtgagaagccatttaagtgcagcgagtgcggtacagcatttggccagaaaaagtacctgattaagcatcagaatatccacacaggagaaaaaccctatgaatgtaacgaatgtgggaaggcgttttcccagcgaaccagtctaattgtccacgtgcgaatccattcaggtgataagccctacgagtgtaatgtatgcggcaaggctttttcccaatcaagctcactgaccgtgcacgttcggagccatactggcgaaaagccctatggttgcaatgagtgtggcaaggctttcagccagtttagcacccttgccctgcatctgcggatccataccgggaagaagccttatcaatgcagcgagtgtggtaaagcctttagccagaaatcccatcatatccgtcatcagaagattcatacacactag

SEQ ID NO: 276035 - DNA, 879 bp, Artificial Sequence
  derived and/or modified sequence
atgagccacctgagccagcagcggatctacagcggcgagaacccctttgcttgtaaagtgtgtggaaaagtgtttagccacaagtccaatctcacggagcacgaacattttcacacacgtgaaaaaccttttgaatgcaacgaatgcgggaaagccttctcacagaagcaatatgtcattaaacatcagaatactcacaccggggaaaagctgttcgagtgtaatgaatgtggcaaaagcttcagccagaaagaaaacctgcttacacaccagaagattcacactggcgagaaacccttcgaatgcaaagactgcggaaaggcgtttatccagaaatccaacctcattagacaccagcggacgcacaccggtgaaaagccattcgtatgtaaggagtgtggtaagacattcagcggcaaatccaatctaaccgaacacgagaaaatccacatcggggagaagccatttaaatgcagcgagtgtgggacggcatttgggcaaaaaaagtatttaataaagcaccagaatatacacacaggtgaaaaaccctacgagtgtaatgaatgcggtaaggccttctcccagagaacatccctcatcgtccacgtacgcatccatagtggggataagccatatgagtgcaatgtgtgcgggaaggcctttagccagtccagttcacttaccgtgcacgtgcggagccacaccggcgaaaaaccttacggatgtaatgagtgtgggaaggctttctcgcaattttccaccttggccctgcatcttcgaatacataccgggaaaaagccgtaccagtgttcagagtgcggcaaggcattctctcagaagtcccaccacatccgccaccagaaaatccatactcactag

SEQ ID NO: 276036 - DNA, 879 bp, Artificial Sequence
  derived and/or modified sequence
atgtcacatctctctcagcaaagaatatactcgggtgaaaacccttttgcatgcaaagtctgcggtaaggtattttctcacaagtctaatctcacggagcatgaacactttcacaccagagagaagcccttcgaatgcaacgagtgtgggaaagccttttctcaaaagcaatacgtaattaaacatcagaacactcacactggagaaaagttgttcgaatgcaacgaatgcgggaagtctttttcccagaaagaaaatcttctgactcatcaaaaaatacatacaggcgaaaaaccatttgaatgtaaagactgcggaaaggcattcattcagaaatctaacctgattagacaccagcgcacgcacaccggagaaaaaccctttgtttgcaaagagtgtggtaagacttttagcgggaaatccaacttaacagagcacgaaaaaatccatataggcgagaaaccttttaaatgttctgagtgcggaacggcgttcggtcaaaagaagtaccttatcaaacatcaaaatatccacacgggcgaaaaaccatatgaatgtaacgaatgtggcaaggccttcagccagcggacgagtttgattgtgcacgtcaggatccactccggagacaagccctatgagtgcaatgtctgtggaaaggcgtttagtcagtcttcaagtctcacggtgcacgtgagaagccacacgggcgagaaaccttacggttgcaatgagtgcggaaaggctttctctcagttcagtacattggccctgcatctccggattcacacaggaaaaaagccctatcagtgttcagaatgtgggaaagccttcagccagaaaagccatcatatccggcaccaaaaaattcatacacattag

SEQ ID NO: 276037 - DNA, 879 bp, Artificial Sequence
  derived and/or modified sequence
atgtcccacctgtcacaacagagaatttattcaggggagaatccattcgcctgcaaggtctgtgggaaggtgttcagccacaaatctaatttgactgagcatgagcattttcacacccgtgagaaaccgtttgagtgtaatgaatgtggaaaagccttctcccagaaacaatatgttataaagcaccagaacacacatacgggtgagaagctgttcgaatgcaacgaatgcggtaaatctttctcccaaaaggagaacttgctcacccaccagaagatccataccggagagaagccctttgaatgcaaggattgcggcaaggcgttcattcagaagtccaacttaattagacaccaacgcacacacaccggagaaaaacccttcgtttgcaaagagtgtgggaaaactttctctggcaaaagtaatctgacggagcacgaaaagattcacattggcgagaaaccctttaagtgtagtgaatgtggcaccgcattcgggcaaaaaaaatacctgataaagcatcagaacatccacactggtgaaaagccctacgagtgcaacgaatgcggaaaagccttttcgcagcgcacttctttgattgtgcatgtccgaatccactccggagacaaaccctatgaatgtaatgtgtgtggcaaggcgttcagccagtctagcagtctgacggtgcacgttaggtcccataccggagagaaaccctacgggtgtaacgaatgcggcaaggcattttcacagttttccaccctggccttgcatcttagaattcacacgggtaaaaaaccttaccagtgcagtgagtgcggtaaggctttcagtcagaaaagccatcatattagacaccagaaaatccacacccactag

SEQ ID NO: 276038 - DNA, 3854 bp, Artificial Sequence
  derived and/or modified sequence
aggactcccagacccctcaccttctgcctcccctggtcgcgtccgggtccttgcggagctaactagctcgccacgacgtcaagaacgacgtaacgtcaggccgctgtgggctctgggaattgtagtccagagctagatcggccacggacagaatggcgttctcttatctctgagtcggggcctggctcgttttgacatttttgcgcccacgagtcttcggagagggcgtcgccactccagaccttccagcaagcttgaagtcatctgacgctaaaggactacttacctcaagagctccatcgtcacagaaggaggcggccaagttcgcggggggaggggaggagacagagagtcgaccagtaaagcctcaagggaaatgtagtccaaggcctgagaagcgacgttgctggtaatagaaggtaattcagtaccagcctgggcctggccgcggtgaccgaggcgggccgcgtcgcggagacttctgggagtgcttcctcgctctccgagtgcgcaagcgcagcgcaccgagtggacattttggtctttgtccgcgggtcagtacggcccctgggtccacgtggcgcgaaagtaggaggaagacataggccaaggagccagacttcctgtgttaactccttcctctgccactttttaccttggggacctcagttaatatgatcctctgttgaagcaagaagacaaactgtatggtggagaaagaagtgggaaggatctgcgcggaagaagcctgagaagatgatgcacagatagagaggcaccaggacttgagaggcaccaggacttgggaggcatgttgatccatctccaggaaagactgagaaaaagagcgttgaatataagaaaaaatacttcctctgttctcagatcgtatttgttttaaggccacacctttttgaagttttcagtttgaaacacaacctggactgaaatcatgagggaggttgtgtaggaaagaatcatcaagggacttagttgggagcttctctaccacagcttactccttatggtattaaccccctttaagtgtaaatgtctttggtttaaaacgtttgtacctcatctgttaccagagtgttcatactggagagaaaccctatgaatttactgaatgtgggggaactgttactcatatgttgcatttcgtcgaacgtgcaagtcatgctgaagagaaaccctgtgcttctaaggagtattgacaagcccttagctagatgacaatctcattgagaagcagaaaattcatgctggagagaaactagtgaaggtagcaatacttcattgaatattagaaaatttttctagagagaaagcattgaatatactgagtatgataacatttcctctcaaaccttatcccttactctgcatttgggagatcatacacagagaagccttataaatgtaagagatgtggaaatatcttcagccaaaagtaaatcctcactcatcaagaaatttttactggagagaaaccttgtgaatgtgggaaagcttccattcagatgtcacacctcagccagcagagaatttacagtggggaaaacccctttgcctgtaaggtatgtggaaaagtcttcagccacaaatcaaacctcactgagcatgagcattttcacacgagagagaaaccttttgaatgtaacgagtgtggaaaagcctttagccaaaagcagtatgtcattaaacatcagaacacccatactggcgagaagcttttcgaatgtaatgaatgtggaaaatcatttagccagaaggaaaacctccttacgcaccagaaaattcacactggagaaaaaccttttgagtgtaaagattgcgggaaagctttcattcagaagtcaaacctcatcagacaccagagaactcacacaggagagaagccctttgtatgtaaggagtgtggaaaaaccttcagtggcaaatccaaccttactgagcatgagaaaatccatattggagagaagccttttaaatgtagtgaatgtggaacagcctttggccagaagaagtacctcataaaacatcagaacattcacactggagagaaaccctatgaatgtaacgaatgtggaaaagccttctctcagcgaacatcacttattgtacatgtgaggattcattcaggtgataaaccttacgaatgcaatgtttgtggaaaagccttctctcagagctcatctctcactgtgcatgtgagaagccatacaggggagaagccctatggttgtaatgaatgtgggaaagctttctctcagttctcaacccttgctctgcatttgagaatacacacaggtaagaagccttatcagtgcagtgaatgtgggaaagctttcagccagaagtcacaccacattagacaccagaaaattcatactcactaaaaaccccatgaaagccttgaaagtgggaaagctttcattagaaatttgcacctcatcatgccccagaaataatccttctgaagcaaagcaccacgaatgaggttaactttaacaagtactaaaaacttaagggacaccagaaaatttgtactgaagagaaagacatgcatatgattaaaaccctgtgtccaacagagaaacctgcagcagagataatggtgaaagtttaggcacattttcactaaaagtgggaacagaaaatggaggcctgttttttattgctaccaccatagatctggagatcttcgccagtaacaagaaaaattaagttgtaaatattggaaaggaacagacaaaaatagatgacatggtcatctacaactaatattaagactcctgtggtattgattgagcagagcagaagagatttcaaaaaaagacctatgcatttattagaatttggaatatgatacaagtggcatcaggaaatgaggaaataatggaactattttttttaagtggaggtagtttgttctccaagggggaaaaatagaccatgaactatacacaaaagtgaatccagagattaaaaacagaaatatggaaaagctatgtactaaaatgcatatgaccttgggaatagggaaacattccttggaacaatttgagaaatacttagcggttctacttatgagtatgaatgctcaggaaatacgcactaggatatttactgtggcttgatttgtagtagccaaaaattagaaacaactgagaaagcccatcacgaacaatatgggaaattcttatgtaatactatatatctgtaaaatgcaacaaatgaaatccacatgtattaacagaaagatcccagaattgttgaggggggatcaagttgcagaatgatacagatagtacaatgacttttttgtaaatttgaattaaaagtttcctcataaaactcagtactatctattggtaatggatgcatatatgtatgtacatgtttttgaaacggattggaaggatacagaccaaactcttgatagtggtcacctgtgaagagtggagaagggaaaataatgagtgtgggaggtgggatgggtattggttaaaggggacttcagctttttatataaacatccacttctctttcaaaagacttcaagtaaatataagaagatactgattgattctggattgtggtatagggatatcttgtcttattttttgtacttttctgtatttttaaaatttctcaaaataggaatgggagtgaggatgggaatgctgtatctgtggaagtcatgttatactggattcatttccaattaaatactaaacattttatagaaaatatttctaaaattttatcacggatgaatggatggacttgctctctatgtaatatgaaattaatctattttattaaaatttaaaaggacagcacaatcc

SEQ ID NO: 276039 - DNA, 3780 bp, Artificial Sequence
  derived and/or modified sequence
aggactcccagacccctcaccttctgcctcccctggtcgcgtccgggtccttgcggagctaactagctcgccacgacgtcaagaacgacgtaacgtcaggccgctgtgggctctgggaattgtagtccagagctagatcggccacggacagaatggcgttctcttatctctgagtcggggcctggctcgttttgacatttttgcgcccacgagtcttcggagagggcgtcgccactccagaccttccagcaagcttgaagtcatctgacgctaaaggactacttacctcaagagctccatcgtcacagaaggaggcggccaagttcgcggggggaggggaggagacagagagtcgaccagtaaagcctcaagggaaatgtagtccaaggcctgagaagcgacgttgctggtaatagaaggtaattcagtaccagcctgggcctggccgcggtgaccgaggcgggccgcgtcgcggagacttctgggagtgcttcctcgctctccgagtgcgcaagcgcagcgcaccgagtggacattttggtctttgtccgcgggtcagtacggcccctgggtccacgtggcgcgaaagtaggagttaatatgatcctctgttgaagcaagaagacaaactgtatggtggagaaagaagtgggaaggatctgcgcggaagaagcctgagaagatgatgcacagatagagaggcaccaggacttgagaggcaccaggacttgggaggcatgttgatccatctccaggaaagactgagaaaaagagcgttgaatataagaaaaaatacttcctctgttctcagatcgtatttgttttaaggccacacctttttgaagttttcagtttgaaacacaacctggactgaaatcatgagggaggttgtgtaggaaagaatcatcaagggacttagttgggagcttctctaccacagcttactccttatggtattaaccccctttaagtgtaaatgtctttggtttaaaacgtttgtacctcatctgttaccagagtgttcatactggagagaaaccctatgaatttactgaatgtgggggaactgttactcatatgttgcatttcgtcgaacgtgcaagtcatgctgaagagaaaccctgtgcttctaaggagtattgacaagcccttagctagatgacaatctcattgagaagcagaaaattcatgctggagagaaactagtgaaggtagcaatacttcattgaatattagaaaatttttctagagagaaagcattgaatatactgagtatgataacatttcctctcaaaccttatcccttactctgcatttgggagatcatacacagagaagccttataaatgtaagagatgtggaaatatcttcagccaaaagtaaatcctcactcatcaagaaatttttactggagagaaaccttgtgaatgtgggaaagcttccattcagatgtcacacctcagccagcagagaatttacagtggggaaaacccctttgcctgtaaggtatgtggaaaagtcttcagccacaaatcaaacctcactgagcatgagcattttcacacgagagagaaaccttttgaatgtaacgagtgtggaaaagcctttagccaaaagcagtatgtcattaaacatcagaacacccatactggcgagaagcttttcgaatgtaatgaatgtggaaaatcatttagccagaaggaaaacctccttacgcaccagaaaattcacactggagaaaaaccttttgagtgtaaagattgcgggaaagctttcattcagaagtcaaacctcatcagacaccagagaactcacacaggagagaagccctttgtatgtaaggagtgtggaaaaaccttcagtggcaaatccaaccttactgagcatgagaaaatccatattggagagaagccttttaaatgtagtgaatgtggaacagcctttggccagaagaagtacctcataaaacatcagaacattcacactggagagaaaccctatgaatgtaacgaatgtggaaaagccttctctcagcgaacatcacttattgtacatgtgaggattcattcaggtgataaaccttacgaatgcaatgtttgtggaaaagccttctctcagagctcatctctcactgtgcatgtgagaagccatacaggggagaagccctatggttgtaatgaatgtgggaaagctttctctcagttctcaacccttgctctgcatttgagaatacacacaggtaagaagccttatcagtgcagtgaatgtgggaaagctttcagccagaagtcacaccacattagacaccagaaaattcatactcactaaaaaccccatgaaagccttgaaagtgggaaagctttcattagaaatttgcacctcatcatgccccagaaataatccttctgaagcaaagcaccacgaatgaggttaactttaacaagtactaaaaacttaagggacaccagaaaatttgtactgaagagaaagacatgcatatgattaaaaccctgtgtccaacagagaaacctgcagcagagataatggtgaaagtttaggcacattttcactaaaagtgggaacagaaaatggaggcctgttttttattgctaccaccatagatctggagatcttcgccagtaacaagaaaaattaagttgtaaatattggaaaggaacagacaaaaatagatgacatggtcatctacaactaatattaagactcctgtggtattgattgagcagagcagaagagatttcaaaaaaagacctatgcatttattagaatttggaatatgatacaagtggcatcaggaaatgaggaaataatggaactattttttttaagtggaggtagtttgttctccaagggggaaaaatagaccatgaactatacacaaaagtgaatccagagattaaaaacagaaatatggaaaagctatgtactaaaatgcatatgaccttgggaatagggaaacattccttggaacaatttgagaaatacttagcggttctacttatgagtatgaatgctcaggaaatacgcactaggatatttactgtggcttgatttgtagtagccaaaaattagaaacaactgagaaagcccatcacgaacaatatgggaaattcttatgtaatactatatatctgtaaaatgcaacaaatgaaatccacatgtattaacagaaagatcccagaattgttgaggggggatcaagttgcagaatgatacagatagtacaatgacttttttgtaaatttgaattaaaagtttcctcataaaactcagtactatctattggtaatggatgcatatatgtatgtacatgtttttgaaacggattggaaggatacagaccaaactcttgatagtggtcacctgtgaagagtggagaagggaaaataatgagtgtgggaggtgggatgggtattggttaaaggggacttcagctttttatataaacatccacttctctttcaaaagacttcaagtaaatataagaagatactgattgattctggattgtggtatagggatatcttgtcttattttttgtacttttctgtatttttaaaatttctcaaaataggaatgggagtgaggatgggaatgctgtatctgtggaagtcatgttatactggattcatttccaattaaatactaaacattttatagaaaatatttctaaaattttatcacggatgaatggatggacttgctctctatgtaatatgaaattaatctattttattaaaatttaaaaggacagcacaatcc

SEQ ID NO: 276040 - protein, 78 aa, Artificial Sequence
  derived and/or modified sequence
MTTFKEAMTFKDVAVVFTEEELGLLDLAQRKLYRDVMLENFRNLLSVGHQAFHRDTFHFLREEKIWMMKTAIQREGNS

SEQ ID NO: 276041 - protein, 707 aa, Artificial Sequence
  derived and/or modified sequence
MTTFKEAMTFKDVAVVFTEEELGLLDLAQRKLYRDVMLENFRNLLSVGHQAFHRDTFHFLREEKIWMMKTAIQREGNSGDKIQTEMETVSEAGTHQEWSFQQIWEKIASDLTRSQDLMINSSQFSKEGDFPCQTEAGLSVIHTRQKSSQGNGYKPSFSDVSHFDFHQQLHSGEKSHTCDECGKNFCYISALRIHQRVHMGEKCYKCDVCGKEFSQSSHLQTHQRVHTGEKPFKCVECGKGFSRRSALNVHHKLHTGEKPYNCEECGKAFIHDSQLQEHQRIHTGEKPFKCDICGKSFCGRSRLNRHSMVHTAEKPFRCDTCDKSFRQRSALNSHRMIHTGEKPYKCEECGKGFICRRDLYTHHMVHTGEKPYNCKECGKSFRWASCLLKHQRVHSGEKPFKCEECGKGFYTNSQCYSHQRSHSGEKPYKCVECGKGYKRRLDLDFHQRVHTGEKLYNCKECGKSFSRAPCLLKHERLHSGEKPFQCEECGKRFTQNSHLHSHQRVHTGEKPYKCEKCGKGYNSKFNLDMHQKVHTGERPYNCKECGKSFGWASCLLKHQRLHSGEKPFKCEECGKRFTQNSQLHSHQRVHTGEKPYKCDECGKGFSWSSTRLTHQRRHSRETPLKCEQHGKNIVQNSFSKVQEKVHSVEKPYKCEDCGKGYNRRLNLDMHQRVHMGEKTWKCRECDMCFSQASSLRLHQNVHVGEKP

SEQ ID NO: 276042 - DNA, 2483 bp, Artificial Sequence
  derived and/or modified sequence
gaattctgggaagtggagtccaaacattcggtggagtcgcggacacttccgctcggggactgaggttgctgcagtttttccgcgatagtttggggcagttccgcgcgttgcaggcccttctgaatttcctggacctacgcattggatcctcaaagaactgctgaataccactagaaacatacctgtaaccagagacagctgattatagctttctgcagcaaggaagcccacgtaccaggggctgtcttggcacaattctgctttcccaggaactgcatcactcaggactctgcaagtttccagaagtaagagggaaaatgaccacgttcaaggaggcaatgaccttcaaggacgtggctgtggtcttcactgaggaagagctggggctgctggaccttgctcagaggaagctgtatcgagatgtgatgctggagaacttcaggaacctgctctcagtgggacatcaagcattccacagggatactttccacttcctaagggaagaaaagatttggatgatgaagacagcaatccaaagggaagggaattcaggagacaagatccaaactgagatggagactgtttcagaagcaggaacacatcaagagtggtccttccagcaaatctgggaaaaaattgcaagtgatttaaccaggtctcaagacttgatgataaatagctctcagttctccaaagaaggtgatttcccctgccagactgaggcaggactatctgtaattcacacaagacagaaatcttcccagggcaatggatataaaccatccttcagtgatgtctcccactttgattttcatcaacaattacactcaggagagaaatctcatacgtgtgatgagtgtggaaagaacttttgttacatctcagcccttcgtattcatcagagagtccacatgggagagaaatgctataagtgtgacgtgtgtggtaaggaattcagtcagagttcacatctgcaaactcatcagagagtccacactggagagaaaccgttcaaatgtgtggaatgtgggaaaggcttcagtcgtagatcagcacttaatgttcatcataaattacacacaggagagaaaccttataattgtgaggaatgcgggaaggccttcattcacgattcccagcttcaagaacatcagagaatccatacgggggagaagccattcaaatgtgatatatgtggtaagagcttctgtggtagatcaagacttaataggcattccatggttcacacggcagagaaaccattccgatgtgatacgtgtgataagagctttcgtcagagatcagcacttaatagtcatcgcatgatccacacaggagagaaaccatacaaatgtgaggagtgtggaaaaggctttatttgtaggcgagatctttatacgcatcatatggtccacacgggagaaaagccatataattgtaaagagtgtgggaagagcttcagatgggcctcgtgtcttttgaaacatcagcgagtccacagtggagaaaaaccattcaaatgtgaagaatgtgggaaaggattttacacaaattcacaatgctattcccaccagagatcccatagtggagaaaaaccatacaaatgtgtggagtgtgggaagggctacaaaaggaggttggatcttgactttcaccagcgcgtccatacaggagagaaactgtataattgtaaggaatgtgggaagagctttagtcgggccccatgtcttttgaaacatgagagactccacagtggagaaaaaccattccaatgtgaagagtgtgggaagagatttactcaaaattcacatcttcattcccatcagagagttcacactggagaaaagccatacaaatgtgagaagtgtggaaagggctacaatagtaagtttaatcttgatatgcaccagaaggtccacacaggagagagaccatacaattgtaaggaatgtgggaagagttttggctgggcctcgtgtcttttgaaacatcagagactgcacagtggagaaaaaccattcaaatgtgaagagtgtgggaaaagatttactcagaattcacagcttcattctcatcaaagagtgcacactggagaaaagccatacaaatgtgatgagtgtgggaagggcttcagctggtcctcaactcgtctgacccatcagagacgccacagcagagaaacacctctcaaatgtgagcagcatgggaagaacattgtacagaattcattctctaaagtgcaagaaaaagttcacagtgtagaaaagccatacaaatgtgaggactgtgggaagggctacaacaggcgcttgaatcttgatatgcatcagagggtccacatgggagagaaaacatggaagtgtagggagtgtgatatgtgctttagtcaggcctcaagccttcgacttcatcagaatgttcatgttggagaaaaaccttagtgatgtgatggtgcaataaagtcttcactcagtcttcatgaa

SEQ ID NO: 276043 - DNA, 3006 bp, Artificial Sequence
  derived and/or modified sequence
ttttttttttatattacttttgtttaaaattggttttgattcatattttattatatacacaatttattagcttcataatttaccatgcaagattttagactgattaggaaattcactaggaagagtagcaggtataatgtttgtatcatattaattttattattgtcttttatttttattaaaaattttatttcagtagtctttttttattttattaaagtatatactggtttttggttacatggatgaattgtctaatggtgaagtctgagattttagtgtacccatcacctgagtagtgtacattgtacccaacttgtagctttttatcccttaccctaccttccaccctccccatttggagtctgcatagtccattatatcactctgtatgcctttgcatacccatagcttaactcccacttataagtgaaaacacggtatttggttttccattcctgagttacttcacttagaataatagcctccagctccatccaagttgctgcaaaagacattatttcatttttttatggctgaatagtattccatggtgaatatataccatattttctttatccactcattggttgatgggcacttaggttggttccatgtctttgaaattgtgaattgtgctgtaataaatataggcatgcaggtgtccttttgatgtaaggacttcttttcctttgggtagatagtagtgggattgctggatcaaatggtagatccacttttagttctttagagaatctccatactgtatttcatagaggttgtactaatttaccttcacaccagcagtgtataggcgtttcttttcaccacacccatgtcaacatctattgtttttcgtcttttatttctatcaagtattttacatatgatacttggtttagttcgaaattggcctcatccaaaccaaagattatggtgcacttgaaaaatcaaactgaatgttgtctatactcatgagagtttcctgccatggcctaagtgaaatcttgataacactgaacaaaggcttcacttgtcctcatcctttaattctgtattctgataggagacaagatccaaactgagatggagactgtttcagaagcaggaacacatcaagagtggtccttccagcaaatctgggaaaaaattgcaagtgatttaaccaggtctcaagacttggtgataaatagctctcagttctccaaagaaggtgatttcccctgccagactgaggcaaggactatctgtaattcacacaagacagaaatcttcccaagggcaattggatataaaccatccttcagtgatgtctccctctttgattttcatcaacaattacactcaggagagaaatctcatacgtgtgatgagtgtggaaagaacttttgttacatctcagcccttcgtattcatcagagagtccacatgggagagaaatgctataagtgtgacgtgtgtggtaaggaattcagtcagagttcacatctgcaaactcatcagagagtccacactggagagaaaccgttcaaatgtgtggaatgtgggaaaggcttcagtcgtagatcagcacttaatgttcatcacaaattacacacaggagagaaaccttataattgtgaggaatgcgggaaggccttcattcacgactcccagcttcaagaacatcagagaatccatacgggggagaagccattcaaatgtgatatatgtggtaagagcttctgtggtagatcaagacttaataggcattccatggttcacacggcagagaaaccattccgatgtgatacgtgtgataagagctttcgtcagagatcagcacttaatagtcatcgcatgatccacacaggagagaaaccatacaaatgtgaggagtgtggaaaaggctttatttgtaggcgagatctttatacgcatcatatggtccacacgggagagaagccatataattgtaaagagtgtgggaagagcttcagatgggcctcgtgtcttttgaaacatcagcgagtccacagtggagaaaaaccaattcaatgtgaagaatgtgggaaaggattttacacaatttcacaatgctattcccaccagagatcccatagtggagaaaaaccatacaaatgtgtggagtgtgggaagggctacaaaaggaggttggatcttgactttcaccagcgcgtccatacaggagagaaactgtataattgtaaggaatgtgggaagagctttagtcgggccccatgtcttttgaaacatgagagactccacagtggagaaaaaccattccaatgtgaagagtgtgggaagagatttactcaaaattcacatcttcattcccatcagagagttcacactggagaaaagccatacaaatgtgagaagtgtggaaagggccacaatagtaagtttaatcttgatatgcaccagaaggtccacacaggagagagaccatacaattgtaaggaatgtgggaagagttttggctgggcctcgtgtcttttgaaacatcagagactgcacagtggggaaaaacctttcaaatgtgaagagtgtgggaaaagatttactcagaattcacagcttcattctcatcaaagagtgcacactggagaaaagccatacaaatgtgatgagtgtgggaagggcttcagctggtcctcaactcgtctgacccatcagagacgccacagcagagaaacacctctcaaatgtgagcagcatgggaagaacattgtacagaattcattctctgaagtgcaagaaaaagttcacagtgtagaaaagccatacaaatgtgaggactgtgggaagggctacaacaggcgcttgaatcttgatatgcatcagagggtccacatgggagagaaaacatggaagtgtagggagtgtgatatgtgctttagtcaggcctcaagccttcgacttcatcagaatgttcatgttggagaaaaaccttagtgatgtgatggtgcaataaagtcttcactcagtcttcatgaaaaaaaa

SEQ ID NO: 276044 - DNA, 237 bp, Artificial Sequence
  derived and/or modified sequence
atgaccaccttcaaggaggccatgaccttcaaggacgtggccgtggtgttcaccgaggaggagctgggcctgctggacctggcccagagaaagctgtacagagacgtgatgctggagaacttcagaaacctgctgagcgtgggccaccaggccttccacagagacaccttccacttcctgagagaggagaagatctggatgatgaagaccgccatccagagagagggcaacagctag

SEQ ID NO: 276045 - DNA, 2124 bp, Artificial Sequence
  derived and/or modified sequence
atgaccaccttcaaggaggccatgaccttcaaggacgtggccgtggtgttcaccgaggaggagctgggcctgctggacctggcccagagaaagctgtacagagacgtgatgctggagaacttcagaaacctgctgagcgtgggccaccaggccttccacagagacaccttccacttcctgagagaggagaagatctggatgatgaagaccgccatccagagagagggcaacagcggcgacaagatccagaccgagatggagaccgtgagcgaggccggcacccaccaggagtggagcttccagcagatctgggagaagatcgccagcgacctgaccagaagccaggacctgatgatcaacagcagccagttcagcaaggagggcgacttcccctgccagaccgaggccggcctgagcgtgatccacaccagacagaagagcagccagggcaacggctacaagcccagcttcagcgacgtgagccacttcgacttccaccagcagctgcacagcggcgagaagagccacacctgcgacgagtgcggcaagaacttctgctacatcagcgccctgagaatccaccagagagtgcacatgggcgagaagtgctacaagtgcgacgtgtgcggcaaggagttcagccagagcagccacctgcagacccaccagagagtgcacaccggcgagaagcccttcaagtgcgtggagtgcggcaagggcttcagcagaagaagcgccctgaacgtgcaccacaagctgcacaccggcgagaagccctacaactgcgaggagtgcggcaaggccttcatccacgacagccagctgcaggagcaccagagaatccacaccggcgagaagcccttcaagtgcgacatctgcggcaagagcttctgcggcagaagcagactgaacagacacagcatggtgcacaccgccgagaagcccttcagatgcgacacctgcgacaagagcttcagacagagaagcgccctgaacagccacagaatgatccacaccggcgagaagccctacaagtgcgaggagtgcggcaagggcttcatctgcagaagagacctgtacacccaccacatggtgcacaccggcgagaagccctacaactgcaaggagtgcggcaagagcttcagatgggccagctgcctgctgaagcaccagagagtgcacagcggcgagaagcccttcaagtgcgaggagtgcggcaagggcttctacaccaacagccagtgctacagccaccagagaagccacagcggcgagaagccctacaagtgcgtggagtgcggcaagggctacaagagaagactggacctggacttccaccagagagtgcacaccggcgagaagctgtacaactgcaaggagtgcggcaagagcttcagcagagccccctgcctgctgaagcacgagagactgcacagcggcgagaagcccttccagtgcgaggagtgcggcaagagattcacccagaacagccacctgcacagccaccagagagtgcacaccggcgagaagccctacaagtgcgagaagtgcggcaagggctacaacagcaagttcaacctggacatgcaccagaaggtgcacaccggcgagagaccctacaactgcaaggagtgcggcaagagcttcggctgggccagctgcctgctgaagcaccagagactgcacagcggcgagaagcccttcaagtgcgaggagtgcggcaagagattcacccagaacagccagctgcacagccaccagagagtgcacaccggcgagaagccctacaagtgcgacgagtgcggcaagggcttcagctggagcagcaccagactgacccaccagagaagacacagcagagagacccccctgaagtgcgagcagcacggcaagaacatcgtgcagaacagcttcagcaaggtgcaggagaaggtgcacagcgtggagaagccctacaagtgcgaggactgcggcaagggctacaacagaagactgaacctggacatgcaccagagagtgcacatgggcgagaagacctggaagtgcagagagtgcgacatgtgcttcagccaggccagcagcctgagactgcaccagaacgtgcacgtgggcgagaagccctag

SEQ ID NO: 276046 - DNA, 237 bp, Artificial Sequence
  derived and/or modified sequence
atgaccacattcaaggaagcaatgacgtttaaggatgtcgcagttgtctttactgaggaggaattagggctgttagacctggctcaacgaaagctgtaccgcgacgtgatgctagaaaacttcaggaatctgctgtctgtgggtcaccaagcttttcacagagacacattccactttctgagagaggaaaagatctggatgatgaaaaccgcaatacagcgtgaaggcaacagctag

SEQ ID NO: 276047 - DNA, 2124 bp, Artificial Sequence
  derived and/or modified sequence
atgacaactttcaaagaggccatgaccttcaaagacgtggccgtggtgtttaccgaagaggaactcggcttgctggatctcgcgcagcggaagctctatcgggacgtcatgctcgaaaacttccgtaatctgctgtcagtcggtcaccaggcctttcacagggacaccttccatttcctaagggaggagaagatctggatgatgaaaaccgcaatccagagagagggtaacagcggcgacaagattcagacagaaatggagacagtttctgaggcaggcacgcaccaggagtggtcctttcagcagatctgggaaaagatcgcatccgacctaaccaggtcccaggaccttatgatcaatagcagtcagttctcaaaagaaggggacttcccttgccagactgaagccggcctgtctgtcatccacacaagacaaaagtcatctcaaggtaacggctataagccctcatttagcgacgtgtctcatttcgactttcaccaacagctgcattcaggggaaaagtctcacacctgtgatgagtgtggaaagaatttctgttatattagcgcattaagaattcatcaaagagtacacatgggcgaaaaatgttataaatgtgacgtttgtgggaaggaattttcccaatcatcccacctgcagacccaccagagagtccatacaggggaaaaaccgtttaaatgtgtggaatgtggtaaaggtttctctcggcggagcgctctgaatgttcatcataaattacacacaggagaaaagccgtataattgcgaggaatgcggcaaagccttcatacatgatagtcagctgcaagagcaccagagaatacacacaggagaaaaaccgtttaagtgcgatatttgcggaaagagcttctgtgggcggtcccgacttaaccgtcacagtatggtgcatacagccgaaaagcctttccggtgcgatacgtgcgataagagttttaggcagcgttctgcattgaatagtcatcggatgatacacaccggcgagaagccttacaaatgtgaggagtgcggcaagggtttcatctgtcggagggacctgtatacacatcatatggtgcataccggagaaaagccttacaattgtaaagagtgcggtaaatcatttcgttgggccagctgcctgttgaagcatcaacgagtacatagcggcgagaagcccttcaagtgcgaggaatgcggtaaaggattttatacaaatagccaatgctatagccatcagcgaagccacagtggagaaaagccgtataaatgcgtggaatgtggaaagggctataaacggaggcttgacctggattttcatcagagagtccacaccggagagaagttgtacaattgcaaagaatgcggcaagagtttctcccgcgccccttgcttactgaagcacgaaagactccactccggggaaaagccctttcagtgtgaggagtgtggtaagaggtttacccagaactcccacctgcattcccaccagagagtgcacacaggggagaagccctacaaatgcgaaaaatgcggtaaaggatataatagcaagttcaacctcgacatgcaccagaaggtgcacactggcgagaggccatacaattgtaaagagtgtgggaaaagcttcggatgggctagctgtttgcttaagcaccagcggttacacagtggggagaagccctttaagtgtgaggaatgtggaaagcgctttacacagaactctcagctgcattctcaccagcgggtgcacacaggcgagaaaccatataaatgtgatgagtgtggaaagggcttttcatggagtagcacgagactgacgcatcaacggaggcactcacgagagactccgctcaagtgcgagcagcatggcaaaaacattgttcagaactcttttagcaaagtgcaggagaaggtgcattctgtagaaaaaccctacaagtgcgaagactgtggcaaagggtacaatcgtcgcctcaacctggatatgcaccaacgcgtccatatgggggagaagacatggaagtgccgagagtgcgatatgtgtttcagccaggcatctagtctgaggttacaccagaacgtccacgtcggtgaaaagccgtag

SEQ ID NO: 276048 - DNA, 237 bp, Artificial Sequence
  derived and/or modified sequence
atgaccaccttcaaggaggccatgaccttcaaggatgtggccgtggtgttcacagaggaggagctgggcctgctggacctggcccagaggaagctgtacagagatgtgatgctggagaacttcaggaacctgctgtctgtgggccaccaggccttccaccgggacaccttccacttcctgcgggaggagaagatctggatgatgaagacagccatccagcgggagggcaacagctag

SEQ ID NO: 276049 - DNA, 2124 bp, Artificial Sequence
  derived and/or modified sequence
atgaccaccttcaaggaggccatgaccttcaaggatgtggccgtggtgttcacagaggaggagctgggcctgctggacctggcccagaggaagctgtacagagatgtgatgctggagaacttcaggaacctgctgtctgtgggccaccaggccttccaccgggacaccttccacttcctgcgggaggagaagatctggatgatgaagacagccatccagcgggagggcaacagcggggacaagatccagacagagatggagaccgtgtctgaggccggcacccaccaggagtggagcttccagcagatctgggagaagatcgccagtgacctgaccaggagccaggacctgatgatcaacagcagccagttcagcaaggagggggacttcccctgccagacagaggccggcctgagcgtcatccacacccggcagaagagcagccagggcaatggctacaagcccagcttcagtgatgtgagccactttgacttccaccagcagctgcacagcggggagaagagccacacctgtgatgaatgtgggaagaacttctgctacatcagcgccctgcgcatccaccagagggtgcacatgggagagaagtgctacaagtgtgatgtgtgtgggaaggagttcagccagagcagccacctgcagacccaccagagggtgcacactggagagaagcccttcaagtgtgtggagtgtgggaagggcttcagcagaagaagtgccctgaatgtgcaccacaagctgcacactggagagaagccctacaactgtgaggagtgtgggaaggccttcatccatgacagccagctgcaggagcaccagaggatccacactggagagaagcccttcaagtgtgacatctgtgggaagagcttctgtggccgcagccggctgaacagacacagcatggtgcacacagctgagaagcccttccgctgtgacacctgtgacaagagcttccggcagaggtctgccctgaacagccacaggatgatccacactggagagaagccctacaagtgtgaggagtgtgggaagggcttcatctgccggcgggacctgtacacccaccacatggtgcacactggagagaagccctacaactgcaaggaatgtgggaagagcttccgctgggccagctgcctgctgaagcaccagagggtgcacagcggggagaagcccttcaagtgtgaggagtgtgggaagggcttctacaccaacagccagtgctacagccaccagaggagccacagcggggagaagccctacaagtgtgtggagtgtgggaagggctacaagaggcggctggacctggacttccaccagagggtgcacactggagagaagctgtacaactgcaaggaatgtgggaagagcttcagccgggccccctgcctgctgaagcatgagcggctgcacagcggggagaagcccttccagtgtgaggagtgtgggaagcgcttcacccagaacagccacctgcacagccaccagagggtgcacactggagagaagccctacaagtgtgagaagtgtgggaagggctacaacagcaagttcaacctggacatgcaccagaaggtgcacactggagagcggccctacaactgcaaggaatgtgggaagagctttggctgggccagctgcctgctgaagcaccagaggctgcacagcggggagaagcccttcaagtgtgaggagtgtgggaagcgcttcacccagaacagccagctgcacagccaccagagggtgcacactggagagaagccctacaagtgtgatgaatgtgggaagggcttctcctggagcagcacccggctgacccaccagaggaggcacagccgggagacccccctgaagtgtgagcagcacggcaagaacatcgtgcagaacagcttcagcaaggtgcaggagaaggtgcacagcgtggagaagccctacaagtgtgaggactgtgggaagggctacaacagaaggctgaacctggacatgcaccagagggtgcacatgggagagaagacctggaagtgccgggagtgtgacatgtgcttcagccaggccagcagcctgcggctgcaccagaatgtgcacgtgggggagaagccctag

SEQ ID NO: 276050 - DNA, 237 bp, Artificial Sequence
  derived and/or modified sequence
atgaccaccttcaaggaggccatgaccttcaaggacgtggccgtggtctttactgaggaggaattgggcctgttagatctcgcacagcgaaagctttacagggacgtcatgttggaaaacttccggaatctcctatccgttggccatcaggcattccaccgtgataccttccattttctgcgagaagaaaagatctggatgatgaagactgcaatccagagagaagggaattcttag

SEQ ID NO: 276051 - DNA, 2124 bp, Artificial Sequence
  derived and/or modified sequence
atgaccaccttcaaggaggccatgaccttcaaggacgtggccgtggtcttcactgaggaggagttaggactgttagacctcgcccagcgcaagctgtatcgggatgttatgttagagaatttccgcaacctgctgagtgtcggacatcaggccttccacagagacacattccatttccttagagaagagaagatctggatgatgaagacagccattcagcgtgaggggaactccggagacaaaatccaaaccgaaatggaaacagtgagtgaggcgggcacacatcaggagtggtcctttcaacagatctgggagaaaatcgccagtgatctgacacgctcacaggatctcatgatcaactcatcccaattttctaaagagggtgatttcccatgccaaactgaggccggcctgtctgtcattcacaccaggcagaagtcatcccaggggaacggatacaaaccttcattctcagacgtttcccattttgactttcaccaacagttgcacagtggcgagaagagtcacacttgcgacgagtgcggcaagaacttttgctatatttccgctctaaggatccaccagagagtgcatatgggagagaaatgctataaatgcgacgtgtgcggcaaagaattttcccagtcgtcgcacctccagactcaccaaagagtacatactggcgagaagccttttaaatgcgtggaatgtgggaaaggcttttcgagaagatcagccctaaacgttcaccataaactccacacaggggaaaagccttataattgtgaggaatgcggcaaggcttttatccacgacagtcagctgcaggagcaccaacggatccatacgggggaaaagccttttaaatgcgacatctgcggcaagtctttctgtggcaggtcccggctcaacagacatagcatggtccataccgccgagaaaccttttaggtgtgacacatgcgacaagtcctttagacagcgcagcgccctgaattcacaccgcatgatccataccggggagaagccctacaagtgtgaggaatgcggaaaaggctttatatgccgacgcgacctctatacccatcatatggtgcacaccggagaaaagccgtataattgtaaggagtgcggaaagtcctttcgttgggcctcttgcctcttgaagcaccagcgggttcactcgggcgaaaaaccttttaagtgtgaagaatgtggtaagggtttttacaccaatagtcaatgttattcacaccaaaggagtcattcgggagagaaaccttataagtgcgtggaatgcggcaaaggctataaaagaagactggacctcgatttccatcagcgggtgcacactggggagaaactgtataattgcaaagaatgtggaaagagtttctcaagagcaccctgtctgctgaaacatgaacgcctgcacagcggggagaagccattccaatgcgaggagtgcgggaagagattcacacaaaattctcaccttcattctcaccagagagttcacacgggtgagaaaccctacaagtgtgagaaatgcggtaagggctacaattctaaattcaatttagatatgcatcaaaaggtacataccggagaaagaccatataattgcaaggaatgcggcaagagctttggctgggcttcatgcctgttgaaacaccagcgtctgcatagcggcgaaaaacctttcaagtgcgaagaatgcggaaagcggtttacacaaaactcccagcttcacagccatcagcgggtgcatactggggagaagccctacaagtgtgacgagtgcgggaaagggttctcctggagctccactagactcacacaccagcgtaggcatagtcgcgagacaccattgaagtgcgagcagcatggaaagaatattgtgcagaattcgtttagcaaggtgcaggagaaagtgcactcggtagaaaagccctacaagtgtgaggactgcggcaaggggtacaaccgtcggctgaacctcgatatgcaccagagggtgcacatgggggagaagacctggaaatgccgggagtgcgacatgtgcttcagccaagcatcctccctccggcttcaccagaatgtccacgtgggcgaaaaaccctag

SEQ ID NO: 276052 - DNA, 237 bp, Artificial Sequence
  derived and/or modified sequence
atgacaactttcaaagaggcaatgacgttcaaggatgtggcagtggttttcaccgaggaggagttagggctactggacctggcccagcggaagctgtaccgagatgtcatgttggagaatttccgcaatttactcagtgtgggccatcaagcatttcatcgcgatacattccactttcttcgggaagagaagatctggatgatgaaaacagccattcagagggaaggcaattcttag

SEQ ID NO: 276053 - DNA, 2124 bp, Artificial Sequence
  derived and/or modified sequence
atgactacctttaaagaagccatgacattcaaggatgtggctgtggtgttcaccgaggaagagttggggctgcttgacctagcccagagaaagctctatagagatgttatgctcgagaactttcgcaacctgctgtcagtgggacaccaagctttccatcgggacactttccattttctgcgcgaagagaaaatttggatgatgaagactgccattcagagagaggggaacagtggagacaaaatacaaaccgaaatggagacagtgtccgaagccggaacgcaccaggagtggtcattccaacagatatgggaaaagatagctagtgacctaacacggagccaggatctgatgatcaactctagccagttcagcaaggaaggtgacttcccctgccagacagaggcgggtctatctgtgatacacacaagacagaagtcatcccaaggcaacggatataagccatccttttctgacgtcagtcacttcgactttcaccagcaactccacagtggggagaaaagtcacacgtgtgacgagtgcgggaagaacttttgctatatctcagccctcaggatccaccagagagtccacatgggcgagaaatgttacaagtgtgatgtttgtggaaaggagttctcacagtcttcccatctgcagacccaccagcgggtccataccggtgaaaagccttttaagtgcgtggaatgcggaaaggggttttcacggcgaagcgccctgaacgttcaccacaaattacacaccggtgaaaagccctataactgcgaggagtgcgggaaggcatttattcatgattcccagttacaggagcaccagaggatccataccggagagaaaccctttaaatgcgatatctgtggcaagtcattttgcggcaggtctcgcctgaaccgccactcgatggtacatactgccgagaagcctttcagatgcgatacatgtgataagtcctttcggcaaaggtccgctcttaactcccaccgcatgattcatactggggagaagccgtataaatgtgaagaatgcggtaaaggcttcatctgtcgaagggatctgtacacccaccacatggtccatacaggcgagaagccttacaattgcaaagaatgtggcaagtctttccggtgggcttcatgtttgctgaaacaccagagagtgcatagcggagagaagcctttcaagtgcgaagaatgcggcaagggtttttataccaattctcagtgttattcacaccaacgatcacactccggcgaaaagccttataagtgtgtggaatgcgggaaggggtacaaacgcaggctggacctagactttcatcagcgagtgcataccggggagaaattatacaattgcaaggagtgcggaaagtccttttccagagctccttgtctcctcaaacatgaaagactccattctggggaaaaaccttttcagtgtgaagaatgtggtaagaggtttactcaaaattctcatctgcattctcatcaacgggtgcatactggtgagaagccctacaaatgcgaaaaatgcgggaaaggatataactccaaatttaatctggacatgcaccaaaaggtgcacaccggcgaaaggccatacaactgcaaggaatgcggcaagtcttttggctgggcgagctgcctgctcaaacaccagaggctgcactctggagaaaagccttttaaatgtgaagagtgtgggaaaagatttactcagaatagtcagctgcactcgcaccaacgtgtgcacactggcgaaaaaccatataagtgtgacgagtgcggcaaaggcttcagctggtcatccacacggctaacccaccagagacgccattctcgcgaaactcctctgaaatgtgagcagcacggaaaaaacatcgtccagaattcattctctaaagttcaggaaaaagtgcacagcgtggagaaaccctataaatgcgaggattgcggcaaggggtacaacaggaggctgaacttagatatgcatcagcgagtacacatgggcgaaaaaacctggaaatgccgagaatgcgacatgtgcttctcacaggcctctagcttaaggcttcatcagaatgtccacgtgggcgagaaaccttag

SEQ ID NO: 276054 - DNA, 496 bp, Artificial Sequence
  derived and/or modified sequence
aaaaggggcctcgtcggagagtagagctgaataccactagaaacatacctgtaaccagagacagctgattatagctttctgcagcaaggaagcccacgtaccaggggctgtcttggcacaattctgctttcccaggaactgcatcactcaggactctgcaagtttccagaagtaagagggaaaatgaccacgttcaaggaggcaatgaccttcaaggacgtggctgtggtcttcactgaggaagagctggggctgctggaccttgctcagaggaagctgtatcgagatgtgatgctggagaacttcaggaacctgctctcagtgggacatcaagcattccacagggatactttccacttcctaagggaagaaaagatttggatgatgaagacagcaatccaaagggaagggaattcaggagacaagatccaaactgagatggagactgtttcagaagcaggaacacatcaagagtggtccttccagcaaatctggg

SEQ ID NO: 276055 - DNA, 2902 bp, Artificial Sequence
  derived and/or modified sequence
aaacattcggtggagtcgcggacacttccgctcggggactgaggttgctgcagtttttccgcgatagtttggggcagttccgcgcgttgcaggcccttctgaatttcctggacctacgcattggatcctcaaagaactgctgaataccactagaaacatacctgtaaccagagacagctgattatagctttctgcagcaaggaagcccacgtaccaggggctgtcttggcacaattctgctttcccaggaactgcatcactcaggactctgcaagtttccagaagtaagagggaaaatgaccacgttcaaggaggcaatgaccttcaaggacgtggctgtggtcttcactgaggaagagctggggctgctggaccttgctcagaggaagctgtatcgagatgtgatgctggagaacttcaggaacctgctctcagtgggacatcaagcattccacagggatactttccacttcctaagggaagaaaagatttggatgatgaagacagcaatccaaagggaagggaattcaggagacaagatccaaactgagatggagactgtttcagaagcaggaacacatcaagagtggtccttccagcaaatctgggaaaaaattgcaagtgatttaaccaggtctcaagacttgatgataaatagctctcagttctccaaagaaggtgatttcccctgccagactgaggcaggactatctgtaattcacacaagacagaaatcttcccagggcaatggatataaaccatccttcagtgatgtctcccactttgattttcatcaacaattacactcaggagagaaatctcatacgtgtgatgagtgtggaaagaacttttgttacatctcagcccttcgtattcatcagagagtccacatgggagagaaatgctataagtgtgacgtgtgtggtaaggaattcagtcagagttcacatctgcaaactcatcagagagtccacactggagagaaaccgttcaaatgtgtggaatgtgggaaaggcttcagtcgtagatcagcacttaatgttcatcataaattacacacaggagagaaaccttataattgtgaggaatgcgggaaggccttcattcacgattcccagcttcaagaacatcagagaatccatacgggggagaagccattcaaatgtgatatatgtggtaagagcttctgtggtagatcaagacttaataggcattccatggttcacacggcagagaaaccattccgatgtgatacgtgtgataagagctttcgtcagagatcagcacttaatagtcatcgcatgatccacacaggagagaaaccatacaaatgtgaggagtgtggaaaaggctttatttgtaggcgagatctttatacgcatcatatggtccacacgggagaaaagccatataattgtaaagagtgtgggaagagcttcagatgggcctcgtgtcttttgaaacatcagcgagtccacagtggagaaaaaccattcaaatgtgaagaatgtgggaaaggattttacacaaattcacaatgctattcccaccagagatcccatagtggagaaaaaccatacaaatgtgtggagtgtgggaagggctacaaaaggaggttggatcttgactttcaccagcgcgtccatacaggagagaaactgtataattgtaaggaatgtgggaagagctttagtcgggccccatgtcttttgaaacatgagagactccacagtggagaaaaaccattccaatgtgaagagtgtgggaagagatttactcaaaattcacatcttcattcccatcagagagttcacactggagaaaagccatacaaatgtgagaagtgtggaaagggctacaatagtaagtttaatcttgatatgcaccagaaggtccacacaggagagagaccatacaattgtaaggaatgtgggaagagttttggctgggcctcgtgtcttttgaaacatcagagactgcacagtggagaaaaaccattcaaatgtgaagagtgtgggaaaagatttactcagaattcacagcttcattctcatcaaagagtgcacactggagaaaagccatacaaatgtgatgagtgtgggaagggcttcagctggtcctcaactcgtctgacccatcagagacgccacagcagagaaacacctctcaaatgtgagcagcatgggaagaacattgtacagaattcattctctaaagtgcaagaaaaagttcacagtgtagaaaagccatacaaatgtgaggactgtgggaagggctacaacaggcgcttgaatcttgatatgcatcagagggtccacatgggagagaaaacatggaagtgtagggagtgtgatatgtgctttagtcaggcctcaagccttcgacttcatcagaatgttcatgttggagaaaaaccttagtgatgtgatggtgcaataaagtcttcactcagtcttcatgaatgcagtctcatctgaaagttcacaaaggagagacacattaaaatatgaggcacatagtaagcacttccctttgagtattttatctctgaatccatgctggtgataaatttcacccattcttggaagagggaaaacatttgtttaagataacatcagtgcttcagccatagctcagcatgccccagtagtctcaggaccaccataatggagaatccttgtaaatggtgcaataaagcttcattcagaagtttgataattacagctatcattcaggagacaggccttagaaagagtaagagttcatgaatttaccagactaatggtggacatgtccaaattgatgtccactagaatgtaaactacatgtgtctttgctgctaagtcgtcacagccttaacattgattagcactttgtatgtgttcagtacttgtttgttaaa

SEQ ID NO: 276056 - protein, 310 aa, Artificial Sequence
  derived and/or modified sequence
MLVVEVANGRSLVWGAEAVQALRERLGVGGRTVGALPRGPRQNSRLGLPLLLMPEEARLLAEIGAVTLVSAPRPDSRHHSLALTSFKRQQEESFQEQSALAAEARETRRQELLEKITEGQAAKKQKLEQASGASSSQEAGSSQAAKEDETSDGQASGEQEEAGPSSSQAGPSNGVAPLPRSALLVQLATARPRPVKARPLDWRVQSKDWPHAGRPAHELRYSIYRDLWERGFFLSAAGKFGGDFLVYPGDPLRFHAHYIAQCWAPEDTIPLQDLVAAGRLGTSVRKTLLLCSPQPDGKVVYTSLQWASLQ

SEQ ID NO: 276057 - DNA, 1349 bp, Artificial Sequence
  derived and/or modified sequence
gaggcctaggggcggggcttcgccgagaccccggaggctttgggtgcgctgcagcggtctgcggcgcgcagctgtttcggtaactgctttgcctcccggctcccgcaggaggatgctggtggtggaggtggcgaacggccgctccctggtgtggggagccgaggcggtgcaggccctccgggagcgcctgggtgtggggggccgcacggtaggcgccctgccccgcgggccccgccagaactcgcgcctgggcctcccgctgctgctgatgcccgaagaggcgcggctcttggccgagatcggcgccgtgactctggtcagcgccccgcgtccagactctcggcaccacagcctggccctgacatccttcaagcgccagcaagaggagagcttccaggagcagagcgccttggcagctgaggcccgggagacccgtcgtcaggagctcctggagaagattacggagggccaggctgctaagaagcagaaactagaacaggcttcaggggccagctcaagccaggaggccggctcgagccaggctgccaaagaggatgagaccagtgatggccaggcttcgggagagcaggaggaagctggcccctcgtcttcccaagcaggaccctcaaatggggtagcccccttgcccagatctgctctccttgtccagctggccactgccaggcctcgaccggtcaaggccaggcccctggactggcgtgtccagtctaaagactggccccacgccggccgccctgcccacgagctgcgctacagtatctacagagacctgtgggagcgaggcttcttcctcagtgcggctggcaagttcggaggtgacttcctggtctatcctggtgaccccctccgcttccacgcccattatatcgctcagtgctgggcccccgaggacaccatcccactccaagacctggttgctgctgggcgccttggaaccagcgtcagaaagaccctgctcctctgttctccgcagcctgatggtaaggtggtctacacctccctgcaatgggccagcctgcagtgaactccagagacctaggggatgtggctgtgtcggcagcaagagcctttctggatgttccccagctcttctctgggagtctagaacatcctcctacctttctccgcggttagtttttgattccaggttttcgaacactacatcttttttatgttcttccttgtttcaaagcacttattggctgtgtttttgtagttacctattttcacactgtgagcttcccgagaatggggcctgggtttgattcatctgttttctacagggtttaagtctcaggaggtctcaataaacttggtatataaatgtt

SEQ ID NO: 276058 - DNA, 1424 bp, Artificial Sequence
  derived and/or modified sequence
tgacgaagttgacgagggtgtcggcatgagggggtggagcaaggagcgcgtggcgcggtgcgcagtgggtggctccacctcgactgcgaattactgtttatgaggtgactcgctggttctatcggtggacagtgggacattctgaagggaggcaaggaggcggactgagcgctcccaattggggaggatgctggtggtggaggtggcgaacggccgctccctggtgtggggagccgaggcggtgcaggccctccgggagcgcctgggtgtggggggccgcacggtaggcgccctgccccgcgggccccgccagaactcgcgcctgggcctcccgctgctgctgatgcccgaagaggcgcggctcttggccgagatcggcgccgtgactctggtcagcgccccgcgtccagactctcggcaccacagcctggccctgacatccttcaagcgccagcaagaggagagcttccaggagcagagcgccttggcagctgaggcccgggagacccgtcgtcaggagctcctggagaagattacggagggccaggctgctaagaagcagaaactagaacaggcttcaggggccagctcaagccaggaggccggctcgagccaggctgccaaagaggatgagaccagtgatggccaggcttcgggagagcaggaggaagctggcccctcgtcttcccaagcaggaccctcaaatggggtagcccccttgcccagatctgctctccttgtccagctggccactgccaggcctcgaccggtcaaggccaggcccctggactggcgtgtccagtctaaagactggccccacgccggccgccctgcccacgagctgcgctacagtatctacagagacctgtgggagcgaggcttcttcctcagtgcggctggcaagttcggaggtgacttcctggtctatcctggtgaccccctccgcttccacgcccattatatcgctcagtgctgggcccccgaggacaccatcccactccaagacctggttgctgctgggcgccttggaaccagcgtcagaaagaccctgctcctctgttctccgcagcctgatggtaaggtggtctacacctccctgcaatgggccagcctgcagtgaactccagagacctaggggatgtggctgtgtcggcagcaagagcctttctggatgttccccagctcttctctgggagtctagaacatcctcctacctttctccgcggttagtttttgattccaggttttcgaacactacatcttttttatgttcttccttgtttcaaagcacttattggctgtgtttttgtagttacctattttcacactgtgagcttcccgagaatggggcctgggtttgattcatctgttttctacagggtttaagtctcaggaggtctcaataaacttggtatataaatgtt

SEQ ID NO: 276059 - DNA, 1548 bp, Artificial Sequence
  derived and/or modified sequence
cgaggacgcccgaacgccgaacttcctgtgctcgggagggggcagggttttgtactgtgggagtctgagagcgaggaggtccgaaagccgaatcacagtcgttcggaaagaggaggagcgaaggctcgagcgtccggaagagggtgtggcctcggcggtgccttagcctccagagcttctgaccgctgacgggaacacccgaagggggacgcccactttgcaagagggtggtgccaaaatggacctttgtaagggggcgtgtcgccgcgcttgcggaggtttgtttttcacgctccaaggcgcaatggaggatgctggtggtggaggtggcgaacggccgctccctggtgtggggagccgaggcggtgcaggccctccgggagcgcctgggtgtggggggccgcacggtaggcgccctgccccgcgggccccgccagaactcgcgcctgggcctcccgctgctgctgatgcccgaagaggcgcggctcttggccgagatcggcgccgtgactctggtcagcgccccgcgtccagactctcggcaccacagcctggccctgacatccttcaagcgccagcaagaggagagcttccaggagcagagcgccttggcagctgaggcccgggagacccgtcgtcaggagctcctggagaagattacggagggccaggctgctaagaagcagaaactagaacaggcttcaggggccagctcaagccaggaggccggctcgagccaggctgccaaagaggatgagaccagtgatggccaggcttcgggagagcaggaggaagctggcccctcgtcttcccaagcaggaccctcaaatggggtagcccccttgcccagatctgctctccttgtccagctggccactgccaggcctcgaccggtcaaggccaggcccctggactggcgtgtccagtctaaagactggccccacgccggccgccctgcccacgagctgcgctacagtatctacagagacctgtgggagcgaggcttcttcctcagtgcggctggcaagttcggaggtgacttcctggtctatcctggtgaccccctccgcttccacgcccattatatcgctcagtgctgggcccccgaggacaccatcccactccaagacctggttgctgctgggcgccttggaaccagcgtcagaaagaccctgctcctctgttctccgcagcctgatggtaaggtggtctacacctccctgcaatgggccagcctgcagtgaactccagagacctaggggatgtggctgtgtcggcagcaagagcctttctggatgttccccagctcttctctgggagtctagaacatcctcctacctttctccgcggttagtttttgattccaggttttcgaacactacatcttttttatgttcttccttgtttcaaagcacttattggctgtgtttttgtagttacctattttcacactgtgagcttcccgagaatggggcctgggtttgattcatctgttttctacagggtttaagtctcaggaggtctcaataaacttggtatataaatgtt

SEQ ID NO: 276060 - DNA, 1732 bp, Artificial Sequence
  derived and/or modified sequence
agctggccgggacccgggcggagcgggcggggacccgggctactgcggtgtggactcgagggctgggcgcggggccggcgcagaagccgccagctggagacgatggtggaccacttggccaacacggagatcaacagccagcgcatcgcggcagtggagagctgcttcggggcctcggggcagccgctggcgctgccaggccgagtgctgctgggcgagggcgtgctgaccaaagagtgccgcaagaaggccaagccgcgcatcttcttcctctttaacgacatcctggtgtatggcagcatcgtgctcaacaagcgcaagtaccgcagccagcacatcatccccctggaggaggtcacactggagctgttgccggagacgctgcaggccaagaaccgctggatgatcaagacggccaagaagtcctttgtggtgtcggccgcctccgctacggagcgccaggaatggattagccacatcgaggagtgcgtgcggcggcaactgagggccacgggccgcccgcccagcacggagcacgcggcaccctggatccccgacaaggccacggacatctgcatgcgctgcacgcagacgcgcttctctgccctcacgaggcgccaccactgccgcaagtgcggcttcgtggtctgcgctgagtgctcgcgccagcgcttcctgctcccgcgcctgtcccccaagcccgtgcgcgtctgcagcctctgctaccgcgaactggccgcccagcagcggcaggaggaggcggaggagcagggcgcggggtccccagggcagccagcccacctggcccggcccatctgcggagcgtccagtggagatgacgatgactccgacgaggacaaggagggcagcagggacggcgactggcccagcagcgtggagttctacgcctcgggggtggcctggtctgccttccacagctgacccccggcctgcagaacatctgtccccaagccagctccactgcccaggcccccaagagggcagctccagaagctgcccagggctccgggaccccatcccatggtggcaggtgcagcggtggggagtggctctttctggactcccagtgcctttttgctggacactgtgtccttatggcttcactgcaggtaatgcctttcccttcaggaagccccagaacacccacaggtcttggtaacaaacgccaccttacactctgcaggctgcagcggcagctccagatggcctcctgagctggacgaccccaggtctccagacatctagggaccagagcaggtttgggaacacagagggaagacaggatgggagtgtagccacagaacccacctgcaccctgacaggcacaccccactgaagagcctgagtcccaggaggcctcctggaagcccaggactgcccacccaccacgctggtgcccaccgcctggccagccaagccctgccgatcagacatgtgggctccccgaagcccagccagagactgccgtgctgtgggtgccaccaggcccagggactgcagcctgagctccccgaggcccagggcagccgggtgaggactctgtcctgtgtcacctctctccaggtgtccagctgtctcatgcctttttgtcctgtcctcagctctccgtgtggtcagcgaaaccattgttttctgttaggactcagttgcaagaacagaaaccctgcccccacttaataataaaaaagaaagtttattgatgggtggttgc

SEQ ID NO: 276061 - DNA, 2443 bp, Artificial Sequence
  derived and/or modified sequence
tctgagcatccgaagcgcggccaggtatgcatctagggcaccggggtcctggtggcgcgccagtgggccccctccctccacccctgtgactaaaccaccctccctacacggttgaatgacaagttcaaccttccctaaaacccccggtgacgagtccagccgcgcgcccattcttcacgcaggggcgggacggactttcaaagacttggagttcccacgggtgtgggttcgagaccttcctctgccagttcccagctccgctaccctgagcaaatgacttacgctccattggattttccgcaatgtggctgaaggtggggggcctacttcgggggaccggtggacagctgggccagactgttggttggccttgtggggccctggggcctgggccccaccgctggggaccatgtggaggttcttgggcccaaaagttttaccaggatgggcctgggagaggcctgggtgaggaggacattcgcagggcacgggaggcccgtcccaggaagacaccccggccccagctgagtgaccgctctcgagaacgcaaggtgcctgcctcccgcatcagccgcttggccaactttgggggactggctgtgggcttggggctaggagtactggccgagatggctaagaagtccatgccaggaggtcgtctgcagtcagagggtggttctgggctggactccagccccttcctgtcggaggccaatgccgagcggattgtgcagaccttatgtacagttcgaggggccgccctcaaggttggccagatgctcagcatccaggacaacagcttcatcagccctcagctgcagcacatctttgagcgggtccgccagagcgccgacttcatgccccgctggcagatgctgagagttcttgaagaggagctcggcagggactggcaggccaaggtggcctccttggaggaggtgccctttgccgctgcctcaattgggcaggtgcaccagggcctgctgagggacgggacggaggtggccgtgaagatccagtaccccggcatagcccagagcattcagagcgatgtccagaacctgctggcggtactcaagatgagcgcggccctgcccgcgggcctgtttgccgagcagagcctgcaggccttgcagcaggagctggcttgggagtgtgactaccgtcgtgaggcggcttgtgcccagaatttcaggcagctgctggcaaatgaccccttcttccgggtcccagccgtggttaaggagctgtgcacgacacgggtgctgggcatggagctggctggaggggtccccctggaccagtgccagggcctaagccaggacctgcggaaccagatttgcttccagctcctgacgctgtgtctgcgggagctgtttgagttccgattcatgcagactgaccccaactgggccaacttcctgtatgatgcctccagccaccaggtgaccctgctggactttggtgcaagccgggagtttgggacagagttcacagaccattacatcgaggtggtgaaggctgcagctgatggagacagagactgtgtcctgcagaagtccagggacctcaaattcctcacaggctttgaaaccaaggcattctccgacgcccacgtggaggcagtgatgatcctgggggagcctttcgccacccagggcccttatgactttgggtcgggggaaacggcccgccgcatacaggacctcatcccggtgctgctgcggcaccggctgtgtcccccacccgaggagacctatgccctgcaccgcaagctggcaggggctttcctggcctgtgcccacctccgagcccacatcgcctgcagggacctcttccaggacacctaccaccgctactgggccagtcgccagccagacgcagccactgccggcagcctccccaccaaaggggactcctgggtggatccctcatgacagcctccatgggggattcagtccccagagcaggccgtaccctgctgtagtgcctcttatcccttccccgtctgccctgggtcagaggagcccccttgggcttcccagtcttgcctggctctcctccttggcccaggagctcaggatccctggggctggggaactcccaacttcgtgccctagatcctgcacctccccactcgaaagtgggtatccgaaaactaagccagggaagcggttaacttatctttgccaacatttgagggagccttgggccgctgcatgtcgttatgcagatcagactcatcagggggagccctcacctctgcctcaagcctcccgtggaaggcgagatggtcctggaggcagtcctcacctctgcctccctcgctcctccaacagctgccttctcccgggttccagcctctcagtgtgttggagaggtaggggtgcggggtgggggggagctgaatcttcaatcggaataaaagcagccctccccttcc

SEQ ID NO: 276062 - DNA, 381 bp, Artificial Sequence
  derived and/or modified sequence
atgagaactaagatgcggattatgggattccggggtactgtgatcaaacctctgaacgaggaggctgccgctgagctgggcgccgaactgctgggtgaggcgacaatatttatcgtgggcggcggctgtctcgttctagaatattggcggcatcaggcacagcagagacataaggaagaagaacagcgcgccgcctggaacgctttacgcgatgaggtgggtcaccttgctctggccttagaagctctgcaagcacaggtacaggccgctcctcctcagggagccctggaggagctgcgtactgaactgcaggaggttcgagctcagctctgcaatcccggacgcagcgccagccacgccgtacctgctagcaagaagtag

SEQ ID NO: 276063 - DNA, 381 bp, Artificial Sequence
  derived and/or modified sequence
atgaggaccaagatgaggatcatgggcttccggggcaccgtcatcaagcccctgaatgaggaggccgctgctgagctgggcgctgagctgctgggggaggccaccatcttcatcgtgggcggcggctgcctggtgctggagtactggaggcaccaggcccagcagaggcacaaggaggaggagcagagagctgcctggaatgccctgagagatgaggtgggccacctggccctggccctggaggccctgcaggcccaggtgcaggccgccccaccccagggcgccctggaggagctgaggacagagctgcaggaggtgcgggcccagctgtgcaaccctggccgcagcgccagccatgctgtgcctgccagcaagaagtag

SEQ ID NO: 276064 - DNA, 381 bp, Artificial Sequence
  derived and/or modified sequence
atgcggaccaagatgcggatcatgggcttccggggcaccgtgatcaagccgctcaacgaagaagctgccgcagaactgggagccgaactactgggagaggccacgatttttatagtgggcggcgggtgcctggtgctggaatattggcgccatcaggcccaacaaagacacaaggaggaagaacagagggcggcttggaatgccctacgcgatgaggttggccacttagcactggccctcgaggccttgcaggctcaagtccaggctgctcccccccagggcgcactggaggagctgagaacagaactgcaggaagtccgtgcgcagctatgtaatcctggacgatcagctagccatgctgtcccagcaagcaaaaagtag

SEQ ID NO: 276065 - DNA, 381 bp, Artificial Sequence
  derived and/or modified sequence
atgaggactaaaatgaggatcatggggttccgagggaccgtcatcaagccgttgaatgaagaggccgctgcagagctcggcgctgaacttctgggagaggcgacgatttttattgttggcggtgggtgcctcgttcttgaatattggagacatcaggctcagcagcggcataaagaggaggagcagcgtgccgcttggaatgctctacgagacgaagtagggcatctggcgctggccctggaagcgcttcaagctcaggtccaggcagcaccccctcagggagccctggaagaactgaggacagagcttcaggaggttcgcgcacaactatgtaatccgggtcgctcagcctcccacgcagtgcccgcttccaagaaatag

SEQ ID NO: 276066 - DNA, 381 bp, Artificial Sequence
  derived and/or modified sequence
atgagaaccaagatgagaatcatgggcttcagaggcaccgtgatcaagcccctgaacgaggaggccgccgccgagctgggcgccgagctgctgggcgaggccaccatcttcatcgtgggcggcggctgcctggtgctggagtactggagacaccaggcccagcagagacacaaggaggaggagcagagagccgcctggaacgccctgagagacgaggtgggccacctggccctggccctggaggccctgcaggcccaggtgcaggccgcccccccccagggcgccctggaggagctgagaaccgagctgcaggaggtgagagcccagctgtgcaaccccggcagaagcgccagccacgccgtgcccgccagcaagaagtag

SEQ ID NO: 276067 - protein, 562 aa, Artificial Sequence
  derived and/or modified sequence
MVDYHAANQSYQYGPSSAGNGAGGGGSMGDYMAQEDDWDRDLLLDPAWEKQQRKTFTAWCNSHLRKAGTQIENIDEDFRDGLKLMLLLEVISGERLPKPERGKMRVHKINNVNKALDFIASKGVKLVSIGAEEIVDGNAKMTLGMIWTIILRFAIQDISVEETSAKEGLLLWCQRKTAPYKNVNVQNFHISWKDGLAFNALIHRHRPELIEYDKLRKDDPVTNLNNAFEVAEKYLDIPKMLDAEDIVNTARPDEKAIMTYVSSFYHAFSGAQKAETAANRICKVLAVNQENEHLMEDYEKLASDLLEWIRRTIPWLEDRVPQKTIQEMQQKLEDFRDYRRVHKPPKVQEKCQLEINFNTLQTKLRLSNRPAFMPSEGKMVSDINNGWQHLEQAEKGYEEWLLNEIRRLERLDHLAEKFRQKASIHEAWTDGKEAMLKHRDYETATLSDIKALIRKHEAFESDLAAHQDRVEQIAAIAQELNELDYYDSHNVNTPDGLQEGPGQPHSPIPPLCIYAKHSLQSSGVGGWAGRGWGRLSPLSLCGLARRFPRPGWGDLGPALLVW

SEQ ID NO: 276068 - protein, 332 aa, Artificial Sequence
  derived and/or modified sequence
MEKTHRGPGLAPGQIYTYPARCWRKKRRLNILEDPRLRPCEYKIDCEAPLKKEGGLPEGPVLEALLCAETGEKKIELKEEETIMDCQKQQLLEFPHDLEVEDLEDDIPRRKNRAKGKAYGIGGLRKRQDTASLEDRDKPYVCDICGKRYKNRPGLSYHYTHTHLAEEEGEENAERHALPFHRKNNHKQFYKELAWVPEAQRKHTAKKAPDGTVIPNGYCDFCLGGSKKTGCPEDLISCADCGRSGHPSCLQFTVNMTAAVRTYRWQCIECKSCSLCGTSENDDQLLFCDDCDRGYHMYCLSPPMAEPPEGSWSCHLCLRHLKEKASAYITLT

SEQ ID NO: 276069 - protein, 388 aa, Artificial Sequence
  derived and/or modified sequence
MATAIQNPLKSLGEDFYREAIEHCRSYNARLCAERSLRLPFLDSQTGVAQNNCYIWMEKTHRGPGLAPGQIYTYPARCWRKKRRLNILEDPRLRPCEYKIDCEAPLKKEGGLPEGPVLEALLCAETGEKKIELKEEETIMDCQKQQLLEFPHDLEVEDLEDDIPRRKNRAKGKAYGIGGLRKRQDTASLEDRDKPYVCDICGKRYKNRPGLSYHYTHTHLAEEEGEENAERHALPFHRKNNHKQFYKELAWVPEAQRKHTAKKAPDGTVIPNGYCDFCLGGSKKTGCPEDLISCADCGRSGHPSCLQFTVNMTAAVRTYRWQCIECKSCSLCGTSENDDQLLFCDDCDRGYHMYCLSPPMAEPPEGSWSCHLCLRHLKEKASAYITLT

SEQ ID NO: 276070 - DNA, 612 bp, Artificial Sequence
  derived and/or modified sequence
atggccacagccatacaaaatccacttaaaagcttaggggaggatttctaccgcgaagccattgagcactgtcgctcctataatgctaggctctgcgcagagagaagcttgcggctgccttttctggactctcagactggggtagcccagaataattgctatatttggatggagaagacccatagggggcctggtctggcacccggtcaaatctacacataccccgcacgctgctggcgtaagaaacgacggctgaatatactggaggacccaagactccggccatgtgaatacaaaatcgattgcgaggcaccattgaagaaggaagggggtctgccggagggacccgtcctggaggccctcctctgcgccgagaccggcgagaagaaaattgagttgaaggaagaggagaccattatggactgccagaaacaacagctcctggagttcccacatgatttggaggtcgaggacctcgaagacgacatccccaggagaaagaaccgagccaaagggaaggcatatgggatcggaggccttcgcaagagacaggacacagcttccctggaagatcgcgacaagccgtacgtgtgcgactctgaaagtttttag

SEQ ID NO: 276071 - DNA, 1167 bp, Artificial Sequence
  derived and/or modified sequence
atggccacagccatccagaatcccttaaaatccctgggagaagatttctatcgagaggccatagaacattgtcgatcctacaacgctcggttgtgtgccgagcgctcactgagactgccttttctggattctcagaccggcgtcgcacaaaataattgttacatttggatggaaaaaacccatcgagggcccgggttggcaccaggtcagatatatacctatcctgcccggtgctggaggaagaaaagacggctcaacattctggaagacccccgtttgaggccatgcgagtataagatcgactgtgaggcccctctcaagaaagagggagggctgcctgaaggaccggtactcgaggctctgttgtgtgcagaaactggggagaagaagatcgaactaaaagaggaagagacaattatggactgtcagaaacagcaacttctggagttcccccacgacttggaagtagaggatcttgaggacgacatacctcggagaaagaatagagctaaggggaaagcttacgggataggagggctgcgtaagagacaggacacggcgtccctcgaggatagagataagccttatgtgtgcgatatttgtggaaaacgctataaaaaccgccccggactaagctaccattacactcatacgcatcttgccgaggaggagggcgaggagaatgccgagagacacgccctgcccttccatcggaagaataatcacaagcaattctataaggaacttgcttgggtgcccgaggcgcagaggaaacacaccgccaagaaggcccccgacgggacagtgattccgaatgggtattgtgacttttgcctgggcgggtccaaaaagaccggctgccccgaggacctgatcagttgtgccgattgcggacgttctggccatcctagctgtttgcagttcacagtgaacatgaccgcagccgtgcggacttaccggtggcagtgtatcgaatgcaaatcttgctcactttgtggaacctctgagaacgacgaccaactgcttttttgtgacgactgtgatagaggctatcatatgtactgcctgtccccacctatggctgagccccctgaaggctcatggagctgccacctgtgcttgaggcacctgaaagaaaaggcttcggcttacatcactctgacatag

SEQ ID NO: 276072 - DNA, 612 bp, Artificial Sequence
  derived and/or modified sequence
atggccacagccatccagaaccccctgaagagcctgggggaggacttctaccgggaggccatcgagcactgccgcagctacaatgcccggctgtgtgccgagaggagcctgcggctgcccttcctggacagccagacaggagtggcccagaacaactgctacatctggatggagaagacccaccggggccctggcctggcccctggccagatctacacctacccagcccgctgctggaggaagaagaggcggctgaacatcctggaggacccccggctgcggccctgtgagtacaagattgactgtgaggcccccctgaagaaggagggcggcctgcctgagggccctgtgctggaggccctgctgtgtgccgagaccggggagaagaagattgagctgaaggaggaggagaccatcatggactgccagaagcagcagctgctggagttcccccatgacctggaggtggaggacctggaggatgacatccccaggaggaagaacagagccaagggcaaggcctatggaattggaggcctgaggaagaggcaggacacagccagcctggaggaccgggacaagccctacgtgtgtgacagcgagagcttctag

SEQ ID NO: 276073 - DNA, 1167 bp, Artificial Sequence
  derived and/or modified sequence
atggccacagccatccagaaccccctgaagagcctgggggaggacttctaccgggaggccatcgagcactgccgcagctacaatgcccggctgtgtgccgagaggagcctgcggctgcccttcctggacagccagacaggagtggcccagaacaactgctacatctggatggagaagacccaccggggccctggcctggcccctggccagatctacacctacccagcccgctgctggaggaagaagaggcggctgaacatcctggaggacccccggctgcggccctgtgagtacaagattgactgtgaggcccccctgaagaaggagggcggcctgcctgagggccctgtgctggaggccctgctgtgtgccgagaccggggagaagaagattgagctgaaggaggaggagaccatcatggactgccagaagcagcagctgctggagttcccccatgacctggaggtggaggacctggaggatgacatccccaggaggaagaacagagccaagggcaaggcctatggaattggaggcctgaggaagaggcaggacacagccagcctggaggaccgggacaagccctacgtgtgtgacatctgtgggaagcgctacaagaacagacctggcctgagctaccactacacccacacccacctggccgaggaggagggggaggagaatgctgagagacatgccctgcccttccacaggaagaacaaccacaagcagttctacaaggagctggcctgggtgcctgaggcccagaggaagcacacagccaagaaggccccagatggcaccgtcatccccaacggctactgtgacttctgcctgggcggcagcaagaagacaggctgcccagaagatctcatcagctgtgccgactgtggccgcagcggccaccccagctgcctgcagttcaccgtgaacatgacagctgctgtgaggacctaccgctggcagtgcatcgagtgcaagagctgcagcctgtgtggcaccagtgaaaatgatgaccagctgctcttctgtgatgactgtgaccggggctaccacatgtactgcctgagcccccccatggccgagcccccagagggctcctggagctgccacctgtgcctgcggcacctgaaggagaaggccagcgcctacatcaccctgacctag

SEQ ID NO: 276074 - DNA, 612 bp, Artificial Sequence
  derived and/or modified sequence
atggccaccgccatccagaaccccctgaagagcctgggcgaggacttctacagggaggctattgagcactgtcgcagttacaacgcacggctttgcgcggagcggagcttgcgcctcccgtttttagattcccagaccggagtcgcccagaacaactgctatatctggatggagaagacgcatagggggcccggactcgctcccggtcagatctacacttacccagctagatgttggcggaagaaaagacggctgaatattcttgaagaccccagacttcgcccatgtgagtataagatcgactgcgaagctcccctgaaaaaggaaggtggactgccggaaggtccggtccttgaggctctgctgtgcgctgaaacgggggaaaagaagattgagctcaaggaggaggaaaccatcatggactgtcaaaagcagcagttgctggagtttcctcacgaccttgaagtggaagacctggaggatgatattcctagaagaaagaaccgcgcgaagggaaaagcctacggaatcggaggactgcgtaagcgccaggataccgcctcgctggaagaccgtgataaaccctacgtgtgcgattctgagtctttttag

SEQ ID NO: 276075 - DNA, 1167 bp, Artificial Sequence
  derived and/or modified sequence
atggccaccgccatccagaaccccctgaagagcctgggcgaggacttttaccgggaggcgattgaacactgtaggtcttacaacgcccgactatgcgccgaacgctccttgagattgccgttcttggattcacagaccggcgtggcacagaataactgttatatttggatggagaagacacatcgaggcccgggcctggccccaggccagatctacacttaccccgcaagatgctggcgtaagaaaaggcggttgaacattctagaggatccccgactccggccctgtgagtacaaaatagattgcgaagctccgcttaagaaagagggaggcctcccagagggaccggtcctggaggctctcctctgtgctgagaccggcgaaaaaaagatagagctgaaggaggaggagacaattatggactgtcagaagcaacagctgttagagttcccacacgatctggaggtggaggacctcgaagatgacatccctagaagaaagaaccgggccaagggcaaggcctatggcattgggggcctgcgtaagcgtcaggacacggcttccctcgaggatcgagataagccttacgtttgtgacatttgcggcaagcgatataaaaaccggcccgggctgtcctatcattacacacacacacacctggcagaagaggagggggaggaaaatgcggaaagacacgctctgcctttccatcggaagaataatcacaagcagttctacaaggagttggcgtgggtacccgaggctcagcggaagcatactgccaaaaaggcacctgatggtactgttattcccaatggctactgtgacttttgcctgggaggtagcaagaagaccgggtgtcctgaggacttgatcagttgcgccgactgtgggaggtcgggccacccctcttgcctgcagttcaccgtcaacatgaccgcggcagtgagaacatatcgctggcagtgtatcgaatgcaaaagttgtagcttatgcggcacctcggagaatgatgatcaactcctgttttgtgatgattgtgatcgcggctatcacatgtactgcctttctccaccaatggcagagcctcccgaggggtcatggagctgtcatctctgtctgcgccacctcaaggagaaggcgagtgcttatatcaccctcacttag

SEQ ID NO: 276076 - DNA, 612 bp, Artificial Sequence
  derived and/or modified sequence
atggcgacggcaatccagaatcccctgaaaagcttaggtgaggacttttatcgggaagcgatcgagcactgtaggtcctacaatgcgagactgtgcgccgaacgaagcctcagactgccgtttttggactcacagacaggtgtagcacagaataactgttacatctggatggaaaagacccaccgaggacccggactcgcccctggacagatctacacttaccccgcaaggtgctggcgcaaaaagagacggttgaatattctggaagacccgaggttgcgaccctgcgaatataaaatcgattgtgaggcaccattaaaaaaggaggggggtctcccagagggtccagttcttgaagccctgttgtgcgcagagactggcgaaaagaagatcgaactcaaggaggaggagacaattatggattgtcagaaacagcagctgttggagttcccccacgatctcgaggtcgaggatctagaagacgacattcctcggagaaaaaacagagccaagggaaaagcttacgggattgggggtctgaggaaaagacaggacaccgcttcactcgaggatcgagacaaaccctacgtgtgcgacagcgagtcattctag

SEQ ID NO: 276077 - DNA, 1167 bp, Artificial Sequence
  derived and/or modified sequence
atggccacagctatccaaaatccgctcaagtccttgggtgaggacttttacagggaagcaattgagcattgcagatcttacaatgcacgactatgtgcagagcgctccctgcggctgcctttccttgattcgcagactggagtggcgcagaacaactgctacatctggatggaaaaaacacacagaggaccagggctcgccccaggtcaaatatacacttatccagctcggtgttggcggaagaaacggagactgaacatcttggaggaccccaggttgagaccgtgcgaatataaaattgattgtgaggctccgttgaaaaaagaaggaggattgccagaggggccagtcctggaggccttgctgtgtgcagaaacaggcgagaaaaaaatcgagcttaaggaagaggagacaattatggactgccagaaacagcaactgcttgagttcccccacgacttagaggtggaggaccttgaagacgatattcctcggcgaaagaaccgtgcgaaaggcaaggcgtacggcattgggggacttcgaaaaagacaggataccgcttctttggaggatagggataagccttacgtctgtgacatttgcggcaagcggtataagaatcgaccaggtttgtcttatcactacacccacactcacctggccgaagaggaaggggaggagaacgcagaacgccacgcgctcccatttcatagaaaaaacaatcacaaacaattctacaaggaattggcttgggttccggaagcccagaggaaacacacagccaaaaaggctcccgacgggacagtaattccaaacgggtattgcgacttctgcctaggaggctcaaagaagacaggctgtcccgaggatttaattagctgtgcagactgtggcaggagcggccacccgtcttgcctccagtttaccgtgaacatgactgctgccgtgcggacatatcgctggcagtgcatagagtgtaagtcctgtagcctgtgcgggacgtctgagaacgacgaccaactgttgttctgcgatgattgcgacagaggctatcatatgtactgtctgtcacccccaatggctgagcctcctgaagggtcatggtcttgtcatctgtgtctacgacacctgaaagagaaggcctccgcttatatcaccctcacgtag

SEQ ID NO: 276078 - DNA, 2303 bp, Artificial Sequence
  derived and/or modified sequence
gcggcagagcgggcggcgcaggccgggctgggcccgcgcgcggcggcagcggcgccccgggccggaggcggcccagccgagcgggccatggccaccgccattcagaacccgctcaagtcgcgaggacttctaccgcgaggccatcgagcactgccgcagttacaacgcgcgcctgtgcgccgagcgcagcctgcgactgcccttcctcgactcgcagaccggcgtggcccagaacaactgctacatctggatggagaagacccaccgcgggccgggtttggccccgggacagatttacacgtaccccgcccgctgttggaggaagaaacggagactcaacatcctggaggaccccagactcaggccctgcgagtacaagatcgactgtgaagcacccctgaagaaggagggtggcctcccggaagggccggtcctcgaggctctactgtgtgcagagacgggggagaagaagattgagctgaaggaggaggagaccattatggactgtcagaaacagcagttgctggagtttccgcatgacctcgaggtggaagacttggaggatgacattcccaggaggaagaacagggccaaaggaaaggcatatggcatcgggggtctccggaaacgccaggacaccgcttccctggaggaccgagacaagccgtatgtctgtgatatctgtgggaaacggtataagaaccggccggggctcagctaccactacacccacacccacctggccgaggaggagggggaggagaacgccgaacgccacgccctgcccttccaccggaaaaacaaccataaacagttttacaaagaattggcctgggtccctgaggcacaaaggaaacacacagccaagaaggcgcccgacggcactgtcatccccaacggctactgtgacttctgcctggggggctccaagaagacggggtgtcccgaggacctcatctcctgtgcggactgtgggcgatcaggacacccctcgtgtttacaattcacggtgaacatgacggcagccgtgcggacctaccgctggcagtgcatcgagtgcaaatcctgcagcctgtgcggaacctccgagaacgacgaccagctgctgttttgtgatgactgcgatcggggttaccacatgtactgcctgagtccccccatggcggagcccccggaagggagctggagctgtcacctctgtctccggcacctgaaggaaaaggcttctgcttacatcaccctcacctaggccggctcggctcgccgcgactctggggtggtgctcgcctacctgcctctccgagctcctcaattctcccccaccctgaacatcccgcagggggagggggagagggggaagccgagagggggctgggccaccccctcccctctgtgcaagtggaatgtctgccctgtgggtgggtgggcccggccagggcctctccctccctccctccctctctgtcccttggcaaatggacaccaggggcttctcccctcaaagccataccccgcctctgggcgggcatggggggtggtgggtgccagccaggggcatggacagagcctttttctaaagaaaaagacaaaaagttaaaaaaaaaaaaaagaagaaaagaaaagaagttaatatatacaaagagtcctccaaggcctggctgggtggaggggcgctgctgagagtgtccaccgggcacccgcctctgccggccccccgccgggcgccccaaccccaatttctggagctgcagccgtcccgcgccccacccaaggtgggcgccttcccctcttgtgcccagggcggtgggcgtggtgtccacccgcccctcctggtgcccacggtggatactgcatgatgtgaaccttggttttgaactctgttcctgcccctccccgaccgccccagcctgtgcccgccccgtgcctgccgtggctggtgggtggcggtggtggggccgggtgggcccccgcccagcgcctgctggaatgagaagcacagactccgccacggactccttttctctccctcctcccgccccgccaggcctggcggcccccgcccccctcgctggccattttgggggagtgagggggcgtggttgtttcttgtggttgtgtgtgtttgttgttcgggttttaaaaaagggaaactgagactgcaggtgggggaggtggtgggttttggggggatgtcccctaatccaggagtgccccctcacttgtcaccgagtctcctctattgcctgcctctgctgtgaattaacttgttctgtgtattaaactgggcctgacccctctgccca

SEQ ID NO: 276079 - DNA, 1084 bp, Artificial Sequence
  derived and/or modified sequence
gaatgaaatcgtagcgcgctgggcggcagagcgggcggcagcggcgccccgggccggaggcggcccagccgagcgggccatggccaccgccattcagaacccgctcaagtccctaggcgaggacttctaccgcgaggccatcgagcactgccgcagttacaacgcgcgcctgtgcgccgagcgcagcctgcgactgcccttcctcgactcgcagaccggcgtggcccagaacaactgctacatctggatggagaagacccaccgcgggccgggtttggccccgggacagatttacacgtaccccgcccgctgttggaggaagaaacggagactcaacatcctggaggaccccagactcaggccctgcgagtacaagatcgactgtgaagcacccctgaagaaggagggtggcctcccggaagggccggtcctcgaggctctactgtgtgcagagacgggggagaagaagattgagctgaaggaggaggagaccattatggactgtcagaaacagcagttgctggagtttccgcatgacctcgaggtggaagacttggaggatgacattcccaggaggaagaacagggccaaaggaaaggcatatggcatcgggggtctccggaaacgccaggacaccgcttccctggaggaccgagacaagccgtatgtctgtgatagtgagtccttctgaagagggggaaaggcagagagaggggtgcccagagactccccacctcgtggccctctccctcccgttccagacccgggttgggaggctgctcaggtctctggctgaggggggaggtgtgatcctggaggccagggtggaggcggcaggggcccggaggggctgacaggccctcctggctcgctcgctccccagtctgtgggaaacggtataagaaccggccggggctcagctaccactacacccacacccacctggccgaggaggagggggaggagaacgccgaacgccacgccctgcccttccaccggaaaaacaaccataaacgtgagctggcaggccaggtgggggtggccaggggccctgggagtggggaagaggagcccagctgggggt

SEQ ID NO: 276080 - DNA, 1562 bp, Artificial Sequence
  derived and/or modified sequence
gcggcagagcgggcggcgcaggccgggctgggcccgcgcgcggcggcagcggcgccccgggccggaggcggcccagccgagcgggccatggccaccgccattcagaacccgctcaagtccctaggcgaggacttctaccgcgaggccatcgagcactgccgcagttacaacgcgcgcctgtgcgccgagcgcagcctgcgactgcccttcctcgactcgcagaccggcgtggcccagaacaactgctacatctggatggagaagacccaccgcgggccgggtttggccccgggacagatttacacgtaccccgcccgctgttggaggaagaaacggagactcaacatcctggaggaccccagactcaggccctgcgagtacaagatcgactgtgaagcacccctgaagaaggagggtggcctcccggaagggccggtcctcgaggctctactgtgtgcagagacgggggagaagaagattgagctgaaggaggaggagaccattatggactgtcagaaacagcagttgctggagtttccgcatgacctcgaggtggaagacttggaggatgacattcccaggaggaagaacagggccaaaggaaaggcatatggcatcgggggtctccggaaacgccaggacaccgcttccctggaggaccgagacaagccgtatgtctgtgatatctgtgggaaacggtataagaaccggccggggctcagctaccactacacccacacccacctggccgaggaggagggggaggagaacgccgaacgccacgccctgcccttccaccggaaaaacaaccataaacagttttacaaagaattggcctgggtccctgaggcacaaaggaaacacacagccaagaaggcgcccgacggcactgtcatccccaacggctactgtgacttctgcctggggggctccaagaagacggggtgtcccgaggacctcatctcctgtgcggactgtgggcgatcaggacacccctcgtgtttacaattcacggtgaacatgacggcagccgtgcggacctaccgctggcagtgcatcgagtgcaaatcctgcagcctgtgcggaacctccgagaacgacgaccagctgctgttttgtgatgactgcgatcggggttaccacatgtactgcctgagtccccccatggcggagcccccggaagggagctggagctgtcacctctgtctccggcacctgaaggaaaaggcttctgcttacatcaccctcacctaggccggctcggctcgccgcgactctggggtggtgctcgcctacctgcctctccgagctcctcaattctcccccaccctgaacatcccgcagggggagggggagagggggaagccgagagggggctgggccaccccctcccctctgtgcaagtggaatgtctgccctgtgggtgggtgggcccggccagggcctctccctccctccctccctctctgtcccttggcaaatggacaccaggggcttctcccctcaaagccataccccgcctctgggcgggcatggggggtggtgggtgccagccaggggca

SEQ ID NO: 276081 - DNA, 612 bp, Artificial Sequence
  derived and/or modified sequence
atggccaccgccatccagaaccccctgaagagcctgggcgaggacttctacagagaggccatcgagcactgcagaagctacaacgccagactgtgcgccgagagaagcctgagactgcccttcctggacagccagaccggcgtggcccagaacaactgctacatctggatggagaagacccacagaggccccggcctggcccccggccagatctacacctaccccgccagatgctggagaaagaagagaagactgaacatcctggaggaccccagactgagaccctgcgagtacaagatcgactgcgaggcccccctgaagaaggagggcggcctgcccgagggccccgtgctggaggccctgctgtgcgccgagaccggcgagaagaagatcgagctgaaggaggaggagaccatcatggactgccagaagcagcagctgctggagttcccccacgacctggaggtggaggacctggaggacgacatccccagaagaaagaacagagccaagggcaaggcctacggcatcggcggcctgagaaagagacaggacaccgccagcctggaggacagagacaagccctacgtgtgcgacagcgagagcttctag

SEQ ID NO: 276082 - DNA, 1167 bp, Artificial Sequence
  derived and/or modified sequence
atggccaccgccatccagaaccccctgaagagcctgggcgaggacttctacagagaggccatcgagcactgcagaagctacaacgccagactgtgcgccgagagaagcctgagactgcccttcctggacagccagaccggcgtggcccagaacaactgctacatctggatggagaagacccacagaggccccggcctggcccccggccagatctacacctaccccgccagatgctggagaaagaagagaagactgaacatcctggaggaccccagactgagaccctgcgagtacaagatcgactgcgaggcccccctgaagaaggagggcggcctgcccgagggccccgtgctggaggccctgctgtgcgccgagaccggcgagaagaagatcgagctgaaggaggaggagaccatcatggactgccagaagcagcagctgctggagttcccccacgacctggaggtggaggacctggaggacgacatccccagaagaaagaacagagccaagggcaaggcctacggcatcggcggcctgagaaagagacaggacaccgccagcctggaggacagagacaagccctacgtgtgcgacatctgcggcaagagatacaagaacagacccggcctgagctaccactacacccacacccacctggccgaggaggagggcgaggagaacgccgagagacacgccctgcccttccacagaaagaacaaccacaagcagttctacaaggagctggcctgggtgcccgaggcccagagaaagcacaccgccaagaaggcccccgacggcaccgtgatccccaacggctactgcgacttctgcctgggcggcagcaagaagaccggctgccccgaggacctgatcagctgcgccgactgcggcagaagcggccaccccagctgcctgcagttcaccgtgaacatgaccgccgccgtgagaacctacagatggcagtgcatcgagtgcaagagctgcagcctgtgcggcaccagcgagaacgacgaccagctgctgttctgcgacgactgcgacagaggctaccacatgtactgcctgagcccccccatggccgagccccccgagggcagctggagctgccacctgtgcctgagacacctgaaggagaaggccagcgcctacatcaccctgacctag

SEQ ID NO: 276083 - DNA, 1422 bp, Artificial Sequence
  derived and/or modified sequence
atgcgctccctgccctcaaatggtgaactggatcccgatgtgctagagagcatggcttcccttgggtgttttagggacagagagagactgcaccgcgaattacggtcggaggaagaaaatcaagagaagatgatctactaccttttgctcgatcgcaaggagaggtacccatcttgcgaagaccaagacctccccccaagaaatgacgttgaccctcctagaaagagggtagattcgcccatgctcagtaggcacggaaagcgacgccctgagaggaaaagtatggaagtactgtcaatcaccgatgccggcgggggcggcagtcccgtgcctacgaggagagcactggagatggcacaacactcacagagatcgcgcagtgtcagtggcgcctccacagggctaagctcctctcctttgtcttcccccaggtcccctgttttctcattcagcccagagcctggtgctggggatgaggcgcgcggtggtgggtctcccacatcgaaaacacagaccctgcctagtcggggaccgagggggggaggggccggtgagcagccgcctcctccttcagcgcggagcactcccttacccggacctccagggagccctagaagcagcggtggaacccccctgcactcgccgctgcacactccacgtgcctcccctacagggactccaggaacaaccccacccccgagccccggggggggggtcggcggcgctgcatggcgaagccggctgaactcgatcagaaattcgttcctcgggtcccccaggttccacagacgaaaaatgcaggtaccgacagcagaagagatgagctctttgacccctgaaagcagcccagaactggccaagcgaagttggttcgggaacttcatatctctggataaagaagagcagatctttctggtgctgaaggataagcccctgtcttctattaaagccgacattgtccacgccttcttgtccatcccgtctctgtcgcacagtgtgctctctcaaacgtcttttagggctgagtataaagccagcgggggccccagcgtttttcaaaaacccgtgcgattccaagtagatattagcagctccgaagggcccgagccgtcgccaaggcgggatggaagcgggggcggcggcatctactctgtgacctttactctgatatccggcccctcaagacggttcaagcgagttgtggagaccatccaggctcaactcctcagtacccacgatcaaccttccgtgcaggcgctcgctgacgagaagaacggcgcccagacccgcccagcaggggctccccccagatctcttcaacctcctcccggaagacccgatcccgaactcagcagcagccctcgcagagggccccccaaagataagaaactgttggccaccaatggaaccccccttccttag

SEQ ID NO: 276084 - DNA, 1422 bp, Artificial Sequence
  derived and/or modified sequence
atgaggtcattaccaagtaacggcgagctggatcccgacgttctggagagcatggcctcactggggtgcttcagagacagagagcggttacaccgggagttgcgtagcgaagaggaaaatcaggaaaaaatgatttattacctcctactggacagaaaggagcgctacccttcgtgtgaggatcaggatcttcctccccgtaatgacgtggacccccccaggaaacgcgtggactctccgatgttgagtaggcacggaaagagacgtcctgaacgaaaatccatggaggtcctgagtatcacagatgccgggggcgggggttcaccagtgccaacaagacgcgccttggaaatggcacagcactctcagcgctccaggtctgtatccggagcttcaaccggcttatctagctccccgctgtcgtccccaagaagtcccgtgtttagtttttcaccggaacccggggccggcgacgaagccaggggcggcgggagtcccacttccaagacgcagactcttccaagccgcggccccaggggtgggggagcaggggagcagccacctccgcctagtgccaggagcacgcctctacccgggccgccagggagtccacggtctagcggagggaccccactgcacagtccattgcatactcctagagcctctcccactggtactccagggactacaccccctccctcacccggaggcggagttggaggcgcagcttggcgttcccgcttgaacagtattaggaatagcttccttgggtcccctcgctttcacagacgaaagatgcaggtgccaacggctgaagaaatgtcgtcccttaccccagaaagttctcctgagttggcaaagaggtcctggttcgggaactttatcagccttgataaggaggaacagatattcctcgtcctgaaggataagccgttatcctccatcaaagccgacatcgttcatgcctttctgtctatcccttctctttcgcactccgtgctgagccagactagctttagagcagagtacaaagcctctggaggaccatcagtatttcaaaaaccagttcgtttccaggttgatatcagtagctctgaagggcccgagccttcaccacggagagacggctctgggggcggaggaatctactccgttacgttcactctgattagcggaccttcgcggcggttcaaaagggttgtcgagaccattcaagcacagctgttgtcaacgcacgaccagccttcagtgcaggctcttgctgacgaaaaaaatggggcacaaactagacccgcaggtgccccaccgcgaagcttgcaacctccccccggaagaccagatccagagctgagctcttcccctcgtcgagggccccctaaggacaagaaactgctggccaccaacggcactccccttccctag

SEQ ID NO: 276085 - DNA, 1422 bp, Artificial Sequence
  derived and/or modified sequence
atgaggagcctgcccagcaatggagagctggaccctgatgtgctggagagcatggccagcctgggctgcttccgggaccgggagcggctgcaccgggagctgcggtctgaggaggagaaccaggagaagatgatctactacctgctgctggacaggaaggagcgctaccccagctgtgaggaccaggacctgcccccaagaaatgatgtggacccccccaggaagagggtggacagccccatgctgagcagacatggcaagaggaggcctgagaggaagtccatggaggtgctgagcatcacagatgctgggggcggcggcagccctgtgcccacccggcgggccctggagatggcccagcacagccagaggagccgctctgtgtctggggccagcacaggcctgagcagcagccccctgagcagccccaggagccctgtgttctccttcagccctgagcccggggctggagatgaggcccggggcggcggcagccccaccagcaagacccagaccctgcccagccggggcccccggggcggcggggccggggagcagcccccacctccttctgcccggagcacccccctgcccggccccccaggcagccccaggagcagcggcggcacccccctgcacagccccctgcacaccccccgggccagccccaccggcaccccaggcaccaccccaccacccagccctgggggcggcgtgggcggggccgcctggaggagccggctgaacagcatccggaacagcttcctgggcagcccccgcttccacaggaggaagatgcaggtgcccacagctgaggagatgagcagcctgaccccagagagcagccctgagctggccaagaggtcctggtttggaaacttcatcagcctggacaaggaggagcagatcttcctggtgctgaaggacaagcccctgagcagcatcaaggctgacatcgtgcacgccttcctgagcatccccagcctgagccacagcgtgctgagccagaccagcttccgggcagagtacaaggccagcggcggccccagcgtcttccagaagcctgtgcgcttccaggtggacatcagcagcagcgagggccctgagcccagccccaggagagatggcagcggcggcggcggcatctacagcgtgaccttcaccctcatcagcggccccagccgccgcttcaagagggtggtggagaccatccaggcccagctgctgagcacccatgaccagcccagcgtgcaggccctggctgatgagaagaatggagcccagaccaggcctgctggggccccacccaggagcctgcagcccccacctggccgcccagaccctgagctgagcagcagcccccggcggggcccccccaaggacaagaagctgctggccaccaacggcacccccctgccctag

SEQ ID NO: 276086 - DNA, 1422 bp, Artificial Sequence
  derived and/or modified sequence
atgcggagcctgcccagcaacggcgagctggaccccgacgtgctggaaagcatggcttccctgggatgctttcgtgacagagagcgcctacatagagaactgagaagcgaggaagaaaatcaagaaaagatgatttattatttgctcttggacagaaaggagaggtatcccagctgcgaggaccaggatctgccaccacggaacgatgtcgatccacctcggaagagagtggattccccgatgctcagccgccacggtaaaaggcggcccgagcgaaaaagcatggaggtattgtccataacggacgccggcggaggaggttctcccgtgcccacgcgaagagccctggaaatggcgcaacactctcagaggagtagatccgtatctggtgcatccacaggccttagctcgagcccgctcagtagtccacgctcccccgtgtttagtttttcccccgagcctggagccggcgacgaagcacggggcggaggctccccgacctctaagacacagacccttccatcacgcggcccacgaggggggggtgcaggcgaacagccccctccaccttctgccaggtcaactccactgcccggtccccctggttcaccccgaagctcagggggtacccctttacacagtcctctacacaccccccgagcgtctcccaccggtactcccgggactacgccacctccttctccaggtggcggcgttgggggcgctgcatggcgctccaggttgaattcaatccgcaactcgtttcttggcagtcctcgtttccacagacggaaaatgcaggtgccaaccgctgaagaaatgagttcactgaccccagagtcatcacctgaacttgccaaaaggagttggtttggaaactttatctctctggacaaagaagaacagatttttctggttctgaaggataaacccctgtcttcaattaaggccgatattgtacacgccttcctgagcatccctagcctttcacatagtgttctgtctcagacaagtttcagagctgaatacaaggccagcggcggccccagtgtgtttcagaaaccggtgcgctttcaggtcgacatctccagctcagaaggtcccgaacctagcccccgacgagacgggagcgggggcggtggaatctactctgttacttttacactcattagtggaccatcccgccggtttaaacgagtggtagagacaattcaagcccagttgctcagtactcacgaccagcctagcgtgcaggctctggccgacgagaaaaatggtgcacagactcgacctgcaggcgcgcccccgcgatcactgcagccaccccctggcaggcctgatccggagctaagcagctctcctaggaggggacctccaaaggacaaaaaactgctggcaacgaatggtacaccgctaccgtag

SEQ ID NO: 276087 - DNA, 1422 bp, Artificial Sequence
  derived and/or modified sequence
atgcggagcctgcccagcaacggcgagctggaccccgacgtgctggagagcatggcgtcgctcgggtgttttcgtgaccgggagcgcctgcaccgtgaactcaggtccgaagaagaaaatcaagagaaaatgatctactatctgttactcgataggaaagagagataccctagttgcgaagatcaggacctgccacccagaaacgatgtggacccgccacgtaagagggtcgactcccctatgctaagccgacacggaaagagacgccccgaacggaagagcatggaggtcctcagcattacagacgctggtgggggcggttcgcccgtgcccacacgtagagctctggagatggcccagcacagtcaacggtcacgaagcgtgagtggagcctcaacggggcttagctcgtctccactgtcctcccctagatcacctgtcttctctttctctcctgaacctggcgctggtgatgaggcacggggcggcggttcccccacatccaagactcagactttacctagccgagggcccaggggaggcggtgccggagaacaaccgcctcccccttcagctcggagtacccccctgcccggccccccaggcagtcctagaagcagtggcggtacgccactgcacagccccctgcacactccccgagcctcccctaccggaactcccggaacaactcctcctcctagcccagggggcggtgtgggcggggctgcatggcggtcgcggttgaattctatccggaatagctttctgggctcccctcgattccaccgcaggaagatgcaagtgcccacagcagaggagatgtcttccctgactccagagtcttcacccgaactggccaagaggagctggtttggaaattttattagcctcgataaagaagagcagatttttttggtactcaaagataagccattgagctccatcaaggcagatattgtacatgcttttctgagtatcccatctctgtcccatagcgtgctgtctcaaacttcatttcgtgctgaatataaggcatcaggtggtccgtcagtttttcagaagccagtgaggtttcaagtcgacatttcttcctcagaaggacccgagccttcacctcgcagggacggctcggggggaggtggcatttattctgtgaccttcacactcatcagcggtccctcccggcgattcaaacgggtggtggagaccattcaggcccaactgctctctactcacgatcaacccagcgttcaggctcttgccgacgagaagaacggcgcgcagacaaggccagcgggtgcccccccacgcagtcttcagccaccacctggtcggccagacccggaattatcatcctctccaagaagaggtcctcccaaggacaaaaaattgctggccaccaacggaacccctctcccctag

SEQ ID NO: 276088 - DNA, 1422 bp, Artificial Sequence
  derived and/or modified sequence
atgcgctcattaccctccaatggtgaactggacccagacgtccttgagagtatggctagcttagggtgttttcgtgaccgcgaaaggctccacagagagctgagatccgaagaggagaatcaagaaaagatgatttactatctgctgctggaccggaaagagcggtacccctcgtgtgaagaccaggatctcccacctcgcaatgacgtcgatccaccacgaaaacgcgtggattctccaatgctgagccgtcatgggaagcgcaggccagagcggaagagcatggaagtgctgtccattaccgacgcgggtggtggagggagtccagtgccaacgagacgcgctctggaaatggctcaacactctcaaaggtccaggtccgtcagtggcgctagcactgggctcagctcaagcccactgagtagtccccgatctccagtgttttcctttagcccggagcccggagccggagacgaggcgagaggtggaggtagccctacaagtaagacccagacactgccttcccggggtcccagaggcggaggtgcaggcgagcagccccctcctcctagcgccaggagcacccccctccccggaccaccgggttctccacgcagctcaggtggtactcccttacattcgcccctgcatactcccagggcctcacccactggaacaccaggaacaacaccgccaccctcacctggcggaggcgtggggggagcagcttggagatctcggctgaatagtatccgcaatagctttctgggaagtccgagattccatagaaggaagatgcaagttccaaccgccgaagaaatgagcagcctcactcccgagagctcacctgagctagccaagcggtcctggttcggtaacttcatctcccttgataaggaagagcagatattccttgtgctcaaagacaaacccctatctagcattaaggcagacatcgtgcacgccttcttgtctatacctagcctcagccatagtgtgctgagccaaacaagttttcgggctgaatataaggcgagtggaggtccaagtgtctttcagaagccagtgcgcttccaggtagacatttcttctagcgagggaccagaaccaagcccacgcagggacggatctggcggtgggggtatttatagcgtcaccttcaccctcatttccggcccatctcggaggtttaaaagggtggtagagactattcaagcacagttactgagcacccacgaccagcccagtgtccaagccctggccgatgaaaagaacggcgctcagacccggccagctggagccccaccgagatctcttcagccgcctcccggtcggcctgaccctgaactctcttccagccccaggcgcggtcccccaaaagacaaaaagttgctggccactaatgggacccccttgccatag

SEQ ID NO: 276089 - DNA, 1422 bp, Artificial Sequence
  derived and/or modified sequence
atgaggtccctgcccagtaatggcgagctggacccagatgtgcttgagtcaatggcctcactgggatgttttcgagacagggagcggctccatagggaactgcgatctgaggaagaaaatcaggaaaagatgatttattatctcttgttggatcgtaaagaacggtacccctcctgcgaggaccaggatttgccccctcgcaatgatgtggacccccctaggaaacgcgttgatagcccaatgctgtcccggcatgggaagaggagacccgaaagaaaaagcatggaggtcttgtcaatcacagacgccggaggcggagggagcccggtccctacgcgcagggcgcttgaaatggcccaacattctcagagatcccggtctgtgtctggcgcatcaaccggcctgtccagttcgccactgagcagccctagaagtccagtcttcagcttttcccccgagccaggagcgggtgatgaggcccgaggcggaggcagtcccacttccaagacacagactttaccctcacggggtcctagggggggaggcgcaggggaacagcctcccccaccctcagcccgttccacgcctctccctggccctccgggatctcctagatccagcgggggaacccccctgcactcaccactgcatacgccacgagcatcacccaccggaaccccaggtacgacacctccacccagcccaggcggtggtgttgggggagcagcctggagaagtagactcaactcaattagaaacagtttcctcgggtcgcctcgctttcaccgccgtaagatgcaggtcccgaccgccgaagaaatgtcatcactaacccccgagtcctctccggagctcgccaaaaggagctggttcggtaattttattagcctcgacaaagaggaacagatctttctggtactgaaagacaagcctttatccagcatcaaagcagacattgtacatgccttcctatccattccaagcctaagtcatagcgtcctctcccaaacgtctttcagagctgaatacaaagccagcggcggaccttccgttttccagaagcccgttcggttccaggtggacatatcgagtagtgagggccctgaaccgtcaccacggagagatggttctgggggtggaggcatctatagtgtcacattcaccctcatcagcggtccgagcagacgatttaagagggtggtggagactatacaggctcagctcctttctacccatgaccaaccaagcgtccaggcccttgccgatgaaaaaaatggggctcaaacaagacccgcaggtgcgcctcctaggtctttgcaaccacctccaggaaggccagaccctgagttgtcgagcagcccgagaaggggtccccctaaggataagaaattgctcgccactaatgggacaccattgccttag

SEQ ID NO: 276090 - DNA, 2095 bp, Artificial Sequence
  derived and/or modified sequence
agcggctgggaggggtgggatgccagggttcctgagaggcaacgggctagggactcggacttatgggtcctgggggaagaggacacagctagagaaggagtctaggggtcagaggcaggaggggctaagctaggagtccaggactcccagaggcgggaaacacgagccagacccgtgcctggagccagcccctggccgccgggtagccatgcggagcctgccatccaacggagagctggaccccgacgtcctagagagcatggcatcactgggctgcttcagggaccgcgagaggctgcatcgcgagctgcgcagtgaggaggagaaccaagaaaagatgatatattatctgcttttggatcggaaggagcggtatcccagctgtgaggaccaggacctgcctccccggaatgatgttgaccccccccggaagcgtgtggattctcccatgctgagccgtcacgggaagcggcgaccagagcggaagtccatggaagtcctgagcatcaccgatgccgggggtggtggctcccctgtacccacccgacgggccttggagatggcccagcacagccagagatcccgtagcgtcagtggagcctccacgggtctgtcctccagccctctaagcagcccaaggagtccggtcttttccttttcaccggagccgggggctggagatgaggctcgaggcgggggctccccgacttccaaaacgcagacgctgccttctcggggccccaggggtgggggcgccggggagcagcccccgccccccagtgcccgctccacacccctgcccggccccccaggctccccgcgctcctctggcgggacccccttgcactcgcctctgcacacgccccgggccagtcccaccgggaccccggggacaacaccaccccccagccccggcggtggcgtcgggggagccgcctggaggagtcgtctcaactccatccgcaacagcttcctgggctcccctcgctttcaccggcgcaagatgcaggtccctaccgctgaggagatgtccagcttgacgccagagtcctccccggagctggcaaaacgctcctggttcgggaacttcatctccttggacaaagaagaacaaatattcctcgtgctaaaggacaaacctctcagcagcatcaaagcagacatcgtccatgcctttctgtcgatccccagcctgagtcacagtgtgctgtcacagaccagcttcagggccgagtacaaggccagtggcggcccctccgtcttccaaaagcccgtccgcttccaggtggacatcagctcctctgagggtccagagccctccccgcgacgggacggcagcggaggtggtggcatctactccgtcaccttcactctcatctcgggtcccagccgtcggttcaagcgagtggtggagaccatccaggcacagctcctgagcactcatgaccagccctccgtgcaggccctggcagacgagaagaacggggcccagacccggcctgctggtgccccaccccgaagcctgcagcccccacccggccgcccagacccagagctgagcagctctccccgccgaggcccccccaaggacaagaagctcctggccaccaacgggacccctctgccctgaccccacggggccggggagggaggggacccccctccaccccccttccgtgccccccaactgtgaatctgtaaataaggcccaaggaacatgtcgggaggggggtggacacaaaaaccggccttgccctgcagggatggggctccacaggccgtgcccaactgggggtggttctaggggaacagggggcgggggagctgtttctattttatttattgattaatttattattttatttattgatcaatctctctgcggggtggggtgggggagggacgggagctggttggggtggcttagcagatccggacagggccctctgtccctgtgtcgtccccaaccccctcttcccgggcccctcctcccctggtcctccccccacgaccttctgtacggatttgctctccggaaggaattctggtttcgcgtgatcctgcctgcgtccgtgtctctgattccgccggcggc

SEQ ID NO: 276091 - DNA, 1902 bp, Artificial Sequence
  derived and/or modified sequence
agtctttcattgcgcgcctacatgtgcctacgacctcacttctgcttctctacgactcaccaccctcacagctggagcaaattcagaaacatccttggtacctaggcgggaaacacgagccagacccgtgcctggagccagcccctggccgccgggtagccatgcggagcctgccatccaacggagagctggaccccgacgtcctagagagcatggcatcactgggctgcttcagggaccgcgagaggctgcatcgcgagctgcgcagtgaggaggagaaccaagaaaagatgatatattatctgcttttggatcggaaggagcggtatcccagctgtgaggaccaggacctgcctccccggaatgatgttgaccccccccggaagcgtgtggattctcccatgctgagccgtcacgggaagcggcgaccagagcggaagtccatggaagtcctgagcatcaccgatgccgggggtggtggctcccctgtacccacccgacgggccttggagatggcccagcacagccagagatcccgtagcgtcagtggagcctccacgggtctgtcctccagccctctaagcagcccaaggagtccggtcttttccttttcaccggagccgggggctggagatgaggctcgaggcgggggctccccgacttccaaaacgcagacgctgccttctcggggccccaggggtgggggcgccggggagcagcccccgccccccagtgcccgctccacacccctgcccggccccccaggctccccgcgctcctctggcgggacccccttgcactcgcctctgcacacgccccgggccagtcccaccgggaccccggggacaacaccaccccccagccccggcggtggcgtcgggggagccgcctggaggagtcgtctcaactccatccgcaacagcttcctgggctcccctcgctttcaccggcgcaagatgcaggtccctaccgctgaggagatgtccagcttgacgccagagtcctccccggagctggcaaaacgctcctggttcgggaacttcatctccttggacaaagaagaacaaatattcctcgtgctaaaggacaaacctctcagcagcatcaaagcagacatcgtccatgcctttctgtcgatccccagcctgagtcacagtgtgctgtcacagaccagcttcagggccgagtacaaggccagtggcggcccctccgtcttccaaaagcccgtccgcttccaggtggacatcagctcctctgagggtccagagccctccccgcgacgggacggcagcggaggtggtggcatctactccgtcaccttcactctcatctcgggtcccagccgtcggttcaagcgagtggtggagaccatccaggcacagctcctgagcactcatgaccagccctccgtgcaggccctggcagacgagaagaacggggcccagacccggcctgctggtgccccaccccgaagcctgcagcccccacccggccgcccagacccagagctgagcagctctccccgccgaggcccccccaaggacaagaagctcctggccaccaacgggacccctctgccctgaccccacggggccggggagggaggggacccccctccaccccccttccgtgccccccaactgtgaatctgtaaataaggcccaaggaacatgtcgggaggggggtggacacaaaaaccggccttgccctgcagggatggggctccacaggccgtgcccaactgggggtggttctaggggaacagggggcgggggagctgtttctattttatttattgattaatttattattttatttattgatcaatctctcctcccctggtcctccccccacgaccttctgtacggatttgctctccggaaggaattctggtttcgcgtg

SEQ ID NO: 276092 - DNA, 1422 bp, Artificial Sequence
  derived and/or modified sequence
atgagaagcctgcccagcaacggcgagctggaccccgacgtgctggagagcatggccagcctgggctgcttcagagacagagagagactgcacagagagctgagaagcgaggaggagaaccaggagaagatgatctactacctgctgctggacagaaaggagagataccccagctgcgaggaccaggacctgccccccagaaacgacgtggacccccccagaaagagagtggacagccccatgctgagcagacacggcaagagaagacccgagagaaagagcatggaggtgctgagcatcaccgacgccggcggcggcggcagccccgtgcccaccagaagagccctggagatggcccagcacagccagagaagcagaagcgtgagcggcgccagcaccggcctgagcagcagccccctgagcagccccagaagccccgtgttcagcttcagccccgagcccggcgccggcgacgaggccagaggcggcggcagccccaccagcaagacccagaccctgcccagcagaggccccagaggcggcggcgccggcgagcagccccccccccccagcgccagaagcacccccctgcccggcccccccggcagccccagaagcagcggcggcacccccctgcacagccccctgcacacccccagagccagccccaccggcacccccggcaccacccccccccccagccccggcggcggcgtgggcggcgccgcctggagaagcagactgaacagcatcagaaacagcttcctgggcagccccagattccacagaagaaagatgcaggtgcccaccgccgaggagatgagcagcctgacccccgagagcagccccgagctggccaagagaagctggttcggcaacttcatcagcctggacaaggaggagcagatcttcctggtgctgaaggacaagcccctgagcagcatcaaggccgacatcgtgcacgccttcctgagcatccccagcctgagccacagcgtgctgagccagaccagcttcagagccgagtacaaggccagcggcggccccagcgtgttccagaagcccgtgagattccaggtggacatcagcagcagcgagggccccgagcccagccccagaagagacggcagcggcggcggcggcatctacagcgtgaccttcaccctgatcagcggccccagcagaagattcaagagagtggtggagaccatccaggcccagctgctgagcacccacgaccagcccagcgtgcaggccctggccgacgagaagaacggcgcccagaccagacccgccggcgccccccccagaagcctgcagcccccccccggcagacccgaccccgagctgagcagcagccccagaagaggcccccccaaggacaagaagctgctggccaccaacggcacccccctgccctag

SEQ ID NO: 276093 - protein, 495 aa, Artificial Sequence
  derived and/or modified sequence
MWRGCARSRKRKKVDNDYNALRERLSTLPDKLSYNIMVPFGPFAFMPGKLVHTNEVTVLLGDNWFAKCSAKQAVGLVEHRKEHVRKTIDDLKKVMKNFESRVEFTEDLQKMSDAAGDIVDIREEIKCDFEFKAKHRIAHKPHSKPKTSDIFEADIANDVKSKDLLADKELWARLEELERQEELLGELDSKPDTVIANGEDTTSSEEEKEDRNTNVNAMHQVTDSHTPCHKDVASSEPFSGQVNSQLNCSVNGSSSYHSDDDDDDDDDDDDDNIDDDDGDNDHEALGVGDNSIPTIYFSHTVEPKRVRINTGKNTTLKFSEKKEEAKRKRKNSTGSGHSAQELPTIRTPADIYRAFVDVVNGEYVPRKSILKSRSRENSVCSDTSESSAAEFDDRRGVLRSISCEEATCSDTSESILEEEPQENQKKLLPLSVTPEAFSGTVIEKEFVSPSLTPPPAIAHPALPTIPERKEVLLEASEETGKRVSKFKAARLQQKD

SEQ ID NO: 276094 - protein, 459 aa, Artificial Sequence
  derived and/or modified sequence
MVPFGPFAFMPGKLVHTNEVTVLLGDNWFAKCSAKQAVGLVEHRKEHVRKTIDDLKKVMKNFESRVEFTEDLQKMSDAAGDIVDIREEIKCDFEFKAKHRIAHKPHSKPKTSDIFEADIANDVKSKDLLADKELWARLEELERQEELLGELDSKPDTVIANGEDTTSSEEEKEDRNTNVNAMHQVTDSHTPCHKDVASSEPFSGQVNSQLNCSVNGSSSYHSDDDDDDDDDDDDDNIDDDDGDNDHEALGVGDNSIPTIYFSHTVEPKRVRINTGKNTTLKFSEKKEEAKRKRKNSTGSGHSAQELPTIRTPADIYRAFVDVVNGEYVPRKSILKSRSRENSVCSDTSESSAAEFDDRRGVLRSISCEEATCSDTSESILEEEPQENQKKLLPLSVTPEAFSGTVIEKEFVSPSLTPPPAIAHPALPTIPERKEVLLEASEETGKRVSKFKAARLQQKD

SEQ ID NO: 276095 - DNA, 509 bp, Artificial Sequence
  derived and/or modified sequence
gtcttcactcagaactcacaccttgcaaatcatcaaaggactcacaccggagagaaaccttaccgatgcaatgagtgtgggaaagccttcagtgttcgttcaagcctaaccacccatcaggcaatccatactgggaaaaaaccttacaaatgtaatgaatgtggcaaggtctttactcaaaatgctcacctggcaaatcaccgaagaattcatactggggagaaaccttacaggtgtacagagtgtgggaaagcctttagggtaagatcaagtctaactacccatatggcaatccacactggagaaaagcgttacaaatgtaatgagtgtggcaaggtcttcaggcagagttcaaatcttgcaagtcatcacagaatgcataccggagagaaaccttacaagtgtaatgagtgtggaaaagcctttagaggacattcaaacctaactacccatagagtgccatccctgagagaccagaccgctccccaatactctcctaaaataaacat

SEQ ID NO: 276096 - protein, 675 aa, Artificial Sequence
  derived and/or modified sequence
EPGSGSRDPGPGIAEPDLGRPAGHLRADTSPAEPREMEDFARGAASPGPSRPGLVPVSIIGAEDEDFENELETNSEEQNSQFQSLEQVKRRPAHLMALLQHVALQFEPGPLLCCLHADMLGSLGPKEAKKAFLDFYHSFLEKTAVLRVPVPPNVAFELDRTRADLISEDVQRRFVQEVVQSQQVAVGRQLEDFRSKRLMGMTPWEQELAQLEAWVGRDRASYEARERHVAERLLMHLEEMQHTISTDEEKSAAVVNAIGLYMRHLGVRTKSGDKKSGRNFFRKKVMGNRRSDEPAKTKKGLSSILDAARWNRGEPQVPDFRHLKAEVDAEKPGATDRKGGVGMPSRDRNIGAPGQDTPGVSLHPLSLDSPDREPGADAPLELGDSSPQGPMSLESLAPPESTDEGAETERCPGWGAGAGGVAYWALVGGCRVTAAICACLSQALAPHAPLLLSGSGHSSPFFFPFLISLLLPHCPPFLLSFLFPLLLPLLPFFTNPSPPPFLSTTPSISFISSPLLSHLPPPLFPPHSSLTWVFFPHLPSPSDLPATFHFFSPSPFSFKPPCPLPPTPRLAPASWCPSLNPPPLCSVPWGPCPPYSWGAGSASCPSLCRCFGDPLVGAGRWVRFHLGPPLTLCPSLPRRWKRWVPGPWVGEGLAPPPFLPAPPLSPWPLPPLHSL

SEQ ID NO: 276097 - protein, 948 aa, Artificial Sequence
  derived and/or modified sequence
MASLSTWSSPAEPREMEDFARGAASPGPSRPGLVPVSIIGAEDEDFENELETNSEEQNSQFQSLEQVKRRPAHLMALLQHVALQFEPGPLVLRVPVPPNVAFELDRTRADLISEDVQRRFVQEVVQSQQVAVGRQLEDFRSKRLMGMTPWEQELAQLEAWVGRDRASYEARERHVAERLLMHLEEMQHTISTDEEKSAAVVNAIGLYMRHLGVRTKSGDKKSGRNFFRKKVMGNRRSDEPAKTKKGLSSILDAARWNRGEPQVPDFRHLKAEVDAEKPGATDRKGGVGMPSRDRNIGAPGQDTPGVSLHPLSLDSPDREPGADAPLELGDSSPQGPMSLESLAPPESTDEGAETESPEPGDEGEPGRSGLELEPEEPPGWRELVPPDTLHSLPKSQVKRQEVISELLVTEAAHVRMLRVLHDLFFQPMAECLFFPLEELQNIFPSLDELIEVHSLFLDRLMKRRQESGYLIEEIGDVLLARFDGAEGSWFQKISSRFCSRQSFALEQLKAKQRKDPRFCAFVQEAESRPRCRRLQLKDMIPTEMQRLTKYPLLLQSIGQNTEEPTEREKVELAAECCREILHHVNQAVRDMEDLLRLKDYQRRLDLSHLRQSSDPMLSEFKNLDITKKKLVHEGPLTWRVTKDKAVEVHVLLLDDLLLLLQRQDERLLLKSHSRTLTPTPDGKTMLRPVLRLTSAMTREVATDHKAFYVLFTWDQEAQIYELVAQTVSERKNWCALITETAGSLKVPAPASRPKPRPSPSSTREPLLSSSENGNGGRETSPADARTERILSDLLPFCRPGPEGQLAATALRKGVGGGILPPETPPVSAWGELCPPAWLHLRFPPRKAFCKKERNGGEDVRDHPHPHSCRSISHPEGLRRGSCGPRLGGAQLGLLAPHEPRPSLPPALCLGDSGLHSGGHHGDPGHLSIACGGHPSTPTPKCLRSVFIP

SEQ ID NO: 276098 - DNA, 2847 bp, Artificial Sequence
  derived and/or modified sequence
atggcgagcctttcaacgtggagctcaccagctgagccccgggagatggaggactttgcccggggcgccgcgtctccgggacccagtcgccccggtttggtccctgtgtctatcattggcgctgaagacgaggatttcgagaacgagctggagacaaatagtgaagaacagaattcccagtttcagtctctggagcaggtcaagagaagacctgctcatctcatggcgctgctgcagcatgtggccctgcagtttgagcccggcccattggttttgcgtgtccctgtgccccccaatgtcgctttcgaattagacagaacccgtgctgacctgatttctgaggatgtacagcggcgatttgttcaggaggtggtacaaagccagcaggtggccgttggtcgacagcttgaagattttcgatccaaaaggctcatgggcatgactccttgggaacaggaactcgctcaactggaggcgtgggtcggcagagatagggctagctacgaggcaagggaacgacatgttgcagagcggttactgatgcatctggaggaaatgcaacacaccatctcaacagatgaggagaagtccgccgctgtagtcaacgcgattggactatacatgaggcatctgggggtgcgtaccaaatcgggggataaaaagtctggaaggaatttttttagaaagaaagtgatgggcaataggcgctctgacgaacccgccaagacaaagaagggtctgagcagcattcttgacgctgcgaggtggaaccggggcgaaccacaggtgcccgatttccgtcatctcaaggctgaagtggacgcagagaaaccaggcgccaccgatcgcaaagggggggtgggaatgccatcccgggacagaaacattggggcccccggacaggatactcctggggtgtcactgcaccctctgtccttagatagccccgatagagaacccggtgccgatgcccctctcgaacttggagattcttcccctcagggcccaatgtccctggagtccctggccccgccagagagcaccgatgagggagctgagacggagagcccagaacccggggacgagggagaaccagggcgatctgggctggagctggagccagaggagcccccagggtggcgagagttagtgcctcctgacactcttcacagtctccctaaaagtcaggttaagcgccaggaggtcatctctgagctgcttgtgaccgaggccgctcacgtgagaatgctccgggtgctgcacgacctcttcttccagcccatggcggaatgcctgttttttcccctggaggagctgcagaacatattcccttccctggacgagctcatcgaggtccattctctttttctggataggctgatgaagcggagacaagagtcaggataccttatcgaagagattggtgacgtgctgttggccagatttgatggcgccgaaggaagttggtttcagaagattagctcccggttctgttcacgacaatcattcgcgctggagcagctgaaagccaagcagaggaaagatccaaggttctgcgcctttgtgcaggaggccgaatcaaggccccgctgcaggcgattgcaacttaaagatatgatcccaaccgaaatgcaacgattgactaagtatccactgttgttgcagtctataggccagaataccgaagagcccacggagcgggaaaaggtggagctggcggcagaatgttgccgagaaattctgcaccacgtcaatcaagccgttagagatatggaagatctgctgaggctcaaggattaccaaaggcgtctcgatctctcccacctccgccagtcctcagacccaatgttatccgagttcaagaacctggacattaccaagaaaaagttggtgcatgaggggcctcttacgtggcgggtgacaaaggacaaagctgttgaggtgcacgtgctgctcctcgacgacctcctgctgctcctccagcgtcaggatgagcgcctgctcctaaagtcacacagccggacactcacacctactccggacggcaagactatgcttagaccagtcttgcgccttacttcagccatgactcgtgaggttgcaaccgatcacaaagccttttatgtcttgttcacatgggaccaggaagcccagatttatgagctcgtcgcacaaacggtcagcgaacgcaagaactggtgcgccctgattactgaaaccgctggctccctgaaagtgccagctcccgcctcaagacccaaaccacggccctcaccctcctcaacgcgggaaccactcctgagttctagcgagaacggcaacggaggccgtgagacgtcccctgccgacgcaagaactgaacgaatcctcagcgatttgctgccattctgtaggcccgggccggaaggccagttggcagccacggcactgcggaagggcgtcggaggcgggattctgccgccagagactcctcctgtgtccgcatggggagaactgtgcccacccgcctggttacacttgcggtttcctcccaggaaagcattctgtaaaaaggagcggaatggcggcgaggatgttcgggatcacccgcacccacactcctgtcgaagcatttctcatccggagggactcaggagggggtcatgtgggcctcgcctcggtggtgcccagttaggactgctagcgccacatgagccacggccgagcctccctcccgcattatgcctcggcgattctggactgcactctggcgggcatcacggggatcccgggcacctgtccatcgcctgcggaggccatcccagcactccaactcccaaatgcctgcgctctgtctttatcccatag

SEQ ID NO: 276099 - DNA, 2847 bp, Artificial Sequence
  derived and/or modified sequence
atggccagcctgagcacctggagcagccctgctgagccccgggagatggaggactttgcccggggagctgccagccctggccccagcaggcctggcctggtgcctgtgtccatcattggagcagaagatgaggactttgaaaatgagctggagaccaacagcgaggagcagaacagccagttccagagcctggagcaggtgaagagaagacctgcccacctgatggccctgctgcagcacgtggccctgcagtttgagcccggccccctggtgctgcgggtgcctgtgcccccaaatgtggcctttgagctggacaggaccagggctgacctgatcagtgaagatgtgcagaggagatttgtgcaggaggtggtgcagagccagcaggtggccgtgggccggcagctggaggacttccgcagcaagaggctgatgggcatgaccccctgggagcaggagctggcccagctggaggcctgggtgggccgggaccgggccagctatgaggcccgggagcggcacgtggccgagcggctgctgatgcacctggaggagatgcagcacaccatcagcacagatgaggagaagtctgctgctgtggtgaatgccatcggcctgtacatgaggcacctgggcgtgaggaccaagagcggggacaagaagagcggcaggaacttcttcaggaagaaggtgatgggcaacagaagaagtgatgagcccgccaagaccaagaagggcctgagcagcatcctggatgctgcccgctggaacagaggagagccccaggtgcctgacttccgccacctgaaggccgaggtggatgctgagaagccaggggccacagacaggaagggcggcgtgggcatgcccagccgggacaggaacatcggggcccctggccaggacaccccaggagtgtccctgcaccccctgagcctggacagcccagaccgggagcccggggctgatgcccccctggagctgggggacagcagcccccagggccccatgagcctggagagcctggcccctcctgagagcacagatgaaggagctgagacagagagccctgagcctggagatgaaggagagcccggccgcagcggcctggagctggagcctgaggagcccccaggctggagggagctggtgcccccagacaccctgcacagcctgcccaagagccaggtgaagaggcaggaggtgatcagcgagctgctggtgacagaagctgcccacgtgaggatgctgcgggtgctgcatgacctcttcttccagcccatggccgagtgcctcttcttccccctggaggagctgcagaacatcttccccagcctggatgagctgattgaggtgcacagcctcttcctggaccggctgatgaagaggcggcaggagagcggctacctgattgaggagattggagatgtgctgctggccaggtttgatggagctgagggctcctggttccagaagatcagcagccgcttctgcagccggcagagctttgccctggagcagctgaaggccaagcagaggaaggacccccgcttctgtgcctttgtgcaggaggccgagagccggccccgctgccggcggctgcagctgaaggacatgatccccacagagatgcagaggctgaccaagtaccccctgctgctgcagagcatcggccagaacacagaggagcccacagagcgggagaaggtggagctggccgctgagtgctgccgggagatcctgcaccacgtgaaccaggccgtgcgggacatggaggacctgctgcggctgaaggactaccagaggcggctggacctgagccacctgcggcagagcagtgaccccatgctgtctgagttcaagaacctggacatcaccaagaagaagctggtgcatgagggccccctgacctggagggtgaccaaggacaaggctgtggaggtgcacgtgctgctgctggatgacctgctgctgctgctgcagaggcaggatgagcggctgctgctgaagagccacagcaggaccctgacccccaccccagatggcaagaccatgctgcggcctgtgctgcggctgaccagcgccatgacccgggaggtggccacagaccacaaggccttctacgtgctcttcacctgggaccaggaggcccagatctatgagctggtggcccagacagtgtctgagaggaagaactggtgtgccctgatcacagaaacagctggcagcctgaaggtgcctgccccagccagccggcccaagccccggcccagccccagcagcacccgggagcccctgctgagcagcagtgaaaatggaaatggaggccgggagaccagccctgcagatgccaggacagagcgcatcctgagtgacctgctgcccttctgcaggcctggccctgagggccagctggccgccacagccctgaggaagggcgtgggcggcggcatcctgcccccagagaccccacctgtgtctgcctggggcgagctgtgccccccagcctggctgcacctgcgcttcccccccaggaaggccttctgcaagaaggagagaaatggaggagaagatgtgcgggaccacccccacccccacagctgccgcagcatcagccaccctgagggcctgcggcggggcagctgtggcccccggctgggcggggcccagctgggcctgctggcccctcatgagccccggcccagcctgcccccagccctgtgcctgggggacagcggcctgcacagcggcggccaccacggggaccccggccacctgagcatcgcctgtggcggccaccccagcacccccacccccaagtgcctgcggagcgtcttcatcccctag

SEQ ID NO: 276100 - DNA, 2847 bp, Artificial Sequence
  derived and/or modified sequence
atggccagcctgagcacctggagcagccccgccgagccccgggagatggaagattttgcacgcggcgcagcaagtcctggcccatcacgcccaggtttggtgcctgttagtatcattggagccgaggacgaagacttcgaaaacgaactcgagaccaattctgaggaacagaatagtcagtttcaatctctggagcaggtcaagcggcgccccgcacatctcatggccctacttcagcacgtcgcgctgcaattcgagccgggaccactggtcctgagggtgccggtgcccccaaacgtcgcctttgagctcgataggacaagggccgacctgatctcagaggatgtccagcgcaggttcgttcaggaagtagttcagagccagcaggttgccgtggggcgacaactggaggactttcgaagcaaacggttgatgggcatgaccccctgggagcaggaactggctcagctagaggcgtgggtagggcgagaccgcgcgtcttacgaggccagggaaaggcatgtagcagagcgcttgctgatgcacctcgaagaaatgcagcatactatatctaccgacgaggaaaagtctgcggccgttgtgaacgccattggcctttacatgaggcatttgggcgtaagaaccaagagcggcgataaaaagagcggtaggaactttttccgcaagaaggtgatgggaaacagacggtcagacgagccagcgaaaacaaagaaggggctgtcgagcattctggacgccgcgagatggaacagaggcgaacctcaggttcctgatttcaggcatcttaaggctgaggtggatgctgagaaacctggcgccactgatagaaagggtggtgtgggcatgccctcgagggaccgcaacattggggcccccggccaggacacccctggtgtctccctacacccactatctctggattcacccgatagagaaccaggagctgatgctcccctcgagttgggcgactcgtcacctcagggacccatgtcactagagtctttggcaccacccgaatccaccgacgaaggggcagagacggaatccccagagcccggtgatgaaggcgagccaggcaggtccgggctagagctggaacctgaggagcctccaggctggcgggagcttgtgccccctgacactctccactcacttccaaagagccaagttaaaagacaggaggttatttctgaactgctcgttaccgaggcggcccacgtccgcatgctccgcgtgctccatgacctattctttcagccaatggcagagtgcttatttttcccacttgaggagctgcagaatattttcccttctttggatgaactgatcgaggtgcatagtctctttcttgaccggctgatgaaacgacgacaggagtccgggtatctcatcgaagaaattggggacgtattactggctcgcttcgatggggccgaaggctcctggttccagaagatatccagccgattctgttccagacagtccttcgcccttgaacagctgaaagccaagcaaaggaaggatccaaggttttgcgctttcgttcaggaggcagagagccggcccaggtgtaggagactacagttgaaggatatgattcccaccgagatgcagaggctaaccaagtacccattgctccttcagtctattggtcagaatacagaggagcccacggagagggaaaaagtcgagctcgccgccgagtgctgtagggaaatcttacatcacgttaatcaggctgtgagggacatggaggacctgctccgcctgaaagactatcaacggcgtctggatctgtcacacttgcggcagagctcagaccccatgttgtcagagttcaaaaatctggatatcacgaaaaaaaaattagtacatgagggccccctaacctggcgcgttactaaggacaaggccgtggaagtccacgtgttgctgctagatgacctgctgctgctgctgcaacgccaggacgagagactacttttgaagagtcactcgagaacgctgacccctaccccagacggtaagactatgctgcggcccgtgctgcgactgacgagcgcaatgacacgggaagttgctaccgatcataaagcattctacgttctgtttacctgggaccaggaggcgcagatctacgagttggtagctcagaccgtgtctgagagaaagaactggtgtgcccttatcacggaaaccgccggcagcctcaaagttcctgcacctgctagtaggcccaaaccacgcccatccccgagtagcactcgcgagcccctgctgtcatctagtgagaatggtaacgggggccgagaaacgtctcccgctgacgcccggacagaacgcatcttatctgacctgctgcctttctgtaggccgggacctgagggacagttagctgcaactgcattgaggaagggggtaggcggaggtatccttcctcctgagactccaccagttagtgcctggggagagctttgtcccccagcctggctacatctgaggttcccgccccggaaagctttctgcaaaaaagagcgtaatggaggtgaggatgtgcgcgaccacccacacccacacagctgtaggagcattagtcacccagaaggtcttagaaggggaagttgtgggccacgattgggtggggcacagttaggactgctggcaccgcatgaacctaggccctctctgcctcccgcactatgtcttggagactcaggcctccacagcggaggccatcatggggatccaggacacttgtccatcgcatgtggcgggcacccatccacaccgactccaaagtgtcttcgaagtgtttttattccctag

SEQ ID NO: 276101 - DNA, 2847 bp, Artificial Sequence
  derived and/or modified sequence
atggcatcactgagtacatggagctcacccgcagaaccaagggaaatggaggatttcgctagaggggctgcctcaccaggcccttcacggccaggtctcgtgccagtctccatcataggagcagaggacgaagatttcgaaaacgagcttgaaacgaacagcgaggaacagaatagtcagtttcagtcactggaacaagtgaagaggagaccggcacacttaatggctctcctgcagcacgtcgctcttcagttcgagccaggcccactcgtcctgcgggtgccagtgccaccaaacgttgcctttgaactggataggacacgagcagatctaatcagtgaggatgtgcagcgacgcttcgtgcaagaagtagtgcagtcccagcaggtggcagtgggtcgccagttggaggactttcgcagcaaacggctgatgggaatgactccgtgggagcaggagctggcacagctagaggcttgggttggtagggatcgcgctagctatgaagcccgagagcgccatgtggccgagagactcctcatgcacttggaggagatgcagcacaccatttccacggatgaagaaaagtctgctgcagtggtgaacgcaatcggactctacatgagacatcttggggtaaggaccaaatctggggacaagaagtccgggagaaattttttcaggaaaaaggtgatggggaaccggaggtcagatgagcctgccaagaccaaaaagggactctcctcaatcctcgatgccgctcggtggaataggggcgaaccccaggtgccagatttccggcatttgaaggccgaggtggacgcagaaaagcctggggcaactgatcggaaagggggtgtgggaatgccatccagagatagaaatatcggggcacccggtcaggacacccctggtgtcagcttgcatcccctttctctggactctccggatcgtgaacctggcgcagatgcccctctggagctcggggattcctccccccaaggtcccatgtccttggagtctttggctcctcccgaaagtactgacgaaggcgctgaaacagaatcaccagaacccggagacgaaggggaaccgggaagatccgggctggaactcgaaccagaagaacctccgggatggagggagttggttccacccgacactctgcattcactgcccaaatctcaagtcaaacgtcaggaagtgatttcagagctcctggtgaccgaggccgctcacgtccgaatgctgagggtgctccatgacctcttttttcagcccatggctgagtgcctcttcttcccacttgaggaactacagaatatcttcccatcactggacgagttgatagaggtacactctctttttctcgaccggttgatgaaaagacgacaggagtcaggctatctcattgaggaaattggagatgtgctcctggcacgattcgacggcgcagagggttcgtggtttcagaaaataagttcccgattctgttcccggcagagttttgcacttgaacagctcaaggcgaaacaacgcaaagacccgaggttttgtgcgtttgtgcaggaggccgagagcaggccacggtgtcggcgactgcagctaaaagacatgattcccacagagatgcaacgtctcaccaagtatcccctgctcctgcagagcatcggtcagaacaccgaagagccaacagagcgggagaaggtggaactcgccgctgagtgctgtcgcgagatcctccatcacgtcaaccaggcagtcagagacatggaggacctgttgcgccttaaggattatcagcgcaggctggacctgtcacacctcaggcagtcttccgatccaatgctcagtgaatttaaaaacttggacattacaaaaaaaaaactggtgcacgaaggccctctgacatggcgggtaaccaaagacaaggctgtcgaggtccacgtgttactcctagacgacttgctccttctcctgcagcggcaggacgaaaggctgctgctgaagagtcacagccggaccttgactccaacgcctgacggcaagacgatgctgcgtccagtcctccgactaacaagtgccatgacgcgcgaggtagcgacagatcataaagctttctatgttttatttacatgggaccaggaggcacagatctatgagctggtggcacaaaccgtgtccgagagaaagaattggtgcgcacttattaccgaaaccgccggaagtctaaaggttcctgcaccagccagcagacccaagccacgaccaagccccagcagcactagggagcctctcctcagctctagtgagaatggaaacgggggacgggagacttctcccgcagacgccagaaccgaacggattttaagcgatttgttgcccttctgtaggcctggccctgaagggcagctagccgctactgcactccggaagggtgttgggggaggaatcctgcctcctgagacgcctcccgtgagcgcttggggggaactttgccccccagcttggctgcaccttcgttttccgccaaggaaagctttttgtaaaaaagaacgaaacggtggggaggacgtgcgagatcacccccaccctcattcctgtagatccatttctcaccctgaggggctgcgcagggggtcatgcgggcctaggctggggggagcccagctgggcctgctcgcaccccacgagccaaggccgtctctcccccctgcgttatgtctcggtgatagcggcttacactctggcggacatcatggagacccagggcatctcagtatcgcgtgtgggggtcacccttcaacaccgacgcccaaatgcctccgatccgtatttattccctag

SEQ ID NO: 276102 - DNA, 2886 bp, Artificial Sequence
  derived and/or modified sequence
ggcggcgatggcttctctttccacctggagcagccctgcagagcccagggagatggaagacttcgcccgaggggcggcctccccaggcccctcccggcctggcctggttcccgtcagcatcatcggggctgaggatgaggattttgagaacgagctggagacaaactcagaagagcaaaacagccagttccagagcctggagcaggtgaagcggcgcccagcccacctcatggccctcctgcagcacgtggccctgcagtttgagccaggacccctggttctccgggtgccggtccctcccaacgtcgcctttgaacttgaccgcactagggctgacctcatctccgaggatgtccagcggcggttcgtgcaggaggtggtgcaaagccagcaggtagccgtgggccggcagctggaggacttccgttccaagcggctcatgggcatgacgccctgggagcaggagctggcccagctggaggcttgggttgggcgggaccgagccagctacgaggcccgggagcggcacgtggcggagcggctgctcatgcacctggaggagatgcaacataccatctctaccgacgaagaaaagagtgctgccgtggtcaacgccattggcctgtacatgcgccaccttggggtgcggaccaagagtggagacaagaagtcggggaggaacttcttccggaaaaaggtgatggggaaccggcggtcggacgagcctgccaagaccaagaaggggctgagcagcatcctggatgccgcccgctggaaccggggagagccccaggttccagattttcgacacctcaaagcagaggttgatgccgagaagccaggtgctacagaccggaagggaggcgtggggatgccctctcgggaccggaatatcggggctcctgggcaggacacccctggagtctctctgcaccctctgtccctggacagcccagaccgggaaccaggtgctgacgcccccctggagctgggggactcatccccgcagggcccaatgagcctggagtccttggcgcccccagagagtaccgacgagggggccgaaaccgagagccccgagcctggagatgagggggagccggggcggtcgggactggagcttgaaccagaagagcctcccggctggcgggaactcgtccccccagacaccctgcacagcctgcccaagagccaggtgaagcggcaggaggtcatcagcgagctgctggtgacagaggcggcccacgtgcgcatgctgcgggtgctgcacgacctcttcttccagcccatggcagaatgcctgttcttccccttggaggagctgcagaacatcttccccagcctggacgagctcatcgaggtgcattccctgttcctcgatcgcctgatgaagcggaggcaggagagtggctacctcatcgaggagatcggagacgtgctgctggcccggtttgatggtgctgagggctcctggttccagaaaatctcctcccgcttctgcagccgccagtcatttgccttagagcagctcaaagccaagcaacgcaaggaccctcggttctgtgccttcgtgcaggaagctgagagccgcccgcggtgccgccgcctgcagctgaaggacatgatccccacggagatgcagcggctgaccaagtaccccctgctcctgcagagcatcgggcagaacacagaagagcccacagaacgggagaaagtggagctggcagccgagtgctgccgggaaattctacaccacgtcaaccaagccgtgcgtgacatggaggacctgctgaggctcaaggactatcagcggcgcctggacttgtcccaccttcggcagagcagcgaccctatgctgagcgagttcaagaacctggacatcaccaagaagaaattggtccacgagggcccactgacgtggcgggtgactaaggacaaggcagtggaggtgcatgtgctgctgctggacgacctgctgctgctgctccagcgccaggacgagcggctgctgctcaagtcccatagccggacactgacgcccacgcccgatggcaagaccatgctgcggcccgtgctgcggctcacctccgccatgacccgcgaggtggccaccgatcacaaagccttctacgtcctttttacctgggaccaggaggcccagatatacgagctggtggcacagactgtgtcggagcggaaaaactggtgtgctctcatcactgagactgccggatccctgaaagtccctgcccctgcctctcgccctaagccccggcccagcccgagcagcacccgagaacccctcctcagcagctctgagaacggcaatggtggccgagagacgtctccagctgatgcccggaccgagagaatcctcagtgacctcctgcccttctgcagaccaggccccgagggccagctcgctgccacggcccttcggaaaggagttggaggaggaattttgccgcctgagacccctcctgtctcagcttggggggaactctgtcccccagcctggctgcacttgaggttcccgcccaggaaggccttttgcaagaaggagaggaatgggggagaggacgtgagggaccacccccacccacacagctgccgcagcatctcacaccccgagggcctgaggagagggagctgtgggccacgcctgggaggggcccagctggggttactggccccgcatgagcctcggccatctctccctcctgccctctgcttgggggactcagggctccattctggagggcaccacggtgacccgggccatctcagtattgcctgtgggggccacccctccacccccacccccaagtgccttcgctctgtttttataccctgaattggaggtttattttttaatatatattatct

SEQ ID NO: 276103 - DNA, 2847 bp, Artificial Sequence
  derived and/or modified sequence
atggccagcctgagcacctggagcagccccgccgagcccagagagatggaggacttcgccagaggcgccgccagccccggccccagcagacccggcctggtgcccgtgagcatcatcggcgccgaggacgaggacttcgagaacgagctggagaccaacagcgaggagcagaacagccagttccagagcctggagcaggtgaagagaagacccgcccacctgatggccctgctgcagcacgtggccctgcagttcgagcccggccccctggtgctgagagtgcccgtgccccccaacgtggccttcgagctggacagaaccagagccgacctgatcagcgaggacgtgcagagaagattcgtgcaggaggtggtgcagagccagcaggtggccgtgggcagacagctggaggacttcagaagcaagagactgatgggcatgaccccctgggagcaggagctggcccagctggaggcctgggtgggcagagacagagccagctacgaggccagagagagacacgtggccgagagactgctgatgcacctggaggagatgcagcacaccatcagcaccgacgaggagaagagcgccgccgtggtgaacgccatcggcctgtacatgagacacctgggcgtgagaaccaagagcggcgacaagaagagcggcagaaacttcttcagaaagaaggtgatgggcaacagaagaagcgacgagcccgccaagaccaagaagggcctgagcagcatcctggacgccgccagatggaacagaggcgagccccaggtgcccgacttcagacacctgaaggccgaggtggacgccgagaagcccggcgccaccgacagaaagggcggcgtgggcatgcccagcagagacagaaacatcggcgcccccggccaggacacccccggcgtgagcctgcaccccctgagcctggacagccccgacagagagcccggcgccgacgcccccctggagctgggcgacagcagcccccagggccccatgagcctggagagcctggccccccccgagagcaccgacgagggcgccgagaccgagagccccgagcccggcgacgagggcgagcccggcagaagcggcctggagctggagcccgaggagccccccggctggagagagctggtgccccccgacaccctgcacagcctgcccaagagccaggtgaagagacaggaggtgatcagcgagctgctggtgaccgaggccgcccacgtgagaatgctgagagtgctgcacgacctgttcttccagcccatggccgagtgcctgttcttccccctggaggagctgcagaacatcttccccagcctggacgagctgatcgaggtgcacagcctgttcctggacagactgatgaagagaagacaggagagcggctacctgatcgaggagatcggcgacgtgctgctggccagattcgacggcgccgagggcagctggttccagaagatcagcagcagattctgcagcagacagagcttcgccctggagcagctgaaggccaagcagagaaaggaccccagattctgcgccttcgtgcaggaggccgagagcagacccagatgcagaagactgcagctgaaggacatgatccccaccgagatgcagagactgaccaagtaccccctgctgctgcagagcatcggccagaacaccgaggagcccaccgagagagagaaggtggagctggccgccgagtgctgcagagagatcctgcaccacgtgaaccaggccgtgagagacatggaggacctgctgagactgaaggactaccagagaagactggacctgagccacctgagacagagcagcgaccccatgctgagcgagttcaagaacctggacatcaccaagaagaagctggtgcacgagggccccctgacctggagagtgaccaaggacaaggccgtggaggtgcacgtgctgctgctggacgacctgctgctgctgctgcagagacaggacgagagactgctgctgaagagccacagcagaaccctgacccccacccccgacggcaagaccatgctgagacccgtgctgagactgaccagcgccatgaccagagaggtggccaccgaccacaaggccttctacgtgctgttcacctgggaccaggaggcccagatctacgagctggtggcccagaccgtgagcgagagaaagaactggtgcgccctgatcaccgagaccgccggcagcctgaaggtgcccgcccccgccagcagacccaagcccagacccagccccagcagcaccagagagcccctgctgagcagcagcgagaacggcaacggcggcagagagaccagccccgccgacgccagaaccgagagaatcctgagcgacctgctgcccttctgcagacccggccccgagggccagctggccgccaccgccctgagaaagggcgtgggcggcggcatcctgccccccgagaccccccccgtgagcgcctggggcgagctgtgcccccccgcctggctgcacctgagattcccccccagaaaggccttctgcaagaaggagagaaacggcggcgaggacgtgagagaccacccccacccccacagctgcagaagcatcagccaccccgagggcctgagaagaggcagctgcggccccagactgggcggcgcccagctgggcctgctggccccccacgagcccagacccagcctgccccccgccctgtgcctgggcgacagcggcctgcacagcggcggccaccacggcgaccccggccacctgagcatcgcctgcggcggccaccccagcacccccacccccaagtgcctgagaagcgtgttcatcccctag

SEQ ID NO: 276104 - protein, 129 aa, Artificial Sequence
  derived and/or modified sequence
MADEELEALRRQRLAELQAKHGDPGDAAQQEAKHREAEMRNSILAQVLDQSARARLSNLALVKPEKTKAVENYLIQMARYGQLSEKVSLDSLEELYCYLLYQNMASKGQLHLHWITEFLLTLRRNCWRE

SEQ ID NO: 276105 - DNA, 390 bp, Artificial Sequence
  derived and/or modified sequence
atggccgacgaggagctggaggccctgagaagacagagactggccgagctgcaggccaagcacggcgaccccggcgacgccgcccagcaggaggccaagcacagagaggccgagatgagaaacagcatcctggcccaggtgctggaccagagcgccagagccagactgagcaacctggccctggtgaagcccgagaagaccaaggccgtggagaactacctgatccagatggccagatacggccagctgagcgagaaggtgagcctggacagcctggaggagctgtactgctacctgctgtaccagaacatggccagcaagggccagctgcacctgcactggatcaccgagttcctgctgaccctgagaagaaactgctggagagagtag

SEQ ID NO: 276106 - DNA, 390 bp, Artificial Sequence
  derived and/or modified sequence
atggccgatgaagagctagaggccctcagacgacagcggttggccgagctgcaagctaagcacggcgatcccggggacgctgcccagcaagaggctaagcacagagaggccgagatgcggaattcaattctggctcaggtgctggaccagagcgccagggcacggttgagcaatttggctctcgtcaaaccagagaaaactaaggccgtcgagaattatctcattcaaatggccaggtatggacagctgtcagaaaaggtgagtcttgactctttggaagaactatattgttacctcttgtaccagaatatggctagtaaaggtcagctgcacctacactggattaccgagtttcttctgaccttgagaaggaattgttggagagagtag

SEQ ID NO: 276107 - DNA, 390 bp, Artificial Sequence
  derived and/or modified sequence
atggctgatgaggagctggaggccctgcggcggcagaggctggccgagctgcaggccaagcatggagaccctggagatgctgcccagcaggaggccaagcaccgggaggccgagatgaggaacagcatcctggcccaggtgctggaccagagcgcccgggcccggctgagcaacctggccctggtgaagccagagaagaccaaggctgtggagaactacctgatccagatggcccgctatggccagctgtctgagaaggtgtccctggacagcctggaggagctgtactgctacctgctgtaccagaacatggccagcaagggccagctgcacctgcactggatcacagagttcctgctgaccctgcggaggaactgctggagggagtag

SEQ ID NO: 276108 - DNA, 390 bp, Artificial Sequence
  derived and/or modified sequence
atggccgacgaggagctggaggccctgcggcggcagcggctggccgagttgcaagcaaaacatggcgaccccggggacgctgcccagcaggaagcaaaacacagggaggcggagatgcggaacagcattcttgctcaggtcctggaccagagcgcccgcgcgcgactgagtaaccttgcccttgttaaacccgagaagaccaaagccgtagagaattatttgatacagatggcgcgctatggccagctgtccgagaaggtttcacttgattcgttggaagaactctactgctatttgctctatcaaaatatggcttccaagggacagctgcacctgcactggattaccgagttcctgctgaccctgagaagaaactgttggcgggaatag

SEQ ID NO: 276109 - DNA, 966 bp, Artificial Sequence
  derived and/or modified sequence
agtggtcaaggccgcgctcgcgccgaggggctgcgagagtgaccgcggctgctccagcgctgacgccgagccatggcggacgaggagcttgaggcgctgaggagacagaggctggccgagctgcaggccaaacacggggatcctggtgatgcggcccaacaggaagcaaagcacagggaagcagaaatgagaaacagtatcttagcccaagttctggatcagtcggcccgggccaggttaagtaacttagcacttgtaaagcctgaaaaaactaaagcagtagagaattaccttatacagatggcaagatatggacaactaagtgagaaggtaagcttagacagccttgaggaactttactgttacctgctttatcaaaacatggcttcaaaaggtcagctgcatcttcactggattacagaattcttgctgactctcagaagaaattgttggagagaatagtcatacctactttaaaagagaataaattgcctttcctaaattcctctgcttcgctcctttcctggcgttgctctggaaccttgttggtgtctgtgacccaatgactgttagggtcagctagcttcaattgcccctgcactggaagcaaggtttgtcagtaacaccaattaaaatactaccagtgtaagtagaaggtgtgttttgcagatgagaaggtgctaagatgccttgcttatgttctctgtgttgctgtaataccatgaggggtatgttgtggcaaacctggcctttgagatcaagacgaaccccacctgccctgagaagccgtctgctaccaccacagcctacccgaattggtcctgtcccctaaacccctcacactgagaactgcttgtgtgggagagagctggttgggttgatcttttccgagtgtgacttacctccttcaaggggatgtttaagcttctcgggcagaagtggtgtgtctattcctgacaccaaaca

SEQ ID NO: 276110 - DNA, 390 bp, Artificial Sequence
  derived and/or modified sequence
atggcagacgaggaattagaggctttgcgcaggcaacgtctagccgagctccaggccaaacatggcgacccaggggacgccgcacagcaggaagccaaacatcgtgaggctgagatgagaaacagcattttagcccaggtattagaccagtccgcaagagctaggctctctaatcttgctctcgtgaaacctgaaaaaaccaaggccgtggaaaactacctcattcagatggccagatacggacaattgtcggaaaaggtttcactggacagtctggaggaactttactgctacctcctgtaccagaatatggccagtaagggacagctgcacctgcactggataaccgagtttcttctcaccctgcgcaggaactgttggcgggagtag

SEQ ID NO: 276111 - DNA, 2532 bp, Artificial Sequence
  derived and/or modified sequence
gggatgggggcggagtccagggcgtgggggggccggtttgttgtggtcgccattttgctggttgcattactgggtaatcggggccctggcttgccgcgtccgccggataccctcagccagtgggcaggtctgagctcgggctccccgagcagtttgagtccccttgcccgctccttcaggtctcagcggcggtggcagccgaggtgcaggatgcaagaaggcgccccccggccgggctcccgctccaggcctcgctcccctgcggccctctgagcccaccatggccgtcccaccgggccatggtcccttctctggcttcccagggccccaggagcacacgcaggtattgcctgatgtgcggctactgcctcggaggctgcccctggccttccgggatgcaacctcagccccgctgcgtaagctctctgtggacctcatcaagacctacaagcacatcaatgaggtatactatgcgaagaagaagcggcgggcccagcaggcgccaccccaggattcgagcaacaagaaggagaagaaggtcctgaaccatggttatgatgacgacaaccatgactacatcgtgcgcagtggcgagcgctggctggagcgctacgaaattgactcgctcattggcaaaggctcctttggccaggtggtgaaagcctatgatcatcagacccaggagcttgtggccatcaagatcatcaagaacaaaaaggctttcctgaaccaggcccagattgagctgcggctgctggagctgatgaaccagcatgacacggagatgaagtactatatagtacacctgaagcggcacttcatgttccggaaccacctgtgcctggtatttgagctgctgtcctacaacctgtacgacctcctgcgcaacacccacttccgcggcgtctcgctgaacctgacccggaagctggcgcagcagctctgcacggcactgctctttctggccacgcctgagctcagcatcattcactgcgacctcaagcccgaaaacatcttgctgtgcaaccccaagcgcagcgccatcaagattgtggacttcggcagctcctgccagcttggccagaggatctaccagtatatccagagccgcttctaccgctcacctgaggtgctcctgggcacaccctacgacctggccattgacatgtggtccctgggctgcatccttgtggagatgcacaccggagagcccctcttcagtggctccaatgaggtcgaccagatgaaccgcattgtggaggtgctgggcatcccaccggccgccatgctggaccaggcgcccaaggctcgcaagtactttgaacggctgcctgggggtggctggaccctacgaaggacgaaagaactcaggaaggattaccagggccccgggacacggcggctgcaggaggtgctgggcgtgcagacgggcgggcccgggggccggcgggcgggggagccgggccacagccccgccgactacctccgcttccaggacctggtgctgcgcatgctggagtatgagcccgccgcccgcatcagccccctgggggctctgcagcacggcttcttccgccgcacggccgacgaggccaccaacacgggcccggcaggcagcagtgcctccacctcgcccgcgcccctcgacacctgcccctcttccagcaccgccagctccatctccagttctggaggctccagtggctcctccagtgacaaccggacctaccgctacagcaaccgatattgtgggggccctgggccccctatcacagactgtgagatgaacagcccccaggtcccaccctcccagccgctgcggccctgggcagggggtgatgtgccccacaagacacatcaagcccctgcctctgcctcgtcactgcctgggaccggggcccagttacccccccagccccgataccttggtcgtcccccatcaccaacctcaccaccacccccggagctgatggatgtgagcctggtgggcggccctgctgactgctccccacctcacccagcgcctgccccccagcacccggctgcctcagccctccggactcggatgactggaggtcgtccacccctcccgcctcctgatgaccctgccactctggggcctcacctgggcctccgtggtgtaccccagagcacagcagccagctcgtgaccctgccccctccctggggcccctcctgaagccataccctcccccatctgggggccctgggctcccatcctcatctctctccttgactggaattgctgctacccagctggggtgggtgaggcctgcactgattggggcctggggcaggggggtcaaggagagggttttggccgctccctccccactaaggactggacccttgggcccctctccccctttttttctatttattgtaccaaagacagtggtggtccggtggagggaagaccccccctcaccccaggaccctaggagggggtgggggcaggtagggggagatggccttgctcctcctcgctgtacccccagtaaagagctttctc

SEQ ID NO: 276112 - DNA, 3215 bp, Artificial Sequence
  derived and/or modified sequence
cccagaactccctgtaggaattgccaaggggagaaggaaggaagggtgtttctacagagatgacagaatgtggctagagtaggctttctcaaccttggtactgttgactcttggggtgggataattctttgttgtgggggcagtcctgtgtgtcgtaggatgccaagcagtgtccatggcttctactcactggataccagtagccccctcccttctccacaagtcatgacaatgacaaatgtctctaggctgagcatgctggctcatgcctgtaatcccagcactttgggaagctgaggaaggaggatcacttgagcccaggagttcaagaccagcctgagcaacacagtgagacctcatctctacaaaaataaaataaaattagccaggtgtgatggcgtgcacccataatcccagctactcgggaggctgaggtgggcggatcacttgagcctgcgaggtggaggctgcagtgagctgagattgtgccactgcgctagagcctgggggacagagcgagaccctgtctagaaaaaaataagtctccagacattgccaaatgtttttggaaggcagaatcacccgctgattgaaaactactgggcctttggagatggggagcatacgggcaagactggagagtggattgggagctgagtaggctgcagcgacaatgcaaagtgatggaaggggagaggcgggcctacagcaaggaagtccaccagcgcatcaacaagcaacttgaggagatccggcgcttggaggaggtacggggcgatctccaggtgcagatcagcgcagcccagaaccaggtcaagcggcttcgggacagtcagcggctggagaacatggaccgcctgctgaagggccgggcccaggtgcaggcggagatcgaggagctgcaggagcagaccagggccctggacaagcagatccaggagtgggagacgcggatctttacccacagtaagaatgtcaggtccccgggattcatcctggatcagaaggtcaagatcaggcgaaggatcaggatcctagaaaaccagttggacagggtcacctgtcactttgacaaccagctggtacggaatgcggccctgcgggaggagctggatctgctgcggatcgacaggaaccgctatctgaacgtggaccgcaagctgaagaaggagatccaccacctgcatcacctggtcagcacccttatcctctcctccacctctgcctacgccgtcagggaggaggcgaaggccaagatgggcttgctgcgggagcgcgcggagaaagaggaggcccagagcgagatggaggcgcaggtcctgcagcggcagatcttgcacctggagcagctgcaccacttcctcaagctcaagaacaacgaccggcagccggatcccgatgtcctggagaagcgtgaaaagcaggccggggaggtggccgagggcgtctggaagacctcccaggagaggctggtgctttgctacgaggacgccctgaataaactgtcccagctgatgggggagagtgaccctgacctgttggtgcagaagtatctggagatcgaggagcgcaactttgctgagttcaacttcatcaacgagcagaacttggagctggagcatgtgcaggaagagatcaaggagatgcaggaggctttggtgagcgcacgtgccagcaaggatgaccagcatttgctgcaggagcagcagcagaaggtgttgcagcagcgcatggacaaggtgcactcggaggctgagcgccttgaggcccgcttccaggatgtgcggggacagctggagaagctcaaggctgatatccagctcctcttcaccaaggcccattgcgacagcagcatgatcgatgacctccttggggtcaagaccagcatgggagaccgggacatgggcctcttcctgagcctcattgagaagcggctggtggagctcctgacagtgcaggccttcctacatgcccagagcttcacctccctggccgacgctgccctcctagtgctgggccagagcctggaggaccttccgaagaagatggccccacttcagccccctgacactctagaagaccccccgggttttgaggccagcgatgactaccccatgagcagggaggagctgctgagccaagtggagaagctggtggagctccaggagcaggcggaggcgcagcgccagaaggacctggccgccgccgccgcgaagctggacggcaccctgagcgtggacctggccagcacccagagggccggctccagtaccgtcctggtgcccaccaggcacccccatgccatccccgggtccattttgagccacaagactagcagagaccgtggctctcttggccacgtcacttttggcggcctcagctccagcactgggcatttgcccagccacatcacgcacggtgaccccaacactggccacgtgaccttcggctccaccagtgcctcgagtgggggccacgtgaccttcagacccgtcagcgccagcagctacctgggctccactggatacgtggggtccagcaggggcggagaaaacacagagggtggtgtggagagcggaggcacagcgtctgattcgagcggaggcctcgggtccagcagagaccacgtctccagcaccggccctgcctccagcactggcccgggctcctccaccagcaaagactcccggggctaacacgaggggcacgcagcccccaccctgccctggctctctgtggggtctttttttgtgtctctacttcccctgtttgccttgtgggtctctgtctttttctcccagtggcaggcctctgtctttttgccccttcaactgttttcatctgcccttcatcaccgcctcacctgtgtctcccggttcctttctctctgctcctgacactgcttttccctctgactcctgatctcctgttctctgggcttcctggtcagtgtctgtccgtcttgtctccatatctgccccttccctgtctgctgagccctggccccctgtggatcccccacctcctgtttccggctctctctcctcatctccatctcccaggctctccacgcatcctgtgtccctgtctctgtagctccttactccccaagagccccccagtgctgacaggtgtgggaaaagtcagggcgaagacgccaggttcagcatgggaaaatgggactgtggaaataaagtatatgtgtggagagctgg

SEQ ID NO: 276113 - protein, 156 aa, Artificial Sequence
  derived and/or modified sequence
MSAQESCLSLIKYFLFVFNLFFFVLGSLIFCFGIWILIDKTSFVSFVGLAFVPLQIWSKVLAISGIFTMGIALLGCVGALKELRCLLGLYFGMLLLLFATQITLGILISTQRAQKDTPTWTKGDRHKQLQRETHGKKREQEKEIDALKEETETYEP

SEQ ID NO: 276114 - protein, 483 aa, Artificial Sequence
  derived and/or modified sequence
MEKTLLANLGTTASCPARARKWSNSQPADLAHMGRSREDPAGMEASTMPISALPRTSSDPVLLKAPAPLGTVADSLRASDGQLQAKAPTKPPRTPSFELPDASERPPTYCELVPRVPSVQGTSPSQSCPEPEAPWWEAEEDEEEENRCFTRPQAEISFCPHDAPSCLLGPQNRPLEPQVLHTLRGLFLEHHPGSTALHLLLVDCQATGLLGVTRDQRGNMGVSSGLELLTLPHGHHLRLELLERHQTLALAGALAVLGCSGPLEERAAALRGLVELALALRPGAAGDLPGLAAVMGALLMPQVRGEQGLEEAGVRVTGKTGEEACSDLFSQVSRLEHTWRQLRRSHTEAALAFEQELKPLMRALDEGAGPCDPGEVALPHVAPMVRLLEGEEVAGPLDESCERLLRTLHGARHMVRDAPKFRKVAAQRLRGFRPNPELREALTTGFVRRLLWGSRGAGAPRAERFEKFQRVLGVLSQRLEPDR

SEQ ID NO: 276115 - DNA, 1452 bp, Artificial Sequence
  derived and/or modified sequence
atggagaagaccctgctggccaacctgggcaccaccgccagctgccccgccagagccagaaagtggagcaacagccagcccgccgacctggcccacatgggcagaagcagagaggaccccgccggcatggaggccagcaccatgcccatcagcgccctgcccagaaccagcagcgaccccgtgctgctgaaggcccccgcccccctgggcaccgtggccgacagcctgagagccagcgacggccagctgcaggccaaggcccccaccaagccccccagaacccccagcttcgagctgcccgacgccagcgagagaccccccacctactgcgagctggtgcccagagtgcccagcgtgcagggcaccagccccagccagagctgccccgagcccgaggccccctggtgggaggccgaggaggacgaggaggaggagaacagatgcttcaccagaccccaggccgagatcagcttctgcccccacgacgcccccagctgcctgctgggcccccagaacagacccctggagccccaggtgctgcacaccctgagaggcctgttcctggagcaccaccccggcagcaccgccctgcacctgctgctggtggactgccaggccaccggcctgctgggcgtgaccagagaccagagaggcaacatgggcgtgagcagcggcctggagctgctgaccctgccccacggccaccacctgagactggagctgctggagagacaccagaccctggccctggccggcgccctggccgtgctgggctgcagcggccccctggaggagagagccgccgccctgagaggcctggtggagctggccctggccctgagacccggcgccgccggcgacctgcccggcctggccgccgtgatgggcgccctgctgatgccccaggtgagaggcgagcagggcctggaggaggccggcgtgagagtgaccggcaagaccggcgaggaggcctgcagcgacctgttcagccaggtgagcagactggagcacacctggagacagctgagaagaagccacaccgaggccgccctggccttcgagcaggagctgaagcccctgatgagagccctggacgagggcgccggcccctgcgaccccggcgaggtggccctgccccacgtggcccccatggtgagactgctggagggcgaggaggtggccggccccctggacgagagctgcgagagactgctgagaaccctgcacggcgccagacacatggtgagagacgcccccaagttcagaaaggtggccgcccagagactgagaggcttcagacccaaccccgagctgagagaggccctgaccaccggcttcgtgagaagactgctgtggggcagcagaggcgccggcgcccccagagccgagagattcgagaagttccagagagtgctgggcgtgctgagccagagactggagcccgacagatag

SEQ ID NO: 276116 - DNA, 1452 bp, Artificial Sequence
  derived and/or modified sequence
atggagaaaactcttttagctaacctgggcacgactgcttcttgtcctgccagagccagaaaatggtcaaatagccaacctgcagacctggcacacatgggacgctcgcgagaagaccccgccggaatggaggcatcaactatgcctatctctgcactgcctcgaacctcatctgatcccgtcctgctgaaggcacccgcccccttggggactgtcgcagattctttgcgcgcttctgatggccaattgcaggccaaagcaccaactaaacccccccgtacacccagttttgaactcccagatgctagcgagcgccctccaacatactgtgagctggtgcctagagtcccttccgtccaaggcacaagtcccagccagtcctgtccggaaccagaggccccctggtgggaagccgaagaagacgaagaggaagagaatagatgctttaccaggccacaggcagagatctccttctgtccccatgatgcccctagctgcctcctaggtcctcaaaatcggcccttggaaccccaggtgcttcatactctgagagggttgtttcttgagcatcatcctgggagcacggccctgcatttactccttgtcgattgccaggccacaggcctgctcggcgtcacccgcgaccagcgggggaatatgggtgtcagttcgggtctagagttgctgactctgccacacggccatcacctcagactggaattacttgaaagacaccaaactctggccctggcaggagctttagctgtacttggatgcagtgggcctctcgaggagagggctgcagccctgcgagggctggtcgaactggctctggctttgcggccaggcgcggctggtgatttgccgggactggcagctgtgatgggagcacttcttatgcctcaggtgaggggtgaacagggcctcgaggaggccggggtgagggttaccgggaaaaccggagaggaggcctgtagtgatctgttttcgcaggtgtctcggctagagcacacctggaggcagctgagacgcagtcacaccgaggctgctctcgcgttcgaacaggaactgaagcctctcatgagagcactagacgagggagcaggcccctgtgaccccggcgaggtcgctttgccccatgtggcacccatggtgcgcttacttgagggagaggaagtggccggcccacttgatgaaagttgtgaaagactccttaggacgttacatggcgcacgtcacatggtacgggacgcgcctaaattcaggaaagtcgcggctcaaaggttgcgaggttttcggccaaaccctgaactgcgagaagccctgaccacagggttcgtgcgccggcttttgtggggaagtcggggtgccggggcaccccgagcagagcgcttcgagaaatttcagagagtgctgggtgtgctgtcacagagactcgagccagaccgctag

SEQ ID NO: 276117 - DNA, 1452 bp, Artificial Sequence
  derived and/or modified sequence
atggagaagaccctgctggccaacctgggcaccacagccagctgcccagcccgggccaggaagtggagcaacagccagcctgctgacctggcccacatgggccgcagccgggaggaccctgctggcatggaggccagcaccatgcccatcagcgccctgcccaggaccagcagtgaccctgtgctgctgaaggccccagcccccctgggcaccgtggccgacagcctgcgggccagtgatggccagctgcaggccaaggcccccaccaagccacccaggacccccagctttgagctgcctgatgccagcgagcggccccccacctactgtgagctggtgccccgggtgcccagcgtgcagggcaccagccccagccagagctgcccagagcctgaggccccctggtgggaggccgaggaggatgaggaggaggagaaccgctgcttcacccggccccaggccgagatctccttctgcccccatgatgcccccagctgcctgctgggcccccagaaccggcccctggagccccaggtgctgcacaccctgcggggcctcttcctggagcaccaccctggcagcacagccctgcacctgctgctggtggactgccaggccaccggcctgctgggcgtgacccgggaccagaggggcaacatgggcgtgagcagcggcctggagctgctgaccctgccccacggccaccacctgcggctggagctgctggagcggcaccagaccctggccctggccggggccctggccgtgctgggctgcagcggccccctggaggagagagctgctgccctgcggggcctggtggagctggccctggccctgcggcctggagctgctggggacctgcccggcctggccgctgtgatgggcgccctgctgatgccccaggtgcggggggagcagggcctggaggaggccggcgtgcgggtgacaggcaagacaggagaggaggcctgcagcgacctcttcagccaggtgtcccggctggagcacacctggaggcagctgcggcgcagccacacagaagctgccctggcctttgagcaggagctgaagcccctgatgagggccctggatgaaggagctggcccctgtgaccctggagaggtggccctgccccacgtggcccccatggtgcggctgctggagggggaggaggtggccggccccctggatgagagctgtgagcggctgctgcggaccctgcatggagcccggcacatggtgagagatgcccccaagttcaggaaggtggccgcccagaggctgcggggcttccggcccaaccctgagctgcgggaggccctgaccaccggctttgtgcggcggctgctgtggggcagcagaggagctggggcccccagggctgagagatttgagaagttccagagggtgctgggcgtgctgagccagaggctggagccagacagatag

SEQ ID NO: 276118 - DNA, 1452 bp, Artificial Sequence
  derived and/or modified sequence
atggagaagaccctgctggccaacctgggcaccaccgccagctgccccgcccgagcccgaaaatggagcaattctcagcccgccgatctcgcccatatgggtaggagccgggaggatcccgccgggatggaggcctccacaatgcccatatctgcgctgcctcggactagttctgaccctgtgctcctcaaagcccccgcccccctgggcactgtagctgactccctgcgggcttccgatggtcagctgcaggccaaggcccctactaagccaccgaggacaccatctttcgaactacccgatgcatccgaaagacccccaacatactgtgaacttgtgccccgtgtaccatcagtgcagggcacttccccttcccagtcctgccctgagcctgaggcaccgtggtgggaggccgaagaagatgaagaggaggaaaatcggtgttttaccagaccccaggcagagatcagtttttgcccacatgacgccccgagctgcctgctggggccgcagaaccggccccttgagccccaggtgctgcacacgctgcgcggtctttttctggaacaccacccaggaagcaccgctcttcacctgttattagtggattgccaggctacaggtttgcttggagtgacccgggaccagagagggaacatgggcgtatcttctgggttggaactgcttacgcttccccacggtcaccacttacgcctggagctgctcgagagacaccagacactggccctcgccggggccctcgccgtgctcggctgtagtggacccctcgaagagagagcggctgccctgagagggctcgtggaattggcccttgctcttagacccggcgcagcgggggaccttcccgggctggcagccgtgatgggcgccctccttatgccacaggtccggggcgaacagggcttggaggaggccggggtccgcgtgaccggcaaaaccggtgaggaggcatgcagtgatctatttagccaggtaagcagactggagcacacttggcgacagctgcgacgatctcacactgaggccgccctagcttttgaacaggagctaaaaccgctcatgcgcgcactggacgagggcgcgggaccttgtgatcctggcgaggtagctttacctcacgtagcaccgatggtccgcctcctggagggcgaagaagtggccggtcccctggatgagtcctgcgaaagactgctgcggacacttcacggagcgagacacatggtgcgtgatgcgcccaagtttcggaaggtggccgctcagcgcctcagaggtttcagacccaaccccgagctgcgggaagcactgacaacaggctttgtacggcgactgctctggggttccagaggcgcaggggcacctagagccgagagattcgagaagttccaacgcgtcctcggggtcctgagtcaacgcttagaaccggataggtag

SEQ ID NO: 276119 - DNA, 1452 bp, Artificial Sequence
  derived and/or modified sequence
atggagaagaccctgctcgcaaacttggggactaccgcatcttgtccagctagagcgagaaaatggtccaacagccagccggctgacttggcccacatgggacgatcccgagaggaccccgctgggatggaggcctccacaatgccaatttccgctctgcccaggaccagcagcgacccagttctgttaaaagctcctgccccactgggtactgttgccgattctctcagagctagtgacgggcaattacaggccaaggctcccactaagccccctaggacacccagcttcgagctgcccgacgccagcgaacgcccacctacctactgcgagttggtccctcgggtcccatccgtgcagggcaccagtccctctcagtcttgtccagagccagaggcaccatggtgggaagctgaagaagacgaggaggaagaaaacaggtgcttcacccgtcctcaggcggagatatctttctgccctcatgatgctccatcctgcctgctgggcccacagaaccggcctctcgagccacaggtgctgcatacactgagaggactctttctggagcatcacccaggtagcaccgccctccaccttttgctggtcgactgtcaagctacaggtctcctcggtgttacccgggaccagcggggtaacatgggcgtgtcctcaggactggagcttctcacccttccccatgggcaccacttacggctggaactgttggaaaggcatcaaacgctagcgcttgccggtgccctggccgttctaggctgtagcggacccctggaggagcgcgctgcagcactccggggtttggtagagctggccctggccctccggcctggagcagccggtgatctgcctggcttagccgcagttatgggcgctctcctgatgccacaggtgcgtggtgagcagggtctggaggaagccggtgttcgggttaccgggaaaactggcgaggaagcatgttccgacttgttcagtcaggtctctcggcttgagcatacctggcggcaacttcgtcgcagccatacggaagcagctttggcctttgagcaggaactgaagcccctgatgcgggcacttgatgagggcgctggaccctgcgatccaggagaagtggcactcccacatgttgcccctatggtacggttactggaaggggaggaggtggctggccctctggatgagagctgtgagcgactgctgcgtaccctgcatggtgccagacacatggttagagacgctcccaagtttcgtaaggtggcagcccagagactcagaggtttccgcccaaatccggagctgcgcgaggctctgacaacagggttcgtccgccgactgttgtgggggtctcgcggagctggggcaccccgtgctgaaaggttcgagaagtttcaaagggtgcttggggtcttgagccagcgattggagccagatcggtag

SEQ ID NO: 276120 - DNA, 1978 bp, Artificial Sequence
  derived and/or modified sequence
agcttccgcctggacccagcctcgtgggagccccgcgggtcctgcccagatgtggaagactgaggcctgttgaaagtgcagagctcagccctggcaccctctgttcccaagagctccatgcaggtgccacaggatggagaagaccttgctggccaaccttggtaccacggcctcctgtcccgccagggcaaggaagtggagcaacagtcagcctgcagatttggcacatatggggcggtcaagagaagaccccgctgggatggaagcctccaccatgcccatatctgccttgccccgaacgagcagtgacccggtgttgctgaaggcccctgctcccctgggaactgttgccgacagtctcagggcctccgatgggcagcttcaagccaaggcaccaacgaagcccccccggacaccctccttcgaactgcctgatgcctctgaacgtcccccgacgtactgcgagctggtgccccgagtgcccagtgtccagggaacatccccgagccaaagctgcccagagccagaggccccatggtgggaggccgaggaggatgaggaggaagagaatagatgttttacaagaccacaggctgagatctctttctgcccccatgatgccccctcctgcctgctgggcccccagaatcggcccctggaaccccaagtcctgcataccctccgtggcctgttcctggagcaccatcctgggagcaccgcccttcacctgctattggtagactgccaggccacaggcctcctgggagtgaccagagatcagcggggcaacatgggagtctcatctggcctggagctgctcactcttccccatggacaccacttgaggttggaactgctggagaggcatcagacactggcgctggccggggcgctggcggtgctgggctgctcggggccgctggaggagcgcgcagccgcactgaggggactggtagagctggcgctggcgctgcggccaggggcggcgggggacctgcccgggctggctgcagtcatgggcgccctgctcatgccccaggttcgtggggagcagggactggaggaagctggagtgcgggtgactgggaagactggagaggaggcgtgctcagatctcttctcccaggtgtcccggttggagcacacgtggcgccagctccgaaggagccacacggaggctgcgctggcctttgagcaggagctgaagccgctgatgcgggctctggatgagggcgctggaccctgcgaccccggcgaggtggcgctgccgcacgtggcacccatggttcgcctactggagggcgaggaagtcgcggggccgctggacgagagctgtgagcggctgttgcgcaccctgcacggggcgcgtcacatggtccgggacgcacccaaattccgcaaggtggcagcccagcgcctgcgaggattccggcctaacccggagctgagggaggccctgaccaccggcttcgtgcggaggctgctctggggtagccggggcgcgggagctccgcgcgctgaacgctttgagaagttccagcgcgtcctcggcgtcctgtcgcagcgcctggagcctgaccgctgagagcgcagacacccttcttcacacccgggacccccaggtttttgcgaaccccagaagagaccaaaggagtcgtcccaggctcctcgcgcctcaggtggaatcctgccctgtgcctcacagaagaggtggggaccgcagtcagggtcacctggaccatggtgaacatgtgacctgcagatctggcatcagaggccagagttcaaatgtgactccacctcttaaaagccgtgatttctagcagttgacttcacctctgtgtcggcctttaacaaaatcatagccatacagcagctcaggcctgtaatctcagcactttgggaggccgaggcggaaggaaggcttgaggccaggagttcaagaccagccagggcaacatggtgagacctcatctct

SEQ ID NO: 276121 - protein, 2303 aa, Artificial Sequence
  derived and/or modified sequence
MASSVAPYEQLVRQVEALKAENSHLRQELRDNSSHLSKLETETSGMKEVLKHLQGKLEQEARVLVSSGQTEVLEQLKALQMDITSLYNLKFQPPTLGPEPAARTPEGSPVHGSGPSKDSFGELSRATIRLLEELDRERCFLLNEIEKEEKEKLWYYSQLQGLSKRLDELPHVETQFSMQMDLIRQQLEFEAQHIRSLMEERFGTSDEMVQRAQIRASRLEQIDKELLEAQDRVQQTEPQALLAVKSVPVDEDPETEVPTHPEDGTPQPGNSKVEVVFWLLSMLATRDQEDTARTLLAMSSSPESCVAMRRSGCLPLLLQILHGTEAAAGGRAGAPGAPGAKDARMRANAALHNIVFSQPDQGLARKEMRVLHVLEQIRAYCETCWDWLQARDGGPEGGGAGSAPIPIEPQICQATCAVMKLSFDEEYRRAMNELGGLQAVAELLQVDYEMHKMTRDPLNLALRRYAGMTLTNLTFGDVANKATLCARRGCMEAIVAQLASDSEELHQVVSSILRNLSWRADINSKKVLREAGSVTALVQCVLRATKESTLKSVLSALWNLSAHSTENKAAICQVDGALGFLVSTLTYKCQSNSLAIIESGGGILRNVSSLVATREDYRQVLRDHNCLQTLLQHLTSHSLTIVSNACGTLWNLSARSARDQELLWDLGAVGMLRNLVHSKHKMIAMGSAAALRNLLAHRPAKHQAAATAVSPGSCVPSLYVRKQRALEAELDARHLAQALEHLEKQGPPAAEAATKKPLPPLRHLDGLAQDYASDSGCFDDDDAPSSLAAAAATGEPASPAALSLFLGSPFLQGQALARTPPTRRGGKEAEKDTSGEAAVAAKAKAKLALAVARIDQLVEDISALHTSSDDSFSLSSGDPGQEAPREGRAQSCSPCRGPEGGRREAGSRAHPLLRLKAAHASLSNDSLNSGSASDGYCPREHMLPCPLAALASRREDPRCGQPRPSRLDLDLPGCQAEPPAREATSADARVRTIKLSPTYQHVPLLEGASRAGAEPLAGPGISPGARKQAWLPADHLSKVPEKLAAAPLSVASKALQKLAAQEGPLSLSRCSSLSSLSSAGRPGPSEGGDLDDSDSSLEGLEEAGPSEAELDSTWRAPGATSLPVAIPAPRRNRGRGLGVEDATPSSSSENYVQETPLVLSRCSSVSSLGSFESPSIASSIPSEPCSGQGSGTISPSELPDSPGQTMPPSRSKTPPLAPAPQGPPEATQFSLQWESYVKRFLDIADCRERCRLPSELDAGSVRFTVEKPDENFSCASSLSALALHEHYVQQDVELRLLPSACPERGGGAGGAGLHFAGHRRREEGPAPTGSRPRGAADQELELLRECLGAAVPARLRKVASALVPGRRALPVPVYMLVPAPAPAQEDDSCTDSAEGTPVNFSSAASLSDETLQGPPRDQPGGPAGRQRPTGRPTSARQAMGHRHKAGGAGRSAEQSRGAGKNRAGLELPLGRPPSAPADKDGSKPGRTRGDGALQSLCLTTPTEEAVYCFYGNDSDEEPPAAAPTPTHRRTSAIPRAFTRERPQGRKEAPAPSKAAPAAPPPARTQPSLIADETPPCYSLSSSASSLSEPEPSEPPAVHPRGREPAVTKDPGPGGGRDSSPSPRAAEELLQRCISSALPRRRPPVSGLRRRKPRATRLDERPAEGSRERGEEAAGSDRASDLDSVEWRAIQEGANSIVTWLHQAAAATREASSESDSILSFVSGLSVGSTLQPPKHRKGRQAEGEMGSARRPEKRGAASVKTSGSPRSPAGPEKPRGTQKTTPGVPAVLRGRTVIYVPSPAPRAQPKGTPGPRATPRKVAPPCLAQPAAPAKVPSPGQQRSRSLHRPAKTSELATLSQPPRSATPPARLAKTPSSSSSQTSPASQPLPRKRPPVTQAAGALPGPGASPVPKTPARTLLAKQHKTQRSPVRIPFMQRPARRGPPPLARAVPEPGPRGRAGTEAGPGARGGRLGLVRVASALSSGSESSDRSGFRRQLTFIKESPGLRRRRSELSSAESAASAPQGASPRRGRPALPAVFLCSSRCEELRAAPRQGPAPARQRPPAARPSPGERPARRTTSESPSRLPVRAPAARPETVKRYASLPHISVARRPDGAVPAAPASADAARRSSDGEPRPLPRVAAPGTTWRRIRDEDVPHILRSTLPATALPLRGSTPEDAPAGPPPRKTSDAVVQTEEVAAPKTNSSTSPSLETREPPGAPAGGQLSLLGSDVDGPSLAKAPISAPFVHEGLGVAVGGFPASRHGSPSRSARVPPFNYVPSPMVVAATTDSAAEKAPATASATLLE

SEQ ID NO: 276122 - DNA, 10151 bp, Artificial Sequence
  derived and/or modified sequence
gcagcgccgcctgcccaggcccggaccgggctttgtccgccccggagcccctgcccgcgccgcggagaccccggagcccgcgcgctccgaggccaccccgggccgggatttccggtggggcccgcggagccgcgcagagggaggaggccccagacccaggcgccccgccagcccagctgcacgtaagcggacgctgcaggagctgaagatggcgagctccgtggcgccctacgagcagctggtgaggcaggtggaggccttgaaggctgagaacagccacctgaggcaggagctaagggacaactccagccacctgtccaagctggagacagagacgtcgggcatgaaggaggtcctgaagcacctacagggaaaactggagcaggaggcccgagtgctggtgtcctcggggcagacggaggtgctggagcagctgaaggccctacagatggacatcaccagcctgtacaacctcaagttccagccgcccaccctgggcccggagcctgccgcccggacccccgagggcagcccagtacacggctccgggccctccaaggacagctttggggagctgagccgggccaccatccggctgctggaggaactggaccgggaacggtgtttcctgctgaatgagattgagaaggaggagaaggagaagctctggtactactctcagctgcagggcctgtccaagcgcctggacgagctgccgcacgtggagacgcagttctcgatgcagatggacctgatccggcagcagcttgagttcgaggcccagcacatccgctcgctgatggaggagcgcttcggcacctcggacgagatggtgcagcgggcacagatccgcgcctcgcgcctggagcagattgacaaggagctgctggaggcgcaggaccgagtgcagcagacggagccccaggccttgctggcggtgaagtcggtgccggtggacgaggaccccgagacagaggtccccacacaccctgaggatggcacccctcagccgggcaacagcaaggtggaggtggtcttctggctgttgtccatgttggcgacgcgcgaccaggaggatacagcgcgcacgctgctggccatgtccagctcgcccgagagctgcgtggccatgcgccgctcgggctgtctgcctctgctgctgcaaatcctccacggcaccgaggccgcggccgggggtcgcgccggggccccaggggcaccgggcgccaaggacgcacgcatgcgcgccaacgcggcgctgcacaacatcgtcttctcgcagccggaccagggcctggcgcgcaaggagatgcgcgtcctgcacgtgctggagcagatccgggcctactgcgagacctgctgggactggctgcaggcccgagacggcgggcccgagggaggtggcgccggcagcgccccgatccccatcgagccgcagatctgccaggccacctgtgctgttatgaagctgtcctttgatgaggagtaccgccgtgccatgaacgagctaggtgggctgcaggccgtggcagagctgctgcaggttgactatgagatgcacaagatgacccgggacccgctgaacctggcgctgcgccgctacgcgggcatgaccctcaccaacctcacctttggggacgttgccaacaaggccaccctgtgtgcgcgccgcggctgcatggaggccatcgtggcccagctggcctccgacagtgaggagctccaccaggtggtgtccagcatccttcggaacttgtcctggagggccgacatcaacagcaagaaggtgctgagggaggcgggcagcgtgactgccctggtgcagtgtgtcctgcgggccaccaaggagtccaccctgaagagcgtgctgagcgccctgtggaatctgtctgcacacagcacagagaacaaggcggccatctgccaggtggatggcgccctgggcttcctggtgagcaccctgacctacaagtgtcagagcaactcgctggccatcatcgagagcggcggcggcatcctccgcaatgtgtccagcctcgtcgccacccgtgaggactacaggcaggtgctccgggatcacaactgtctgcagacgctgctgcagcatctgacttcgcacagcctgaccatcgtgagcaacgcgtgcggcacgctctggaacctgtcggcccgcagcgcccgtgaccaggagctgctgtgggacctgggcgccgtgggcatgctgcgtaatctggtgcactccaagcacaagatgatcgccatgggcagcgccgccgccctgcgcaacctgctggcccatcggcccgccaagcaccaggcggccgccaccgccgtgtccccaggcagctgcgtgcccagcctgtacgtgcgcaagcagcgggcgctggaggccgagctggacgcacggcacctcgcgcaggcgctggagcacctggagaagcagggcccgccggcagccgaggccgccactaagaagccgctgccgcccctgcgacacctggacggcctggcccaagactatgcttccgattcgggctgctttgacgacgacgatgcaccgtcatccctggctgcggccgcggccaccggggagccagccagccctgccgcgctgtccctcttcctgggcagccccttcctgcaggggcaggcgctggctcgcaccccgcccacccgccgaggcggcaaggaggcagagaaggacaccagtggggaggcagccgtggcggccaaggccaaggccaagctggcgcttgcagtggcgcgcatcgaccagctggtggaggacatctccgccctgcacacctcgtccgacgatagcttcagcctcagctctggagacccgggacaggaggcgccacgggagggccgcgcccagtcctgctcgccatgccgcggcccggagggcgggcggcgagaggcaggaagccgggcgcacccgctgctgcggctcaaggcggcccacgccagcctctccaacgacagcctcaacagcggcagtgccagcgacgggtactgcccacgcgaacatatgctgccctgcccgctggccgcactggcttcgcgccgcgaggaccccaggtgtgggcagcctcggcccagccggcttgaccttgacctgcccggctgccaggccgagcccccggcccgcgaggccacctccgccgacgcccgcgtgcgcaccatcaagctgtcgcctacctatcagcacgtgccactgcttgagggtgcctcaagggcgggtgcagagcccctcgcggggcctggaatctctccaggggcccggaagcaggcctggctgccggcagaccacctgagcaaggttcccgagaagctggcggctgccccgctgtctgtggccagcaaggcactgcagaaactggcggcgcaagaggggccactctcgctgtcccgatgcagctccctttcctcgctgtcctcggccggccgcccaggccccagcgagggtggtgacctggatgacagtgactcctccctggaggggctggaggaggccggccccagcgaggctgagctggacagcacgtggcgggcgcccggggccacctcgctgcccgtagccattccggctccccggcgtaaccgaggccggggcctgggggtggaagacgccacgccgtccagctcgtcggagaactacgtgcaggagacaccgcttgtgctgagccgctgcagctctgtgagctcgctgggcagcttcgagagcccgtccatcgccagctccatccccagtgaaccttgcagcgggcagggcagcggcaccatcagccctagcgagctgcccgacagccccggacagaccatgcctcccagccggagcaagacgccaccgctggcgcccgcgccacagggtccccccgaggccacccagttcagcctgcagtgggagagctacgtgaagcgcttcctggacatcgccgactgccgggagcgctgccggctgccatctgagctggacgcaggcagcgtgcgctttaccgtggagaagccagacgagaacttctcgtgcgcctccagcctcagcgcgctggccttgcacgagcactacgtgcagcaggacgtggagctgcggctgctgccctcggcctgccccgagcgcggcgggggcgccgggggcgccggcctccactttgcagggcaccggcggcgggaggaggggccggcgcccacgggttctcgccctcgcggcgccgcggaccaggagctggaactgctgcgggagtgcctgggagccgccgtgcctgcccggctgcgcaaggtggcctccgcgctggtgccaggtcgccgcgcactccccgtgcccgtctacatgttggtgcccgccccggccccggcccaggaggacgactcctgcactgactccgcggagggcacgccggtcaacttctctagcgccgcctcgctcagcgacgagacgctgcagggaccccccagggaccagcccgggggaccagcgggcaggcaaagacccaccggccgccccacctctgccagacaggccatggggcaccggcacaaggcgggaggcgccggccgcagcgcggagcagtctcggggcgcgggcaagaacagagcagggctggagctgcccctgggccggcccccgagcgcccccgcagacaaggacggctcaaagcccggccggacccgcggggacggggcgctccagtcgctgtgcctcacgacgcccactgaggaggccgtgtactgcttctacggcaacgactcggacgaggagcccccggcggccgcgcccacgccaacccaccggcgcacatcggccatccctcgcgcttttacgcgggagcgtccgcagggccggaaggaggcccctgccccgtccaaggctgcaccagctgccccgccgcccgcccggacccagcccagcctcattgctgacgagaccccgccctgctactccctgagctcctccgccagctccctcagcgagcccgagccctcggagccgccggccgtccatccacgaggccgggagcccgcggtcaccaaggacccgggcccaggaggcggacgcgacagctcgcccagcccgcgggccgcggaggagcttctgcagcggtgcatcagctcggccctgcccaggcgccggccccccgtgtctggcctgcggcgccgcaagccccgagccacccggctggatgagcggcccgcagaggggtcccgggaacgcggcgaggaggcagcgggctcggaccgggcctccgacctggatagcgtggagtggcgcgccatccaggagggcgccaattcaattgtcacgtggctgcaccaggcagcagctgccacgcgggaggcctcgtccgagtccgactccatcctgtccttcgtatccgggctgtcagtgggatccaccctacagccccccaagcacaggaagggacgacaggcggagggagaaatgggcagtgcccggcggccagagaaaaggggcgcagcctcagtcaagaccagcgggagcccccgttcccctgcaggccccgagaagccacgtggcacacagaagaccacgcccggggtgccagctgtgctccggggacgaacagtgatctacgtccccagcccggcaccccgtgcccagcccaaagggacccccggcccccgcgccacaccgcggaaggtggcgcccccttgcctggcacagcccgcggctccagccaaagtcccgagccccgggcagcagcggtcgcggagcctacaccggcctgccaagacctcggagctggcgacgctgagccagccccccagaagcgccacaccgcccgcccgcctcgccaagaccccctcctccagctcctcccagacctcgcccgcctcccagcccctgcccagaaagcgccccccggtcacccaggctgctggggccctgcccggccccggagcctccccggtgcccaaaacgccggcgcgcacccttctggcgaagcagcacaagacgcagagatcgcccgtgcggatcccgttcatgcagaggccggcccggcgtgggccgccaccgctggctcgggcagtcccggagccgggccccaggggccgggcggggaccgaggcgggcccgggggcgcgcgggggccgcctgggcctggtgcgtgtggcctcagccctctccagcggcagcgagtcctccgaccgctcgggcttccggcgacagctaaccttcatcaaggagtcgccgggcttgcggcgccgccgctccgagctgtcctcggccgagtccgcggcctctgccccccagggcgcctcgccccgccgcggccggcccgcgctgcccgccgtcttcctctgctcctcgcgctgcgaagagctccgagcggcaccccggcagggcccggccccggcccggcagcggccccccgcggcccgacccagccctggcgagcgccctgcccggcgcaccacctccgagagcccgtcccgcctgcctgtgcgcgcgcccgccgcccggccggagactgtcaagcgctacgcgtcgctgccgcacatcagcgtggcccgcaggcccgacggcgccgtccccgcggcccctgcctcagccgacgccgcgcgccgcagcagcgacggggagccccggccgctccccagggtggccgcgccgggcacgacctggcggcgcatccgagatgaggacgtgccccacatcctgcgcagcacgcttcccgccacggccctgccactgcggggctccacgcccgaggacgccccggccgggcccccgccgcgcaagaccagcgacgccgtggtccagaccgaggaggtcgccgcccccaagaccaactccagcacgtccccgagcctggagaccagggagccccccggggcccccgccggcggccagctctccctcctcggcagcgacgtggacggtcccagcctcgccaaggctcccatctccgcacccttcgtgcacgagggcctgggggtcgccgtggggggcttccccgccagccggcacggctcccccagccgctcggcccgagtaccccccttcaactatgtgcccagccccatggtggtcgcagccaccaccgactcggccgcggagaaagccccggccactgcctccgccaccctcctggaatagtggcctaggccggccttctggaacgttctctcccggccctgcggcgcggtctggctgccccatgggcctgcgctgtagacgtcccccataggtcgccccagggcctctgcccacccgagccccaccactctcagaacccccgcccagcgcacggcgacctcgcgcctcaccggaagaccttgcctctgtgccgcggaggtccaggaggaaacggggcggccgctaggcctcaagtcccgaccgtggagcgctggcaagggcgtcctggcccagccctgagcgcgcggcccttcccctgtcggaagccgttgcttgaccccgggcgagggaggcggtagcctccgggtccgggtctgggtctgggtccgctgcttcgcagggacagcgctggggaggtgacggcgcccgccgcaggtggggcgaggctgggggagggcggcgccgcggcgggcctgccagctgggggcctttgcggcgcgcaggggcgaagcctgtaatcactgcagccgccggtaattcgctaatgagggctttgcagggattgttttcattctcagccccagctgtgggagtgcgggtgggggtgtggccgagccccggcaggaagccccgcccagacggtgttcagggaacccggagcccaagcgctccggcggagcccaaaagggtgggggtgggaggggcagaggccaacggatccccctgcctgtcgcaccccttggcgggagacgggaaggcagcgggctgcgtacgatgggaccctggtgcagacgccgggccggctgacatttggaccccatcccagaggagatgctggctaccagctggggcgaccccaagggtcgctggagtcagtatcggcccggcgcagccgcggcgggcgaggccaatggaaaggagactgaggggagtcccggcagtgagcccgaggccctgggacctggagcccgcgctggcctctccccagcggagcctgcacgttacggagaccatcacatgtgggcgtggtcagtgcccaggaccgcaccgctgctcatcttgtcccttttcaattcccttctggttcatgatgcataaagcgctaggccctagaactccagaaacagcacagctggggcggggacccagccttgccctccacccgaggctctgggacaaggcgggaggttcgggggccttccggcaggtgaacgcagggctggagagtatttggtgccagatgaggtgaaagcttatagaagggcctgaggggctcggctgcctcatcccctggcgggggaggctgggagctgggcctcctgcgtggggtgggactcgcaggggccgggtctccgtgactggggcaacgcctcgtcctgcagagggagccgacgacctcttttctgcagaaaagctccagcaggcgctgccttcacccacggatctgcccaggctgaaggcacacgctcaatgccccacgtgccttctccaggaggaacgaagcagggtttgagggttgggtggatggagctcagaaggaaaccccagccccaccacggatgacaccatccctcccgtcccatccccagcatgggcaaggccagcctttctggcagaaggagctgtcctcaactcagggccgctgtgagcaaagctgaccccagcccccacccccagttaacactgctgcttctctgaatgcatgtcacgctgcaccccatgctccgggcccacaccctgcaggacaaggagctccagacaggacgtccataagtcaccgaggtgtgccacccagcaggtgctggaggtgcccaatgctccctcctaggacctcgcagccaggcaaggctgtcaggttgttttgggggaagagggggtcatggatggctgagcagagagcggggaaaatgcaggctgagtggggcgacctcctgcctgccaggagccccctttcaggacacagcgggggtctcacacttgctgtccccatccatggcccgagggggaacctggtggtctcttctgagcttttggacttggggatgccaaacacgtgctcaccctcacactcgccccggcccgctgcgcccctaattgccaaagggtagggaaatggcgaagccagccaccaggtcgctggtgacagggccagggttatgcaggaaggtggtgcggcattgccttccacatatgtaagtctctgggcggcgccctcccagctccctgcctctgtttccccatgtgggccgtggggaactcccagagctacctcttgggggagcgtggtggcagcgatgatggggagacgcctggaagctcacagaacttgggtctggctggctcctgcccgtgacgccttgcccagcagcaaggtgcgcaacatggctgccagccccgcctcccacccccaccccgagtcctgagctcactttcgccttctccatcccctgccgtgggggccacagccacacctcaccgcccagtccagctgtctccagaaggggacaggcagtccgcggtctctggacaatcaactcaaggtacgcccactgcaaggcctccctcccaccgcggcccctgcctggccacctggcctctctgcaccagggtgacaaggggtcctcgtctgccccccaatgctccagggccagtcctaaggagctgagggtctgaggacgcagggagggtggaggtgtcctgaggctgatggacagtgaccgccactggcccccaacatgaccacacgtgggtgctgaactcggggcgccgtgcccaccggcatggtcctcccgagctccgacagcattacctcacccggccccatctgttgccccggtccagccctgatggcgcgcgcctggtctgtctgattcccctagccgccaccccacgtttctgtaccgggtctctgcagtgttaaacggacgtgtaaatagtggtaaatagtgaaagcctgtccttccctaaatgtaaagccatctgtccggcgtaaggacgacaccgtcagctgtccgactcgcacacatttaataaactgagctcttgcattgcc

SEQ ID NO: 276123 - DNA, 11650 bp, Artificial Sequence
  derived and/or modified sequence
gggtttggggagcaggaggcagacatgtgttgctttgcacgtcatctggtccttccacctggctgggcatgggatggtgacctcagctggaacatggggctcgagccagaccccagggtctccctgcgtgtagcccccaaccccaagcctgatccccactggagacctgaacagccttggacatcatcggatcagggtgggaggtgccagcctctgccacctgacttccagtccctgtgcccctcccaccctgcccttgggcactcctgccctgcaggttcctcagaggggcaacccaaagccagagaggggcgggtcttgtcgggcctccagcctggacttcccagcccctctggggcagcatctgggtgccagacctcggttcctagggcctcgtttctccctctgggaacagccaaatggtggtccctgagactcaggacagaccaagaaggagccggatgacatggcaagccacacactgcgtcccctgagcaggacgggacagcccgactccatcctcccacctgcgactgagcccccacccctactcctgtcccagccgtgcccctggtgacatttgggtgggaggggaggggatgagggggcacctgggggtcagagaacaaatgacgggtgaatacatgtgtgtggccaggtggaggagggaggggaggagcaggtgggctggacagggccggtgtgaggaaggggctcaggctggcagggggaggtggcagagggatgggctgccattggtgcgtctgagacaaaggcggagggaggaggcgagcgctgatgggaaaggaacaaagagggaaggggggcgtgaaggggggctccggcgggagggccgagccgagggaggaggcgccggccagctggacagagggaggaggccaggccagagccagaagacggccagaggcacaaagaagccagcgcgctggcagagtcaagggatggggcaggggctgccggggccagcagggaccagctgaaggctgcgcagggggtgcgggccacacaggtagccaccctgagctcagccaccgatggagggtcgtggggctgctgcggtgatggcggtgggcttgggtccatctgtcctgccgtttctgcacagcttaggtgtcacccactggccttcgtggtgttttcattgtccatcggcagggacagctggtggtctgtccgccccgcgtgtctggctgtcagcctctgggcaggcttgcttttatgggggagggtcctgtctgtctgtctgtcgccctctctggctgtgagcctgggggtgctgggctggccagtcggcttgctgggttaggctgtcccagctgtctgtgtgtttgtccggctgtcaggatgtgtcctgggggctgggaaggagaggccgacccatcgtctgtcggtcgactggtcagttggacgttcagctgtctgtacgtctgtctgctggcccctctgtctccccttggggccacctctcactccacctgcccctctgcgccccggattgcctggccaccaccacgtgggcctgtacttgtccacaccagtgactcctgcctgagaccccccccaacccaggatcaggcaggacggctggggcttaggtcaggggccgtctgtccggaaggcatcaccgcgccctccccagaccatcagctgaaccctctgaccctgtgatcccagacgctgcaggagctgaagatggcgagctccgtggcgccctacgagcagctggtgaggcaggtggaggccttgaaggctgagaacagccacctgaggcaggagctaagggacaactccagccacctgtccaagctggagacagagacgtcgggcatgaaggaggtcctgaagcacctacagggaaaactggagcaggaggcccgagtgctggtgtcctcggggcagacggaggtgctggagcagctgaaggccctacagatggacatcaccagcctgtacaacctcaagttccagccgcccaccctgggcccggagcctgccgcccggacccccgagggcagcccagtacacggctccgggccctccaaggacagctttggggagctgagccgggccaccatccggctgctggaggaactggaccgggaacggtgtttcctgctgaatgagattgagaaggaggagaaggagaagctctggtactactctcagctgcagggcctgtccaagcgcctggacgagctgccgcacgtggagacgcagttctcgatgcagatggacctgatccggcagcagcttgagttcgaggcccagcacatccgctcgctgatggaggagcgcttcggcacctcggacgagatggtgcagcgggcacagatccgcgcctcgcgcctggagcagattgacaaggagctgctggaggcgcaggaccgagtgcagcagacggagccccaggccttgctggcggtgaagtcggtgccggtggacgaggaccccgagacagaggtccccacacaccctgaggatggcacccctcagccgggcaacagcaaggtggaggtggtcttctggctgttgtccatgttggcgacgcgcgaccaggaggatacagcgcgcacgctgctggccatgtccagctcgcccgagagctgcgtggccatgcgccgctcgggctgtctgcctctgctgctgcaaatcctccacggcaccgaggccgcggccgggggtcgcgccggggccccaggggcaccgggcgccaaggacgcacgcatgcgcgccaacgcggcgctgcacaacatcgtcttctcgcagccggaccagggcctggcgcgcaaggagatgcgcgtcctgcacgtgctggagcagatccgggcctactgcgagacctgctgggactggctgcaggcccgagacggcgggcccgagggaggtggcgccggcagcgccccgatccccatcgagccgcagatctgccaggccacctgtgctgttatgaagctgtcctttgatgaggagtaccgccgtgccatgaacgagctaggtgggctgcaggccgtggcagagctgctgcaggttgactatgagatgcacaagatgacccgggacccgctgaacctggcgctgcgccgctacgcgggcatgaccctcaccaacctcacctttggggacgttgccaacaaggccaccctgtgtgcgcgccgcggctgcatggaggccatcgtggcccagctggcctccgacagtgaggagctccaccaggtggtgtccagcatccttcggaacttgtcctggagggccgacatcaacagcaagaaggtgctgagggaggcgggcagcgtgactgccctggtgcagtgtgtcctgcgggccaccaaggagtccaccctgaagagcgtgctgagcgccctgtggaatctgtctgcacacagcacagagaacaaggcggccatctgccaggtggatggcgccctgggcttcctggtgagcaccctgacctacaagtgtcagagcaactcgctggccatcatcgagagcggcggcggcatcctccgcaatgtgtccagcctcgtcgccacccgtgaggactacaggcaggtgctccgggatcacaactgtctgcagacgctgctgcagcatctgacttcgcacagcctgaccatcgtgagcaacgcgtgcggcacgctctggaacctgtcggcccgcagcgcccgtgaccaggagctgctgtgggacctgggcgccgtgggcatgctgcgtaatctggtgcactccaagcacaagatgatcgccatgggcagcgccgccgccctgcgcaacctgctggcccatcggcccgccaagcaccaggcggccgccaccgccgtgtccccaggcagctgcgtgcccagcctgtacgtgcgcaagcagcgggcgctggaggccgagctggacgcacggcacctcgcgcaggcgctggagcacctggagaagcagggcccgccggcagccgaggccgccactaagaagccgctgccgcccctgcgacacctggacggcctggcccaagactatgcttccgattcgggctgctttgacgacgacgatgcaccgtcatccctggctgcggccgcggccaccggggagccagccagccctgccgcgctgtccctcttcctgggcagccccttcctgcaggggcaggcgctggctcgcaccccgcccacccgccgaggcggcaaggaggcagagaaggacaccagtggggaggcagccgtggcggccaaggccaaggccaagctggcgcttgcagtggcgcgcatcgaccagctggtggaggacatctccgccctgcacacctcgtccgacgatagcttcagcctcagctctggagacccgggacaggaggcgccacgggagggccgcgcccagtcctgctcgccatgccgcggcccggagggcgggcggcgagaggcaggaagccgggcgcacccgctgctgcggctcaaggcggcccacgccagcctctccaacgacagcctcaacagcggcagtgccagcgacgggtactgcccacgcgaacatatgctgccctgcccgctggccgcactggcttcgcgccgcgaggaccccaggtgtgggcagcctcggcccagccggcttgaccttgacctgcccggctgccaggccgagcccccggcccgcgaggccacctccgccgacgcccgcgtgcgcaccatcaagctgtcgcctacctatcagcacgtgccactgcttgagggtgcctcaagggcgggtgcagagcccctcgcggggcctggaatctctccaggggcccggaagcaggcctggctgccggcagaccacctgagcaaggttcccgagaagctggcggctgccccgctgtctgtggccagcaaggcactgcagaaactggcggcgcaagaggggccactctcgctgtcccgatgcagctccctttcctcgctgtcctcggccggccgcccaggccccagcgagggtggtgacctggatgacagtgactcctccctggaggggctggaggaggccggccccagcgaggctgagctggacagcacgtggcgggcgcccggggccacctcgctgcccgtagccattccggctccccggcgtaaccgaggccggggcctgggggtggaagacgccacgccgtccagctcgtcggagaactacgtgcaggagacaccgcttgtgctgagccgctgcagctctgtgagctcgctgggcagcttcgagagcccgtccatcgccagctccatccccagtgaaccttgcagcgggcagggcagcggcaccatcagccctagcgagctgcccgacagccccggacagaccatgcctcccagccggagcaagacgccaccgctggcgcccgcgccacagggtccccccgaggccacccagttcagcctgcagtgggagagctacgtgaagcgcttcctggacatcgccgactgccgggagcgctgccggctgccatctgagctggacgcaggcagcgtgcgctttaccgtggagaagccagacgagaacttctcgtgcgcctccagcctcagcgcgctggccttgcacgagcactacgtgcagcaggacgtggagctgcggctgctgccctcggcctgccccgagcgcggcgggggcgccgggggcgccggcctccactttgcagggcaccggcggcgggaggaggggccggcgcccacgggttctcgccctcgcggcgccgcggaccaggagctggaactgctgcgggagtgcctgggagccgccgtgcctgcccggctgcgcaaggtggcctccgcgctggtgccaggtcgccgcgcactccccgtgcccgtctacatgttggtgcccgccccggccccggcccaggaggacgactcctgcactgactccgcggagggcacgccggtcaacttctctagcgccgcctcgctcagcgacgagacgctgcagggaccccccagggaccagcccgggggaccagcgggcaggcaaagacccaccggccgccccacctctgccagacaggccatggggcaccggcacaaggcgggaggcgccggccgcagcgcggagcagtctcggggcgcgggcaagaacagagcagggctggagctgcccctgggccggcccccgagcgcccccgcagacaaggacggctcaaagcccggccggacccgcggggacggggcgctccagtcgctgtgcctcacgacgcccactgaggaggccgtgtactgcttctacggcaacgactcggacgaggagcccccggcggccgcgcccacgccaacccaccggcgcacatcggccatccctcgcgcttttacgcgggagcgtccgcagggccggaaggaggcccctgccccgtccaaggctgcaccagctgccccgccgcccgcccggacccagcccagcctcattgctgacgagaccccgccctgctactccctgagctcctccgccagctccctcagcgagcccgagccctcggagccgccggccgtccatccacgaggccgggagcccgcggtcaccaaggacccgggcccaggaggcggacgcgacagctcgcccagcccgcgggccgcggaggagcttctgcagcggtgcatcagctcggccctgcccaggcgccggccccccgtgtctggcctgcggcgccgcaagccccgagccacccggctggatgagcggcccgcagaggggtcccgggaacgcggcgaggaggcagcgggctcggaccgggcctccgacctggatagcgtggagtggcgcgccatccaggagggcgccaattcaattgtcacgtggctgcaccaggcagcagctgccacgcgggaggcctcgtccgagtccgactccatcctgtccttcgtatccgggctgtcagtgggatccaccctacagccccccaagcacaggaagggacgacaggcggagggagaaatgggcagtgcccggcggccagagaaaaggggcgcagcctcagtcaagaccagcgggagcccccgttcccctgcaggccccgagaagccacgtggcacacagaagaccacgcccggggtgccagctgtgctccggggacgaacagtgatctacgtccccagcccggcaccccgtgcccagcccaaagggacccccggcccccgcgccacaccgcggaaggtggcgcccccttgcctggcacagcccgcggctccagccaaagtcccgagccccgggcagcagcggtcgcggagcctacaccggcctgccaagacctcggagctggcgacgctgagccagccccccagaagcgccacaccgcccgcccgcctcgccaagaccccctcctccagctcctcccagacctcgcccgcctcccagcccctgcccagaaagcgccccccggtcacccaggctgctggggccctgcccggccccggagcctccccggtgcccaaaacgccggcgcgcacccttctggcgaagcagcacaagacgcagagatcgcccgtgcggatcccgttcatgcagaggccggcccggcgtgggccgccaccgctggctcgggcagtcccggagccgggccccaggggccgggcggggaccgaggcgggcccgggggcgcgcgggggccgcctgggcctggtgcgtgtggcctcagccctctccagcggcagcgagtcctccgaccgctcgggcttccggcgacagctaaccttcatcaaggagtcgccgggcttgcggcgccgccgctccgagctgtcctcggccgagtccgcggcctctgccccccagggcgcctcgccccgccgcggccggcccgcgctgcccgccgtcttcctctgctcctcgcgctgcgaagagctccgagcggcaccccggcagggcccggccccggcccggcagcggccccccgcggcccgacccagccctggcgagcgccctgcccggcgcaccacctccgagagcccgtcccgcctgcctgtgcgcgcgcccgccgcccggccggagactgtcaagcgctacgcgtcgctgccgcacatcagcgtggcccgcaggcccgacggcgccgtccccgcggcccctgcctcagccgacgccgcgcgccgcagcagcgacggggagccccggccgctccccagggtggccgcgccgggcacgacctggcggcgcatccgagatgaggacgtgccccacatcctgcgcagcacgcttcccgccacggccctgccactgcggggctccacgcccgaggacgccccggccgggcccccgccgcgcaagaccagcgacgccgtggtccagaccgaggaggtcgccgcccccaagaccaactccagcacgtccccgagcctggagaccagggagccccccggggcccccgccggcggccagctctccctcctcggcagcgacgtggacggtcccagcctcgccaaggctcccatctccgcacccttcgtgcacgagggcctgggggtcgccgtggggggcttccccgccagccggcacggctcccccagccgctcggcccgagtaccccccttcaactatgtgcccagccccatggtggtcgcagccaccaccgactcggccgcggagaaagccccggccactgcctccgccaccctcctggaatagtggcctaggccggccttctggaacgttctctcccggccctgcggcgcggtctggctgccccatgggcctgcgctgtagacgtcccccataggtcgccccagggcctctgcccacccgagccccaccactctcagaacccccgcccagcgcacggcgacctcgcgcctcaccggaagaccttgcctctgtgccgcggaggtccaggaggaaacggggcggccgctaggcctcaagtcccgaccgtggagcgctggcaagggcgtcctggcccagccctgagcgcgcggcccttcccctgtcggaagccgttgcttgaccccgggcgagggaggcggtagcctccgggtccgggtctgggtctgggtccgctgcttcgcagggacagcgctggggaggtgacggcgcccgccgcaggtggggcgaggctgggggagggcggcgccgcggcgggcctgccagctgggggcctttgcggcgcgcaggggcgaagcctgtaatcactgcagccgccggtaattcgctaatgagggctttgcagggattgttttcattctcagccccagctgtgggagtgcgggtgggggtgtggccgagccccggcaggaagccccgcccagacggtgttcagggaacccggagcccaagcgctccggcggagcccaaaagggtgggggtgggaggggcagaggccaacggatccccctgcctgtcgcaccccttggcgggagacgggaaggcagcgggctgcgtacgatgggaccctggtgcagacgccgggccggctgacatttggaccccatcccagaggagatgctggctaccagctggggcgaccccaagggtcgctggagtcagtatcggcccggcgcagccgcggcgggcgaggccaatggaaaggagactgaggggagtcccggcagtgagcccgaggccctgggacctggagcccgcgctggcctctccccagcggagcctgcacgttacggagaccatcacatgtgggcgtggtcagtgcccaggaccgcaccgctgctcatcttgtcccttttcaattcccttctggttcatgatgcataaagcgctaggccctagaactccagaaacagcacagctggggcggggacccagccttgccctccacccgaggctctgggacaaggcgggaggttcgggggccttccggcaggtgaacgcagggctggagagtatttggtgccagatgaggtgaaagcttatagaagggcctgaggggctcggctgcctcatcccctggcgggggaggctgggagctgggcctcctgcgtggggtgggactcgcaggggccgggtctccgtgactggggcaacgcctcgtcctgcagagggagccgacgacctcttttctgcagaaaagctccagcaggcgctgccttcacccacggatctgcccaggctgaaggcacacgctcaatgccccacgtgccttctccaggaggaacgaagcagggtttgagggttgggtggatggagctcagaaggaaaccccagccccaccacggatgacaccatccctcccgtcccatccccagcatgggcaaggccagcctttctggcagaaggagctgtcctcaactcagggccgctgtgagcaaagctgaccccagcccccacccccagttaacactgctgcttctctgaatgcatgtcacgctgcaccccatgctccgggcccacaccctgcaggacaaggagctccagacaggacgtccataagtcaccgaggtgtgccacccagcaggtgctggaggtgcccaatgctccctcctaggacctcgcagccaggcaaggctgtcaggttgttttgggggaagagggggtcatggatggctgagcagagagcggggaaaatgcaggctgagtggggcgacctcctgcctgccaggagccccctttcaggacacagcgggggtctcacacttgctgtccccatccatggcccgagggggaacctggtggtctcttctgagcttttggacttggggatgccaaacacgtgctcaccctcacactcgccccggcccgctgcgcccctaattgccaaagggtagggaaatggcgaagccagccaccaggtcgctggtgacagggccagggttatgcaggaaggtggtgcggcattgccttccacatatgtaagtctctgggcggcgccctcccagctccctgcctctgtttccccatgtgggccgtggggaactcccagagctacctcttgggggagcgtggtggcagcgatgatggggagacgcctggaagctcacagaacttgggtctggctggctcctgcccgtgacgccttgcccagcagcaaggtgcgcaacatggctgccagccccgcctcccacccccaccccgagtcctgagctcactttcgccttctccatcccctgccgtgggggccacagccacacctcaccgcccagtccagctgtctccagaaggggacaggcagtccgcggtctctggacaatcaactcaaggtacgcccactgcaaggcctccctcccaccgcggcccctgcctggccacctggcctctctgcaccagggtgacaaggggtcctcgtctgccccccaatgctccagggccagtcctaaggagctgagggtctgaggacgcagggagggtggaggtgtcctgaggctgatggacagtgaccgccactggcccccaacatgaccacacgtgggtgctgaactcggggcgccgtgcccaccggcatggtcctcccgagctccgacagcattacctcacccggccccatctgttgccccggtccagccctgatggcgcgcgcctggtctgtctgattcccctagccgccaccccacgtttctgtaccgggtctctgcagtgttaaacggacgtgtaaatagtggtaaatagtgaaagcctgtccttccctaaatgtaaagccatctgtccggcgtaaggacgacaccgtcagctgtccgactcgcacacatttaataaactgagctcttgc

SEQ ID NO: 276124 - DNA, 294 bp, Artificial Sequence
  derived and/or modified sequence
atgggcagcatccccagcaagccctgcaacaaccccgagggccccctgctgcagggcatggaggccgccgactggaccggcatcggcgtgtgcctgccccccggcggcgccagaggccacatctactgctgcaccagactgtgccaccagagagccgccagcgcccacagaagcctgctgctgcccagaaccgtgcagaccggcggcaccgagagagagaagcccggccccggccagagaaagagaggcgcccactgcagcgcctgcaagagaagcagcaccagacccagctag

SEQ ID NO: 276125 - DNA, 4335 bp, Artificial Sequence
  derived and/or modified sequence
gcggcggcggcgagggcccgggtgggtggccgaacttctcccgccatggagggagcagcggcccgggaggcccgggggaccgagaccccgcgcgcgtctgcgcccccgcccgcgccctcggagcccccggccgcgccccgcgcccgcccgcgcctcgtcttccgcacgcagctggcgcacgggagccccacgggcaagatcgagggcttcaccaacgtccgcgagctgtacgccaagatcgccgaagccttcgggatcgcgcccaccgagattttattctgcaccctcaacagccacaaagtggacatgcagaagctcctggggggtcagataggcctggaggacttcatctttgcccacgtgcgaggcgagaccaaggaggtggaggtcactaagacagaggatgctctggggctgaccatcacggacaacggggctggctacgccttcatcaagagaatcaaggaaggcagtatcatcaaccggatcgaggcagtgtgcgtgggtgacagcatcgaagccatcaacgaccactccattgtgggctgccgccactacgaggtggccaagatgctccgggagctgcccaagtcccagcccttcaccctgcgcctggtgcagcccaagagggccttcgatatgattggccagagaagtcggtccagcaaatgtccagtagaggcgaaagtgaccagcgggagggagaccctgcggcttcgttctgggggggctgccacagtggaggaagcgcccagtgagtttgaggaggaggcatctcggaaggttgatgacctgctggaaagctacatgggcattcgggaccccgagctggcgtccaccatggtggagacgtccaagaagacagcgagcgcccaggagtttgcacgctgtttagactccgtcttgggcgagttcgccttccccgacgagtttgtggtggaagtgtgggccgccatcggcgaggccagagaggcctgtggctagtttgccctgggggggcccagcacagccccagcccggagcccagccccctgccccggccctgctccagaacccagcccagatcggaggacaagttcctctctagaacccaatccaatttggagccccagcccaactccagaacccaacccttctctagaatccagcccagatctgaggccaagctatgtgctagagcccaggccagctctgagaccaagcccagcattgagaataagctctgttctaaaactcaggccagccctgagaccaagcccagctctagaactcagatgagctttgagaccatgcccagcactgagaccaagccctgttctagaactcaggcctgctctgaggccaagcccagctctagaacccagatgagctctgagaccatgcccagctctagaactcagatgggctctgagaccatgcccagctctagaactcagatgggctctgagaccgagcccagctctagaactcagatgggctctgagaccgagcccagctctaaaactcagatgggctctgagaccatgcccagctctagaactcagatgggctctgagaccgagcccagctctagaactcagatgggctctgagaccgagcccagctctagaactcagatgggctctgagaccatgcccagctctagaactcagatgggctccgagaccaagcccagctctagaacccagatgagctctgagaccatgcccagctctagaactcagatgagctctgagacagagcccagtattgagaccaagccctgttctagagtccaggccagctccgagaccaagcccagctctagaacccagataagctctgaaaccaagcccagcatagagaccaagccgtgttctagaattcaggccacatctgaagccaagcccagctctagaactcaggtcagccctgagaccaagcccagctctagaacccagataagctctgaaaccaatcccagcattgagaccaagccctgttctagaactcaggccacctctgaggccaaacccagctctagaacccagataagatctgagaccaagccctgctctgaagcccaggccagctctgagacgaagcacatctctagaatccagctgagccctgacaacaagccaaactctggaacccagacacattttaagacccagaccagcttggagaccaatcccagttccagaatccaggctagctcggagaccaagccctgctggaaaactcaagctgactctggaactctggacagctccacgatgcagccacacctggacactcggtctagctccggaaccccagttaattttggaacccatgtgagattcatgaagcagcccagctctggaaccccagtcagctcaggattcagagacagctcccaaatcaaatcctattcaagaactcagaccagctcagaaacccaggtccacacggctgcccagtccagatcccaaccccagttgcatccaagtgcccatccccatcctgcagcccagtccagctccagtgatgattccagctctgagactgagcccagctctagaacctcgcctagtgctacaaccaggcccaactccaggattcagaccagctctggaaccccatccatcttggaagcaagacccagctccagcacacagcttggtgccaagccccactctccttgcacaatgcagctcagctctagaatgcagtttacttccaggacccagaccaatttcaaggcctggccaagctccagagctcaatccagcccaagcaccgcacccagctctggaactcagctcagttctggagcacaggctggttctgaaatcccagccagctccaaaacacagacagcagctgagacccagccaagttccagaatccagctaagctctggagtccaatctagtcctgggacccaggccatcgcagcaatagaattaagctccacagccctgtctagttccgacagcaggtccagctccaggacccagcgctgcccaggagctcgaccagcctctgggactcaattcgcctctaaaaccctgccaggttctagataccagctccagaccacagccccagacagctctggtattcaactggactttgggaagcagagcagttctgaaagtcagcttagctttggaactcagcccagctctgggacccagataagctcaagaattcaagccagctctggaagtcagcttagttcgggaacccagctgatttccggagcccaacccagctccagaactcagactagttctggaaaccagctcagctccgggacccagaccactgcaagaattcagctcagccctggagctcatcttagctccagaacccagtccagtcctgagaccaggctcagctctgaggctcagtccagctctggaacccagttcagttctgggattcagtttggctctgaaacccagaccggctcaagaattcagcccgactctggagcccaacttagttccagaacccagtccagctctgagaccgggctcagctctgaaacccagaccggctcaagaattcagcccagccctggagcccaccttagttctggaacccagcctgtttctggaacccaatccagttccagaactcacaccagttcaagaatctggctgagccctggaaatggaatctgcccacagacccctggccttgaccctagaatccagcttgaggcccctgccccagcccaacctcagcccccaggcccatcccccagagaccccaccccagcccctagcaaagacccccagcctctgcctcagccccatgatcaggtatgtggcatccaggccagccttggccccatcccaggcttaccccaagcctcctacctggccccacagtcacaggtctcctcaaccccccagaagccagccgtctctcccaagccccgggtgggaccccagaagtccaccccacccaccatatctgtcactcctagtcctgcccctagggcagccctcctgagttcccagctgtctgagtccccagctttggcgccagccctttgccccactctgggggagccaggagcccgcccttaccgcggggggccgtagcttggctgtgacttagccctggttcatgtggttctcgtcctctcctgtcccttccagcctggggcccccagaagcagcaagtgaccttatttctccagcaggcggtggtagggagtgtgcggtggtgaaaacaggggcttcaccggtcctggctcagatccaggtccttggagggaaaaggagggcaggagacgggttgcaccgcatgtaccctgagggctcatggtgaataaaggcaccttccatctctgca

SEQ ID NO: 276126 - protein, 454 aa, Artificial Sequence
  derived and/or modified sequence
MSTFRQEDVEDHYEMGEELGSGQFAIVRKCRQKGTGKEYAAKFIKKRRLSSSRRGVSREEIEREVNILREIRHPNIITLHDIFENKTDVVLILELVSGGELFDFLAEKESLTEDEATQFLKQILDGVHYLHSKRIAHFDLKPENIMLLDKNVPNPRIKLIDFGIAHKIEAGNEFKNIFGTPEFVAPEIVNYEPLGLEADMWSIGVITYILLSGASPFLGETKQETLTNISAVNYDFDEEYFSNTSELAKDFIRRLLVKDPKRRMTIAQSLEHSWIKAIRRRNVRGEDSGRKPERRRLKTTRLKEYTIKSHSSLPPNNSYADFERFSKVLEEAAAAEEGLRELQRSRRLCHEDVEALAAIYEEKEAWYREESDSLGQDLRRLRQELLKTEALKRQAQEEAKGALLGTSGLKRRFSRLENRYEALAKQVASEMRFVQDLVRALEQEKLQGVECGLR

SEQ ID NO: 276127 - protein, 177 aa, Artificial Sequence
  derived and/or modified sequence
MLLDKNVPNPRIKLIDFGIAHKIEAGNEFKNIFGTPEFVAPEIVNYEPLGLEADMWSIGVITYILLSGASPFLGETKQETLTNISAVNYDFDEEYFSNTSELAKDFIRRLLVKDPKRRMTIAQSLEHSWIKAIRRRNVRGEDSGRKPERRRLKTTRLKEYTIKSHSSASPIVAPVDA

SEQ ID NO: 276128 - DNA, 534 bp, Artificial Sequence
  derived and/or modified sequence
atgctgctggacaagaacgtgcccaaccccagaatcaagctgatcgacttcggcatcgcccacaagatcgaggccggcaacgagttcaagaacatcttcggcacccccgagttcgtggcccccgagatcgtgaactacgagcccctgggcctggaggccgacatgtggagcatcggcgtgatcacctacatcctgctgagcggcgccagccccttcctgggcgagaccaagcaggagaccctgaccaacatcagcgccgtgaactacgacttcgacgaggagtacttcagcaacaccagcgagctggccaaggacttcatcagaagactgctggtgaaggaccccaagagaagaatgaccatcgcccagagcctggagcacagctggatcaaggccatcagaagaagaaacgtgagaggcgaggacagcggcagaaagcccgagagaagaagactgaagaccaccagactgaaggagtacaccatcaagagccacagcagcgccagccccatcgtggcccccgtggacgcctag

SEQ ID NO: 276129 - DNA, 1365 bp, Artificial Sequence
  derived and/or modified sequence
atgagcacatttcgccaggaggatgtagaggatcattatgaaatgggggaagaattagggagtggtcagttcgctattgttagaaagtgccgtcagaaaggaacgggtaaggaatatgctgcaaaattcatcaaaaaacgccgcttatcatccagcagaagaggggtcagtcgcgaggaaatcgagcgcgaggttaatatactgagagagatacggcatccaaatatcattaccctgcatgatatcttcgagaacaagactgatgtcgttctcatcctcgaactcgtcagcggcggtgaactgttcgacttccttgcagaaaaagagtctcttaccgaagacgaagccacacagttcctcaagcagatactggacggcgtacactatttacattcaaagaggattgctcacttcgatttgaaaccagaaaatatcatgcttttagataagaatgtcccgaaccctcgtatcaaattgattgacttcggtatcgcacacaaaattgaagcagggaatgaattcaagaatatattcggcactcccgagtttgtggcacccgaaatcgtcaactacgaacccttgggcttggaggccgatatgtggtcaattggagtgatcacctacatcttgctcagcggagcgagtccattcctcggtgaaactaagcaggagacactaaccaatatctccgccgtgaattatgactttgatgaggagtacttcagcaacacctctgagctggctaaagacttcattcggaggctgcttgtcaaggaccctaaacggcggatgactatcgctcagtccctggaacactcctggattaaggctatcaggcggagaaacgtgagaggcgaggattccggaaggaagccagagaggaggcggctgaagaccacacggctaaaagagtacacaatcaaatcgcatagttcactcccccctaacaattcctacgcagattttgaacggttctccaaagtgctcgaggaagcagctgccgccgaggagggcctgagggaactccaacgtagtagaagactctgtcatgaggatgtagaggctctggccgcaatctacgaagagaaggaggcatggtacagagaagagtccgactctctggggcaggatctgagacggcttaggcaggaactactgaaaaccgaagctctgaagagacaggcccaggaagaggccaaaggggctctgttgggaacttcaggtctcaaacgccgcttttcacgcttggagaatcggtatgaagcgttggcaaagcaggtcgcttctgagatgcgattcgtgcaggacctggtgcgggctttggagcaggaaaagctccagggcgtcgagtgcggcctgcggtag

SEQ ID NO: 276130 - DNA, 534 bp, Artificial Sequence
  derived and/or modified sequence
atgctgctagacaagaacgtgcccaatcccaggatcaagttgatagacttcggcatagcccacaagattgaagccggcaatgagtttaaaaatatattcggtacccccgagttcgtggcccctgagatcgtgaattacgaacctctcggcttagaggctgatatgtggagtatcggggtgatcacttatattctcctttccggcgccagtccttttctgggcgagacgaagcaagaaacccttacaaatataagcgcggtcaactacgactttgatgaggaatacttcagcaataccagtgagttggcaaaggatttcataagacgcctcctggtcaaggaccctaagagacgcatgaccatagcgcagagtctggagcatagctggatcaaggctattcgtcgaagaaatgttcgcggagaggattctggaagaaagcccgagaggaggcgcttaaaaacaactaggttaaaagagtataccatcaagtctcattcaagcgcgagcccaattgtcgcccctgtggacgcctag

SEQ ID NO: 276131 - DNA, 1365 bp, Artificial Sequence
  derived and/or modified sequence
atgtcaacattcaggcaggaggatgtggaggatcactatgaaatgggcgaggaactaggcagcggccagtttgccattgtcaggaagtgtcgtcagaaggggaccggcaaggagtacgcggcgaagttcatcaaaaagagaagattgtcgagtagccggaggggcgtgtctcgagaggaaatcgagcgcgaagtgaatatcctgcgagagatcaggcaccctaatatcatcaccctccacgatattttcgagaacaagacagatgtggtactgatcttagagctagtcagcggcggcgagctgttcgactttttggcagaaaaggaatcactcactgaagacgaagccacccagtttctcaaacagattctggacggtgtccactacctccactccaagcggatcgctcacttcgatctcaagcccgagaacattatgctcctggacaagaacgttccaaatccacgtattaagctcatcgattttgggatagctcacaagattgaggccggaaatgaattcaaaaacatctttgggaccccagagtttgtggcaccggaaatagtaaactatgaacccttgggcctggaggcagatatgtggagtatcggggttataacatatatattacttagcggtgctagcccattcctgggagaaacgaagcaggaaaccctaacaaacatcagcgcagtgaattatgacttcgacgaggagtatttttccaacacaagcgagctggcgaaggatttcataagaaggcttctcgtgaaggaccctaagaggagaatgacaatagcacaaagtctggaacatagctggatcaaagccatccgtcggagaaacgtaagaggtgaggacagcggtagaaagccagaacggagaaggctcaagacaactcgcttgaaggagtacaccatcaagtctcattccagcctgccaccaaataattcctatgccgacttcgagcgtttctccaaggtgctcgaagaagccgcagccgccgaagagggcctgagggagctgcaaaggagtaggcgcttatgtcatgaggatgtggaggctctggcagctatatatgaggaaaaagaagcttggtacagggaggaatccgactctctggggcaggatctgcgacgactccgccaggagctgctgaaaacggaggcccttaagagacaggcacaggaagaagccaagggggctcttcttgggaccagtgggttgaagaggcgtttctcccgactcgagaatcgatacgaggcactcgccaagcaagtggccagtgagatgcgattcgtgcaggatcttgtgcgcgcactggagcaagagaagttgcagggtgtcgagtgcgggctcagatag

SEQ ID NO: 276132 - DNA, 1365 bp, Artificial Sequence
  derived and/or modified sequence
atgagcaccttccggcaggaggatgtggaggaccactatgagatgggagaggagctgggcagcggccagtttgccatcgtgaggaaatgtcggcagaagggcaccgggaaggagtatgctgccaagttcatcaagaagaggcggctgagcagcagcagaagaggagtgtcccgggaggagattgagcgggaggtgaacatcctgcgggagatccgccaccccaacatcatcaccctgcatgacatctttgagaacaagacagatgtggtgctgatcctggagctggtgtctggaggagagctgtttgacttcctggccgagaaggagagcctgacagaagatgaggccacccagttcctgaagcagatcctggatggagtgcactacctgcacagcaagagaattgcccactttgacctgaagccagagaacatcatgctgctggacaagaatgtgcccaacccccgcatcaagctgattgactttggcatcgcccacaagattgaggccggaaatgagttcaagaacatcttcggcaccccagagtttgtggcccctgagatcgtgaactatgagcccctgggcctggaggccgacatgtggagcattggagtcatcacctacatcctgctgagcggggccagccccttcctgggggagaccaagcaggagaccctgaccaacatctctgctgtgaactatgactttgatgaggagtacttcagcaacaccagcgagctggccaaggacttcatccggcggctgctggtgaaggaccccaagaggaggatgaccatcgcccagagcctggagcacagctggatcaaggccatcagaagaagaaatgtgcggggggaggacagcggcaggaagccagagcggcggcggctgaagaccacccggctgaaggagtacaccatcaagagccacagcagcctgccccccaacaacagctatgctgactttgagcgcttcagcaaggtgctggaggaggccgctgctgctgaggagggcctgcgggagctgcagaggagccggcggctgtgccatgaagatgtggaggccctggccgccatctatgaggagaaggaggcctggtaccgggaggagagtgacagcctgggccaggacctgcggcggctgcggcaggagctgctgaagacagaggccctgaagaggcaggcccaggaggaggccaagggggccctgctgggcaccagcggcctgaagaggcgcttcagccggctggagaacagatatgaggccctggccaagcaggtggccagcgagatgagatttgtgcaggacctggtgcgggccctggagcaggagaagctgcagggcgtggagtgtggcctgaggtag

SEQ ID NO: 276133 - DNA, 534 bp, Artificial Sequence
  derived and/or modified sequence
atgctgctggacaagaatgtgcccaacccccgcatcaagctgattgactttggaattgcccacaagattgaagctggaaatgagttcaagaacatcttcggcaccccagagtttgtggcccctgagatcgtgaactatgagcccctgggcctggaggccgacatgtggagcattggagtcatcacctacatcctgctgagcggggccagccccttcctgggggagaccaagcaggagaccctgaccaacatctctgctgtgaactatgactttgatgaggagtacttcagcaacaccagcgagctggccaaggacttcatccggcggctgctggtgaaggaccccaagaggaggatgaccatcgcccagagcctggagcacagctggatcaaggccatcagaagaagaaatgtgagaggagaagattctggcaggaagccagagcggcggcggctgaagaccacccggctgaaggagtacaccatcaagagccacagcagcgccagccccatcgtggcccctgtggatgcctag

SEQ ID NO: 276134 - DNA, 1365 bp, Artificial Sequence
  derived and/or modified sequence
atgagcaccttccggcaggaggacgtggaggaccactacgagatgggcgaggagctgggcagtgggcaatttgcaatcgtgagaaaatgtagacaaaagggaactggaaaggagtatgcagccaaatttatcaaaaagcggcggctgtcatccagccgtcgcggtgtgagcagggaggagatagagagagaggtgaatatcttaagggagatccgacaccccaatataatcacactccacgacatcttcgaaaacaagaccgacgttgtactcatcctcgagctcgtatcgggaggtgagctgttcgactttcttgctgagaaggaatccctgactgaggacgaggccacacagttcctgaagcagatcttagacggggttcactacctccacagcaagcggatcgctcactttgacttaaagcccgagaatatcatgctcttggataagaatgtccccaatccacggataaagctcatcgactttggtattgcccacaaaatcgaggctggcaatgagttcaagaatatcttcgggacccctgagttcgtggccccagagatcgttaattatgagccattgggactggaggccgacatgtggagcatcggcgtgatcacttacattctgctgagtggagccagtccctttctgggggagactaaacaggaaaccctgaccaatatctctgccgtgaactatgacttcgacgaggagtacttcagcaatacttcagaactggctaaagactttatccggcgtttgctggtgaaggacccaaagagaaggatgactattgcccagagccttgagcacagttggataaaagctattagaagacgaaacgtacgaggcgaagacagcggaagaaagcccgaaaggcgcaggctcaaaacaactcgcctgaaggagtatactataaagagtcattctagcttgccacctaataacagctacgccgatttcgagcggtttagcaaagtgctcgaggaggccgccgccgctgaagaaggtctgagagaactgcagaggagccgccgtctgtgtcatgaggatgtagaggcactcgccgctatttatgaggagaaagaggcgtggtaccgcgaggagagtgactcgctggggcaagatctccgaagattgcgccaggaactgctgaagaccgaggctctgaaaaggcaggcccaggaggaggccaaaggcgccctgctgggcacatctggcctgaagcggaggttctcacgcttagagaatcgttatgaggccctggccaagcaggtggcgtccgaaatgagatttgtgcaggatcttgtacgggctcttgagcaggagaaactgcagggcgtagagtgtggcctcaggtag

SEQ ID NO: 276135 - DNA, 534 bp, Artificial Sequence
  derived and/or modified sequence
atgctgctggacaagaacgtgcccaacccccggatcaagctgatcgacttcgggattgctcacaaaattgaggccggtaatgagttcaagaatatctttgggacccctgaattcgtcgcccctgaaattgttaattacgaacctttgggcttagaagccgacatgtggagcattggagtaattacatacattttgcttagcggcgcatcgccctttctgggcgaaacaaagcaggagacgctgactaacattagcgctgtgaattacgatttcgatgaagagtattttagtaacacatccgagctggctaaggacttcatccgacggctgctggtcaaagaccccaagcggcgaatgactatcgcgcagtctttagagcacagttggataaaagcaatccgccggcgcaacgttcgcggggaggatagcgggagaaaacccgaacggaggcgtttaaaaactacacgcctgaaggaatacacaataaaatctcatagtagcgcttcaccgatcgttgccccggtagacgcgtag

SEQ ID NO: 276136 - DNA, 1365 bp, Artificial Sequence
  derived and/or modified sequence
atgagcaccttccggcaggaggacgtggaggaccactacgagatgggagaagagttgggatctggacagtttgcaattgtacggaaatgtcgacagaagggcacaggaaaggagtacgcggcaaaattcatcaagaaacgtaggctgtccagctcacgacgaggagtgtcccgggaagagattgagcgagaggtgaatatcttgcgggagatcaggcatcctaacattattacactccacgacatatttgaaaataagactgacgtcgtactgattctggagttggtgtccggtggggagttattcgatttcctggccgaaaaggaatctctgactgaggacgaagcaacccaatttctgaagcagattctcgatggcgtccattatctccacagtaagcgtatcgcccacttcgacctgaagcctgagaacatcatgctgcttgacaagaatgtgcctaaccctcggattaaactcatcgatttcgggatcgcccacaagattgaagctggcaacgagttcaagaacatcttcgggacaccggagttcgttgcacccgaaatagtaaattatgagcctttggggctagaggccgatatgtggagcataggcgtgatcacttatatccttttgagtggcgcttccccatttctgggggaaacgaagcaagaaaccctgaccaatatttccgctgtgaattatgactttgacgaagaatacttttctaatacctctgaactggccaaagacttcattaggcgactcctagtaaaggaccctaaaaggaggatgacgatagcccaaagcctcgagcactcctggatcaaagccatccggcgtcgcaatgtcagaggggaggatagcggtcgaaaaccagagcgccgccgcctgaaaactaccaggcttaaggagtacaccataaagtctcactccagtctcccacccaacaattcctatgctgatttcgagcggttctcaaaagtactggaggaggccgcagcagctgaggagggcttgcgggaattgcagcggtcaagacgcctctgccatgaagatgtagaagccttagccgcaatctacgaagagaaagaagcctggtatagggaggaatccgactctctgggtcaggacctgaggaggctgagacaggagttactgaagactgaagcccttaagcggcaggcccaagaggaagcgaagggcgccctcctagggacctctgggctgaaaagaagatttagtcgtcttgaaaaccgctacgaagccctcgccaagcaggtggcttcagaaatgcgttttgttcaggatcttgtgagagcgttagaacaggagaaactgcagggggtcgaatgtggactacgctag

SEQ ID NO: 276137 - DNA, 1365 bp, Artificial Sequence
  derived and/or modified sequence
atgagtacgtttaggcaggaggacgttgaagatcattacgagatgggcgaagagcttggctctggacagttcgcaatcgtccgcaagtgcaggcaaaaaggtaccgggaaggagtacgcagctaagttcattaagaaaaggagactgtcatcctccagaaggggcgtgagccgcgaggaaattgagcgagaggtgaacattttgagagagatacgacacccaaatattatcaccctgcatgatatattcgagaacaagaccgatgtggtgttgatcctggaattggtatccggtggcgagctgttcgactttctcgctgagaaggaatcactcactgaagacgaggctactcaattcctgaaacagattttagacggcgttcactatctccacagcaaacgaatcgctcatttcgacctgaaacctgaaaacataatgttacttgataaaaacgttcctaacccccgtatcaagcttatagattttggtattgcccataagattgaagccggtaacgagtttaagaatatttttgggactcctgagttcgtggcccctgagatcgtgaattacgaaccactgggcctggaggcagacatgtggtccattggggtgatcacatatatattattgtccggcgcttctccctttctcggcgagacgaaacaagagacgctgaccaatattagtgccgtgaactatgattttgatgaagaatatttctccaatacttcagaattagcaaaggattttatccgaaggctgctggtcaaagatccaaaaaggcgcatgactattgctcagtcactcgagcatagctggattaaggctataagacgccgtaatgttcggggtgaagacagcggccgaaaacccgaaagaagacggctgaagacaacgcggctcaaggaatacacaattaaatcacactccagcctgcctccaaacaattcttacgctgacttcgaacgattttcaaaagttctggaagaagccgctgccgcagaagagggcctgcgggagctccagcggtcacgccgtctctgtcacgaggatgtcgaagcgctggccgctatctatgaggagaaagaggcctggtacagggaggaatctgactccctgggccaggacctgaggcggctgcggcaggaactgctgaagaccgaagccctcaagcggcaggctcaggaggaagccaaaggtgccctgctcgggaccagcgggctgaagagaagatttagccgcctggagaaccggtatgaagcgctggctaaacaggtcgctagcgagatgaggttcgttcaggatttggtgcgcgctctagaacaggaaaagctgcagggtgttgagtgtgggctgcggtag

SEQ ID NO: 276138 - DNA, 534 bp, Artificial Sequence
  derived and/or modified sequence
atgcttttggacaagaatgtccccaatccaaggataaagttaatcgacttcggaatcgcccacaagatcgaggctggaaacgagtttaagaatatcttcggcacaccagaatttgtggcacccgagatagtcaattacgaaccgctcggtctagaagccgacatgtggagcattggggttatcacttatatattgttatcaggggcatccccctttcttggcgagaccaagcaggaaactctaaccaacatctccgccgtaaactatgatttcgacgaggaatatttcagtaacacctcggaacttgcaaaggactttattcgcaggctgctcgtaaaggacccgaagcgcaggatgaccatcgctcagtcgttggagcacagttggatcaaggccatcaggaggcggaacgtcagaggggaggattctgggaggaagcccgaaagacgcaggctgaagactacaagattgaaagagtacacaattaagtctcactcgtcagcctcacccattgtggcccctgtggatgcttag

SEQ ID NO: 276139 - DNA, 1365 bp, Artificial Sequence
  derived and/or modified sequence
atgtcaacttttcgccaggaagatgtcgaagatcactacgagatgggggaggagttaggaagcggccagtttgctatcgtccgaaagtgtcggcagaaaggcacggggaaagaatatgccgcaaaattcattaaaaagagacggctctcttcatctcggagaggggttagccgcgaggagatcgagagagaagtgaatattctaagagagataagacatccgaacatcatcaccctgcacgacatctttgaaaataagacagatgtcgtgctcatcctcgagctggtctctggtggcgaactgttcgactttttggcagagaaagagtccctgaccgaagacgaagcgactcagtttttaaaacaaatcctggatggcgtacattacctgcattcaaaacggattgctcactttgacctgaagcctgagaatattatgctccttgataagaacgtgcccaaccccagaatcaagcttatcgactttggcattgcccataaaatcgaagccggtaacgaattcaaaaatatttttggcactcctgaatttgtggcccctgagatcgtcaactatgaacctctgggattggaggccgatatgtggagtatcggggtaattacatatatattgctaagcggggctagcccattcctgggagagacgaaacaggagacactgacaaacatcagtgctgtcaactatgactttgatgaagagtacttcagcaacacttcagagctggccaaggactttatccgaaggctcttagtgaaggaccctaagaggaggatgaccatcgctcaaagcttggagcacagttggattaaggccattcgccgacgaaatgtaagaggggaggactcaggtagaaaacccgagcgaaggaggctgaagacaacacgcctgaaagagtacactataaagagccattcctctctcccccctaacaatagttacgctgattttgagaggtttagtaaagtactggaggaagcagccgctgctgaggagggcctgagggagctgcaaagatcaaggcgactgtgccatgaagacgtggaggcattagctgcaatctatgaggagaaggaggcatggtatagagaggagtccgactctttgggccaggatctgcggcgactgcggcaagagctcttgaaaacagaggcgttgaaaagacaagcacaagaggaggccaaaggcgctctccttgggacctctgggctgaagcgcagattctctcggttggaaaatcggtacgaggctctagctaaacaggttgccagtgagatgcggtttgttcaggacctcgtgagggccttggagcaggaaaagctacaaggtgtggaatgcggactgagatag

SEQ ID NO: 276140 - DNA, 1062 bp, Artificial Sequence
  derived and/or modified sequence
gttgccattaggggactcctgaggtcctatctccaggctgcggtgactgcactttccctggagtggaagctgctggaaggcggaccggccgccatgtccacgttcaggcaggaggacgtggaggaccattatgagatgggggaggagctgggcagcggccagtttgcgatcgtgcggaagtgccggcagaagggcacgggcaaggagtacgcagccaagttcatcaagaagcgccgcctgtcatccagccggcgtggggtgagccgggaggagatcgagcgggaggtgaacatcctgcgggagatccggcaccccaacatcatcaccctgcacgacatcttcgagaacaagacggacgtggtcctcatcctggagctggtctctggcggggagctctttgacttcctggcggagaaggagtcgctgacggaggacgaggccacccagttcctcaagcagatcctggacggcgttcactacctgcactctaagcgcatcgcacactttgacctgaagccggaaaacatcatgctgctggacaagaacgtgcccaacccacgaatcaagctcatcgacttcggcatcgcgcacaagatcgaggcggggaacgagttcaagaacatcttcggcaccccggagtttgtggccccagagattgtgaactatgagccgctgggcctggaggcggacatgtggagcatcggtgtcatcacctatatcctcctgagcggtgcatccccgttcctgggcgagaccaagcaggagacgctcaccaacatctcagccgtgaactacgacttcgacgaggagtacttcagcaacaccagcgagctggccaaggacttcattcgccggctgctcgtcaaagatcccaagcggagaatgaccattgcccagagcctggaacattcctggattaaggcgatccggcggcggaacgtgcgtggtgaggacagcggccgcaagcccgagcggcggcgcctgaagaccacgcgtctgaaggagtacaccatcaagtcgcactcctccgcgagccccatcgtcgcgcctgtggacgcctag

SEQ ID NO: 276141 - DNA, 2224 bp, Artificial Sequence
  derived and/or modified sequence
attctccgggctgcggagggtaaagagcgggctcgggccgaggctggagggctgggtggggccagagcggcgcttcgggggcccgcggaggacgagggagggagagaatctgaggagctgggttgccattaggggactcctgaggtcctatctccaggctgcggtgactgcactttccctggagtggaagctgctggaaggcggaccggccgccatgtccacgttcaggcaggaggacgtggaggaccattatgagatgggggaggagctgggcagcggccagtttgcgatcgtgcggaagtgccggcagaagggcacgggcaaggagtacgcagccaagttcatcaagaagcgccgcctgtcatccagccggcgtggggtgagccgggaggagatcgagcgggaggtgaacatcctgcgggagatccggcaccccaacatcatcaccctgcacgacatcttcgagaacaagacggacgtggtcctcatcctggagctggtctctggcggggagctctttgacttcctggcggagaaggagtcgctgacggaggacgaggccacccagttcctcaagcagatcctggacggcgttcactacctgcactctaagcgcatcgcacactttgacctgaagccggaaaacatcatgctgctggacaagaacgtgcccaacccacgaatcaagctcatcgacttcggcatcgcgcacaagatcgaggcggggaacgagttcaagaacatcttcggcaccccggagtttgtggccccagagattgtgaactatgagccgctgggcctggaggcggacatgtggagcatcggtgtcatcacctatatcctcctgagcggtgcatccccgttcctgggcgagaccaagcaggagacgctcaccaacatctcagccgtgaactacgacttcgacgaggagtacttcagcaacaccagcgagctggccaaggacttcattcgccggctgctcgtcaaagatcccaagcggagaatgaccattgcccagagcctggaacattcctggattaaggcgatccggcggcggaacgtgcgtggtgaggacagcggccgcaagcccgagcggcggcgcctgaagaccacgcgtctgaaggagtacaccatcaagtcgcactccagcttgccgcccaacaacagctacgccgacttcgagcgcttctccaaggtgctggaggaggcggcggccgccgaggagggcctgcgcgagctgcagcgcagccggcggctctgccacgaggacgtggaggcgctggccgccatctacgaggagaaggaggcctggtaccgcgaggagagcgacagcctgggccaggacctgcggaggctacggcaggagctgctcaagaccgaggcgctcaagcggcaggcgcaggaggaggccaagggcgcgctgctggggaccagcggcctcaagcgccgcttcagccgcctggagaaccgctacgaggcgctggccaagcaagtagcctccgagatgcgcttcgtgcaggacctcgtgcgcgccctggagcaggagaagctgcagggcgtggagtgcgggctgcgctaggcgcagtggggtgggccaggccccaggacagccggagctcggcctgcggtgggggcgcttcctgtggacgctgcgcctcccatcgcccgggtgcctgtccttgcccagcgccaccaggctggaggcggagtgggaggagctggagccaggcccgtaagttcgcaggcaggggtgggtgtgggacggggctgcttctctacacagcctccacgctggccttcaccttcacccctgcatcgtcggtgaccctgggaccctccaggcagcgtggcctgtggcaccgtgagggttgggacccaccgaggcgcagaggcggcccgaatgcagccctggttcaggcccggaggagggtttgcgggtagttgcacggacaattcggcggggtgctgcctgttgctgccattagcccaggaggaggtcgtgggacggggagggtgggatggacggcggacaggcagtccccacgctgctgggtggcgccgggcttggtggggtcttccactgtgtgcccttctcgccgaggccggtcccccgggtgtggggtgccctgctgcggactcctccgcgagccccatcgtcgcgcctgtggacgcctaggcaagagcggccctctgcagccaagagaaataaaatactggcttccag

SEQ ID NO: 276142 - DNA, 2105 bp, Artificial Sequence
  derived and/or modified sequence
gttgccattaggggactcctgaggtcctatctccaggctgcggtgactgcactttccctggagtggaagctgctggaaggcggaccggccgccatgtccacgttcaggcaggaggacgtggaggaccattatgagatgggggaggagctgggcagcggccagtttgcgatcgtgcggaagtgccggcagaagggcacgggcaaggagtacgcagccaagttcatcaagaagcgccgcctgtcatccagccggcgtggggtgagccgggaggagatcgagcgggaggtgaacatcctgcgggagatccggcaccccaacatcatcaccctgcacgacatcttcgagaacaagacggacgtggtcctcatcctggagctggtctctggcggggagctctttgacttcctggcggagaaggagtcgctgacggaggacgaggccacccagttcctcaagcagatcctggacggcgttcactacctgcactctaagcgcatcgcacactttgacctgaagccggaaaacatcatgctgctggacaagaacgtgcccaacccacgaatcaagctcatcgacttcggcatcgcgcacaagatcgaggcggggaacgagttcaagaacatcttcggcaccccggagtttgtggccccagagattgtgaactatgagccgctgggcctggaggcggacatgtggagcatcggtgtcatcacctatatcctcctgagcggtgcatccccgttcctgggcgagaccaagcaggagacgctcaccaacatctcagccgtgaactacgacttcgacgaggagtacttcagcaacaccagcgagctggccaaggacttcattcgccggctgctcgtcaaagatcccaagcggagaatgaccattgcccagagcctggaacattcctggattaaggcgatccggcggcggaacgtgcgtggtgaggacagcggccgcaagcccgagcggcggcgcctgaagaccacgcgtctgaaggagtacaccatcaagtcgcactccagcttgccgcccaacaacagctacgccgacttcgagcgcttctccaaggtgctggaggaggcggcggccgccgaggagggcctgcgcgagctgcagcgcagccggcggctctgccacgaggacgtggaggcgctggccgccatctacgaggagaaggaggcctggtaccgcgaggagagcgacagcctgggccaggacctgcggaggctacggcaggagctgctcaagaccgaggcgctcaagcggcaggcgcaggaggaggccaagggcgcgctgctggggaccagcggcctcaagcgccgcttcagccgcctggagaaccgctacgaggcgctggccaagcaagtagcctccgagatgcgcttcgtgcaggacctcgtgcgcgccctggagcaggagaagctgcagggcgtggagtgcgggctgcgctaggcgcagtggggtgggccaggccccaggacagccggagctcggcctgcggtgggggcgcttcctgtggacgctgcgcctcccatcgcccgggtgcctgtccttgcccagcgccaccaggctggaggcggagtgggaggagctggagccaggcccgtaagttcgcaggcaggggtgggtgtgggacggggctgcttctctacacagcctccacgctggccttcaccttcacccctgcatcgtcggtgaccctgggaccctccaggcagcgtggcctgtggcaccgtgagggttgggacccaccgaggcgcagaggcggcccgaatgcagccctggttcaggcccggaggagggtttgcgggtagttgcacggacaattcggcggggtgctgcctgttgctgccattagcccaggaggaggtcgtgggacggggagggtgggatggacggcggacaggcagtccccacgctgctgggtggcgccgggcttggtggggtcttccactgtgtgcccttctcgccgaggccggtcccccgggtgtggggtgccctgctgcggactcctccgcgagccccatcgtcgcgcctgtggacgcctaggcaagagcggccctctgcagccaagagaaataaaatactggcttccagat

SEQ ID NO: 276143 - DNA, 1365 bp, Artificial Sequence
  derived and/or modified sequence
atgagcaccttcagacaggaggacgtggaggaccactacgagatgggcgaggagctgggcagcggccagttcgccatcgtgagaaagtgcagacagaagggcaccggcaaggagtacgccgccaagttcatcaagaagagaagactgagcagcagcagaagaggcgtgagcagagaggagatcgagagagaggtgaacatcctgagagagatcagacaccccaacatcatcaccctgcacgacatcttcgagaacaagaccgacgtggtgctgatcctggagctggtgagcggcggcgagctgttcgacttcctggccgagaaggagagcctgaccgaggacgaggccacccagttcctgaagcagatcctggacggcgtgcactacctgcacagcaagagaatcgcccacttcgacctgaagcccgagaacatcatgctgctggacaagaacgtgcccaaccccagaatcaagctgatcgacttcggcatcgcccacaagatcgaggccggcaacgagttcaagaacatcttcggcacccccgagttcgtggcccccgagatcgtgaactacgagcccctgggcctggaggccgacatgtggagcatcggcgtgatcacctacatcctgctgagcggcgccagccccttcctgggcgagaccaagcaggagaccctgaccaacatcagcgccgtgaactacgacttcgacgaggagtacttcagcaacaccagcgagctggccaaggacttcatcagaagactgctggtgaaggaccccaagagaagaatgaccatcgcccagagcctggagcacagctggatcaaggccatcagaagaagaaacgtgagaggcgaggacagcggcagaaagcccgagagaagaagactgaagaccaccagactgaaggagtacaccatcaagagccacagcagcctgccccccaacaacagctacgccgacttcgagagattcagcaaggtgctggaggaggccgccgccgccgaggagggcctgagagagctgcagagaagcagaagactgtgccacgaggacgtggaggccctggccgccatctacgaggagaaggaggcctggtacagagaggagagcgacagcctgggccaggacctgagaagactgagacaggagctgctgaagaccgaggccctgaagagacaggcccaggaggaggccaagggcgccctgctgggcaccagcggcctgaagagaagattcagcagactggagaacagatacgaggccctggccaagcaggtggccagcgagatgagattcgtgcaggacctggtgagagccctggagcaggagaagctgcagggcgtggagtgcggcctgagatag

SEQ ID NO: 276144 - protein, 1130 aa, Artificial Sequence
  derived and/or modified sequence
MGSEDHGAQNPSCKIMTFRPTMEEFKDFNKYVAYIESQGAHRAGLAKIIPPKEWKPRQTYDDIDDVVIPAPIQQVVTGQSGLFTQYNIQKKAMTVGEYRRLANSEKYCTPRHQDFDDLERKYWKNLTFVSPIYGADISGSLYDDDVAQWNIGSLRTILDMVERECGTIIEGVNTPYLYFGMWKTTFAWHTEDMDLYSINYLHFGEPKSWYAIPPEHGKRLERLAIGFFPGSSQGCDAFLRHKMTLISPIILKKYGIPFSRITQEAGEFMITFPYGYHAGFNHGFNCAESTNFATLRWIDYGKVATQCTCRKDMVKISMDVFVRILQPERYELWKQGKDLTVLDHTRPTALTSPELSSWSASRASLKAKLLRRQISLKENRHWRKTEEERKPSLERKKEQTKRPGLSSHRKRSQPKKPKPEDPKFPGEGTAGAALLEEAGGSVKEEAGPEVDPEEEEEEPQPLPHGREAEGAEEDGRGKLRPTKAKSERKKKSFGLLPPQLPPPPAHFPSEEALWLPSPLEPPVLGPGPAAMEESPLPAPLNVVPPEVPSEELEAKPRPIIPMLYVVPRPGKAAFNQEHVSCQQAFEHFAQKGPTWKEPVSPMELTGPEDGAASSGAGRMETKARAGEGQAPSTFSKLKMEIKKSRRHPLGRPPTRSPLSVVKQEASSDEEASPFSGEEDVSDPDALRPLLSLQWKNRAASFQAERKFNAAAARTEPYCAICTLFYPYCQALQTEKEAPIASLGKGCPATLPSKSRQKTRPLIPEMCFTSGGENTEPLPANSYIGDDGTSPLIACGKCCLQVHASCYGIRPELVNEGWTCSRCAAHAWTAECCLCNLRGGALQMTTDRRWIHVICAIAVPEARFLNVIERHPVDISAIPEQRWKLKCVYCRKRMKKVSGACIQCSYEHCSTSFHVTCAHAAGVLMEPDDWPYVVSITCLKHKSGGHAVQLLRAVSLGQVVITKNRNGLYYRCRVIGAASQTCYEVNFDDGSYSDNLYPESITSRDCVQLGPPSEGELVELRWTDGNLYKAKFISSVTSHIYQVEFEDGSQLTVKRGDIFTLEEELPKRVRSRLSLSTGAPQEPAFSGEEAKAAKRPRVGTPLATEDSGRSQDYVAFVESLLQVQGRPGAPF

SEQ ID NO: 276145 - DNA, 5027 bp, Artificial Sequence
  derived and/or modified sequence
cctcgccatccagaagtgtgcttcccgcacagctgcagccatggggtctgaggaccacggcgcccagaaccccagctgtaaaatcatgacgtttcgcccaaccatggaagaatttaaagacttcaacaaatacgtggcctacatagagtcgcagggagcccaccgggcgggcctggccaagatcatccccccgaaggagtggaagccgcggcagacgtatgatgacatcgacgacgtggtgatcccggcgcccatccagcaggtggtgacgggccagtcgggcctcttcacgcagtacaatatccagaagaaggccatgacagtgggcgagtaccgccgcctggccaacagcgagaagtactgtaccccgcggcaccaggactttgatgaccttgaacgcaaatactggaagaacctcacctttgtctccccgatctacggggctgacatcagcggctctttgtatgatgacgacgtggcccagtggaacatcgggagcctccggaccatcctggacatggtggagcgcgagtgcggcaccatcatcgagggcgtgaacacgccctacctgtacttcggcatgtggaagaccaccttcgcctggcacaccgaggacatggacctgtacagcatcaactacctgcactttggggagcctaagtcctggtacgccatcccaccagagcacggcaagcgcctggagcggctggccatcggcttcttccccgggagctcgcagggctgcgacgccttcctgcggcataagatgaccctcatctcgcccatcatcctgaagaagtacgggatccccttcagccggatcacgcaggaggccggggaattcatgatcacatttccctacggctaccacgccggcttcaatcacgggttcaactgcgcagaatctaccaacttcgccaccctgcggtggattgactacggcaaagtggccactcagtgcacgtgccggaaggacatggtcaagatctccatggacgtgttcgtgcgcatcctgcagcccgagcgctacgagctgtggaagcagggcaaggacctcacggtgctggaccacacgcggcccacggcgctcaccagccccgagctgagctcctggagtgcatcccgggcctcgctgaaggccaagctcctccgcagacaaattagtctgaaagaaaacagacactggagaaagactgaggaggagaggaaaccaagtctagaaaggaagaaagagcagaccaaaaggccggggctgtcgtctcaccggaaacggagccagcccaagaagccgaagcccgaagaccccaagttccctggggagggtacggctggggcagcgctcctagaggaggctgggggcagcgtgaaggaggaggctgggccggaggttgaccccgaggaggaggaggaggagccgcagccactgccacacggccgggaggccgagggcgcagaagaggacgggaggggcaagctgcggccaaccaaggccaagagcgagcggaagaagaagagcttcggcctgctgcccccacagctgccgcccccgcctgctcacttcccctcagaggaggcgctgtggctgccatccccactggagcccccggtgctgggcccaggccctgcagccatggaggagagccccctgccggcaccccttaatgtcgtgccccctgaggtgcccagtgaggagctagaggccaagcctcggcccatcatccccatgctgtacgtggtgccgcggccgggcaaggcagccttcaaccaggagcacgtgtcctgccagcaggcctttgagcactttgcccagaagggtccgacctggaaggaaccagtttcccccatggagctgacggggccagaggacggtgcagccagcagtggggcaggtcgcatggagaccaaagcccgggccggagaggggcaggcaccgtccacattttccaaattgaagatggagatcaagaagagccggcgccatcccctgggccggccgcccacccggtccccactgtcggtggtgaagcaggaggcctcaagtgacgaggaggcatcccctttctccggggaggaagatgtgagtgacccggacgccttgaggccgctgctgtctctgcagtggaagaacagggcggccagcttccaggccgagaggaagttcaacgcagcggctgcgcgcacggagccctactgcgccatctgcacgctcttctacccctactgccaggccctacagactgagaaggaggcacccatagcctccctcggaaagggctgcccggccacattaccctccaaaagccgtcagaagacccgaccgctcatccctgagatgtgcttcacctctggcggtgagaacacggagccgctgcctgccaactcctacatcggcgacgacgggaccagccccctgatcgcctgcggcaagtgctgcctgcaggtccatgccagttgctatggcatccgtcccgagctggtcaatgaaggctggacgtgttcccggtgcgcggcccacgcctggactgcggagtgctgcctgtgcaacctgcgaggaggtgcgctgcagatgaccaccgataggaggtggatccacgtgatctgtgccatcgcagtccccgaggcgcgcttcctgaacgtgattgagcgccaccctgtggacatcagcgccatccccgagcagcggtggaagctgaaatgcgtgtactgccggaagcggatgaagaaggtgtcaggtgcctgtatccagtgctcctacgagcactgctccacgtccttccacgtgacctgcgcccacgccgcaggcgtgctcatggagccggacgactggccctatgtggtctccatcacctgcctcaagcacaagtcggggggtcacgctgtccaactcctgagggccgtgtccctaggccaggtggtcatcaccaagaaccgcaacgggctgtactaccgctgtcgcgtcatcggtgccgcctcgcagacctgctacgaagtgaacttcgacgatggctcctacagcgacaacctgtaccctgagagcatcacgagtagggactgtgtccagctgggacccccttccgagggggagctggtggagctccggtggactgacggcaacctctacaaggccaagttcatctcctccgtcaccagccacatctaccaggtggagtttgaggacgggtcccagctgacggtgaagcgtggggacatcttcaccctggaggaggagctgcccaagagggtccgctctcggctgtcactgagcacgggggcaccgcaggagcccgccttctcgggggaggaggccaaggccgccaagcgcccgcgtgtgggcaccccgcttgccacggaggactccgggcggagccaggactacgtggccttcgtggagagcctcctgcaggtgcagggccggcccggagcccccttctaggacagctggccgctcaggcgaccctcagcccggcggggaggccatggcatgccccgggcgttcgcttgctgtgaattcctgtcctcgtgtccccgacccccgagaggccacctccaagccgcgggtgccccctagggcgacaggagccagcgggacgccgcacgcggccccagactcagggagcagggccaggcgggctcgggggccggccaggggagcaccccactcaactactcagaattttaaaccatgtaagctctcttcttctcgaaaaggtgctactgcaatgccctactgagcaacctttgagattgtcacttctgtacataaaccacctttgtgaggctctttctataaatacatattgtttaaaaaaaagcaagaaaaaaaggaaaacaaaggaaaatatccccaaagttgttttctagatttgtggctttaagaaaaacaaaacaaaacaaacacattgtttttctcagaaccaggattctctgagaggtcagagcatctcgctgtttttttgttgttgttttaaaatattatgatttggctacagaccaggcagggaaagagacccggtaattggagggtgagcctcggggggggggcaggacgccccggtttcggcacagcccggtcactcacggcctcgctctcgcctcaccccggctcctgggctttgatggtctggtgccagtgcctgtgcccactctgtgcctgctgggaggaggcccaggctctctggtggccgcccctgtgcacctggccaggggaagcccgggggtctggggcctccctccgtctgcgcccacctttgcagaataaactctctcctggggtttgtctatctttgtttctctcacctgagagaaacgcaggtgttccagaggcttccttgcagacaaagcacccctgcacctcctatggctcaggatgagggaggcccccaggcccttctggttggtagtgagtgtggacagcttcccagctcttcgggtacaaccctgagcaggtcgggggacacagggccgaggcaggccttcggggcccctttcgcctgcttccgggcagggacgaggcctggtgtcctcgctccacccacccacgctgctgtcacctgaggggaatctgcttcttaggagtgggttgagctgatagagaaaaaacggccttcagcccaggctgggaagcgccttctccaggtgcctctccctcaccagctctgcacccctctggggagccttccccaccttagctgtctcctgccccagggagggatggaggagataatttgcttatattaaaaacaaaaaatggctgaggcaggagtttgggaccagcctgggctatatagcaagaccccatcactacaaattttttacaaattagctaggtgtggtggtgcgcacctgtggtcccagctactcgggaggctgtggtgggaggattgcttgagtccaggaggttgaggctgcagtcagctcagattgcaccactgcactccagcctgggcaacagagcgagaccctgtctccaaaaaaaaaaaaaagcaatgtttatattataaaagagtgtcctaacagtccccgggcta

SEQ ID NO: 276146 - DNA, 3393 bp, Artificial Sequence
  derived and/or modified sequence
atgggaagtgaagatcatggggcgcagaatccctcatgtaaaattatgacatttcgcccaacaatggaggaatttaaagatttcaacaagtacgtcgcatatattgaatcccagggagcccaccgcgctgggttggccaagatcattcctcctaaggagtggaaaccaaggcagacatacgatgacatcgacgacgtggtgattcccgccccaatccagcaagtggtcaccgggcagtccggattattcacgcagtataatattcagaaaaaggctatgactgtaggagagtatagaagactggccaactccgagaaatactgcaccccgcgacatcaggatttcgacgacctagagcgtaagtactggaaaaatctgacattcgtgtctcccatttatggggctgacatttcgggctccctctacgacgacgacgtcgcacaatggaacatcggaagtcttagaacaatccttgacatggttgagcgggagtgtggtaccattattgaaggcgtcaatacaccctatctgtacttcggcatgtggaagacaacatttgcttggcacactgaggacatggacctgtattctattaactacctgcacttcggtgaaccaaagtcatggtacgcaatcccacctgaacacggaaaaagactagagcgtctcgcaatcgggttcttccccggctcttcacagggctgcgatgcattcctcaggcacaaaatgaccctgatctctcctataatattaaaaaaatatggtatccctttctctcgcatcacccaggaagctggcgagttcatgattacatttccatatgggtaccatgccgggtttaatcatgggttcaactgcgctgaaagtacaaacttcgcaaccctgaggtggatagattatggcaaggtggcaacacagtgcacttgtcgaaaagatatggtgaagatatctatggacgtgtttgtgcgtatcttgcagccagagagatatgaactgtggaaacagggaaaggacctgacagtccttgatcacacacggcccacagccctcacctcgccagagctgagtagctggagcgcttcccgggcctctctcaaggcaaaattgctcagaagacagatctctttgaaggagaacaggcattggcgaaagactgaagaagagaggaaacctagcctggaaagaaagaaggagcaaaccaagcggcctggcctgagttcgcacagaaaaagatctcaaccgaaaaagccgaaaccagaagaccccaaatttcctggggagggcactgcaggagctgccctgctggaggaagcaggtggcagtgtcaaggaagaggccggcccggaagttgatcccgaagaagaggaggaggagccccagccactgccacacggacgggaggcggagggcgctgaagaggacggcaggggaaagctaagaccaaccaaggcaaaatcggagcgaaagaaaaagtccttcggattgctgccaccccagctaccccccccaccagctcacttcccctctgaggaagctctctggctgccctcgcccctggaaccgccagttctggggcccgggcccgctgccatggaggaatctcccctgccagctcctttaaatgtcgtgccacctgaggtgccttcagaagaattggaagccaagcctaggccgatcatccccatgctgtacgtggtcccccggccagggaaagctgccttcaaccaggagcatgtcagctgtcagcaagccttcgagcactttgctcagaaagggccaacttggaaagaacctgtgtcaccgatggagttgacaggacccgaggacggcgcggcctcctcaggagctgggaggatggaaacaaaagccagggccggggagggtcaggcaccctctaccttctcaaagctgaagatggagatcaagaagtcccgtcgtcaccccttgggtaggccccccaccaggtctcctctgagcgtcgtgaagcaagaagcttcatcagacgaagaggcctccccattttcaggcgaagaggatgtcagcgatccggacgccctgaggcctctgctgagcctccaatggaaaaaccgcgctgcctcttttcaggcggagaggaagttcaatgctgcagcggctaggaccgaaccctattgcgctatatgcacattattttatccatattgccaggccctgcagactgagaaggaagccccaattgcctcacttggcaaagggtgccccgccaccctgccgtcaaagtcaaggcagaaaacccgccctctgatccctgagatgtgttttaccagtggcggggagaataccgagcctttgcccgcgaacagctacataggggacgacggcacatccccactcatcgcctgtgggaaatgttgcctccaggtacacgcaagctgctatggcatccggccagaactggttaacgaaggatggacctgctctcgatgtgcggcacacgcctggaccgccgaatgttgcctatgcaatctcagaggcggggcactgcagatgacaactgacagaagatggatccacgtgatatgtgcgatcgcggtgccagaagcaagattcttgaatgttatagagagacatccagtggacattagtgccattcctgaacagcgatggaagttgaaatgcgtttattgtagaaagcgtatgaaaaaggtgagcggcgcctgcatccagtgcagttatgagcactgcagcacctccttccacgtcacttgtgctcacgcagcgggagttctgatggaaccggacgactggccatacgtggtgtctattacttgcttgaagcataagtctggcggacatgcagtgcagctcctgagggccgtgtccctgggccaggtggtcataaccaaaaatcggaacggactgtactatcgttgtcgggttatcggggcggctagccagacatgttatgaggttaattttgatgacggcagctacagcgacaatctttaccctgagtccattacaagtagggactgtgtacagctaggaccgccctccgagggagaattagtggagctgagatggactgatggaaatctctacaaagcaaagttcataagcagtgtcacatcccatatctatcaggtggagtttgaggacggcagccagcttacagtcaagcgcggagatatattcacacttgaagaggagctgcctaaacgagtgcggtctcgtctctcgcttagcacaggcgcaccccaagagccagctttctcaggcgaagaggcaaaagcagcaaaaaggcctcgggtgggcaccccactggcaactgaagatagtggccgctctcaggactacgtggccttcgtggaaagtctactgcaagtgcagggacggccaggcgcgcccttctag

SEQ ID NO: 276147 - DNA, 3393 bp, Artificial Sequence
  derived and/or modified sequence
atgggcagcgaggaccacggggcccagaaccccagctgcaagatcatgaccttccggcccaccatggaggagttcaaggacttcaacaagtatgtggcctacatcgagagccagggcgcccacagagctggcctggccaagatcatcccccccaaggagtggaagccccggcagacctatgatgacattgatgatgtggtgatcccagcccccatccagcaggtggtgacaggccagagcggcctcttcacccagtacaacatccagaagaaggccatgacagtgggggagtacagaaggctggccaacagcgagaagtactgcacccccaggcaccaggactttgatgacctggagaggaagtactggaagaacctgacctttgtgagccccatctatggagctgacatcagcggcagcctgtatgatgatgatgtggcccagtggaacatcggcagcctgcggaccatcctggacatggtggagcgggagtgtggcaccatcattgaaggagtgaacaccccctacctgtacttcggcatgtggaagaccacctttgcctggcacacagaggacatggacctgtacagcatcaactacctgcactttggagagcccaagtcctggtacgccatccccccagagcacggcaagaggctggagcggctggccatcggcttcttccctggcagcagccagggctgtgatgccttcctgcggcacaagatgaccctcatcagccccatcatcctgaagaagtatggcatccccttcagccgcatcacccaggaggccggggagttcatgatcaccttcccctacggctaccacgccggcttcaaccacggcttcaactgtgccgagagcaccaactttgccaccctgcgctggattgattatggcaaggtggccacccagtgcacctgcaggaaggacatggtgaagatctccatggatgtgtttgtgcgcatcctgcagcctgagagatatgagctgtggaagcagggcaaggacctgactgtgctggaccacacccggcccacagccctgaccagccctgagctgagctcctggagcgccagccgggccagcctgaaggccaagctgctgcggcggcagatcagcctgaaggagaacagacactggaggaagacagaggaggagaggaagcccagcctggagaggaagaaggagcagaccaagaggcctggcctgagcagccacaggaagaggagccagcccaagaagcccaagccagaggaccccaagtttcctggagagggcacagctggggccgccctgctggaggaggccggcggctctgtgaaggaggaggccggccctgaggtggaccctgaggaggaggaggaggagccccagcccctgccccacggccgggaggccgagggcgcagaagaagatggccggggcaagctgcggcccaccaaggccaagtctgagaggaagaagaagagctttggcctgctgcccccccagctgcccccacctccagcccacttccccagcgaggaggccctgtggctgcccagccccctggagccccctgtgctgggccctggccctgctgccatggaggagagccccctgcctgcccccctgaatgtggtgcccccagaggtgcccagcgaggagctggaggccaagccccggcccatcatccccatgctgtatgtggtgcccaggcctgggaaggccgccttcaaccaggagcacgtgtcctgccagcaggcctttgagcactttgcccagaagggccccacctggaaggagcctgtgagccccatggagctgactggaccagaagatggagctgccagcagcggggccggccgcatggagaccaaggcccgggccggggagggccaggcccccagcaccttcagcaagctgaagatggagatcaagaagagcagaagacaccccctgggccggccccccaccaggagccccctgtctgtggtgaagcaggaggccagcagtgatgaggaggccagccccttctctggagaggaggatgtgtctgaccctgatgccctgcggcccctgctgagcctgcagtggaagaacagagctgccagcttccaggccgagaggaagttcaatgctgctgctgccaggacagagccctactgtgccatctgcaccctcttctacccctactgccaggccctgcagacagagaaggaggcccccatcgccagcctgggcaagggctgcccagccaccctgcccagcaagagccggcagaagacccggcccctcatccctgagatgtgcttcaccagcggcggggagaacacagagcccctgcctgccaacagctacatcggagatgatggcaccagccccctcatcgcctgtgggaagtgctgcctgcaggtgcacgccagctgctacggcatccggcctgagctggtgaatgaaggctggacctgcagccgctgtgccgcccacgcctggacagctgagtgctgcctgtgcaacctgcggggcggggccctgcagatgaccacagaccggcgctggattcatgtgatctgtgccatcgctgtgcctgaggcccgcttcctgaatgtgattgagcggcaccctgtggacatcagcgccatccctgagcagcgctggaagctgaagtgtgtgtactgcaggaagaggatgaagaaggtgtctggggcctgcatccagtgcagctatgagcactgcagcaccagcttccacgtgacctgtgcccatgctgctggggtgctgatggagccagatgactggccctacgtggtgtccatcacctgcctgaagcacaagagcggcggccatgctgtgcagctgctgcgggctgtgtccctgggccaggtggtgatcaccaagaacagaaatggcctgtactaccgctgcagggtcatcggggccgccagccagacctgctatgaggtgaactttgatgatggcagctacagcgacaacctgtacccagagagcatcaccagccgggactgtgtgcagctgggcccccccagcgagggggagctggtggagctgcgctggacagatggcaacctgtacaaggccaagttcatcagctctgtgaccagccacatctaccaggtggagtttgaagatggcagccagctgactgtgaagagaggagacatcttcaccctggaggaggagctgcccaagagggtgcgcagccggctgagcctgagcactggagccccccaggagcccgccttctctggagaggaggccaaggccgccaagaggccccgggtgggcacccccctggccacagaggacagcggccgcagccaggactatgtggcctttgtggagagcctgctgcaggtgcagggccggcctggggcccccttctag

SEQ ID NO: 276148 - DNA, 3393 bp, Artificial Sequence
  derived and/or modified sequence
atgggcagcgaggaccacggcgcccagaaccccagctgcaagatcatgacatttcgtccaacgatggaagaatttaaggacttcaataagtacgtggcatacattgaaagtcagggggcacacagggcaggacttgctaagatcatacctccgaaggaatggaagccacgccagacctatgacgatatagacgacgtagtgatcccagctccaatacagcaggttgttacaggccaatcaggacttttcacccagtacaatatccagaagaaagccatgaccgtcggggagtaccggagactagccaatagcgaaaaatattgtactcctcgtcatcaggactttgatgacctagagcgaaaatactggaagaaccttacgttcgtgtcccccatctatggtgctgatatctctggttcactttatgacgatgatgtcgcccagtggaatatcggctctctgcgcaccatcctggacatggtggagcgggagtgcgggaccattattgagggggtgaacacaccatacctgtattttggcatgtggaagacaacattcgcgtggcacactgaggacatggacttgtatagcataaactacctgcactttggagagccaaagagctggtacgccattccgcctgagcacgggaagaggctcgagcgtctggccataggatttttcccaggttcctctcagggctgcgatgcattcctccggcacaagatgacattgatttcacccattatactgaagaaatacggcattcctttttcaagaattacccaagaggctggcgagtttatgatcacattcccctatggataccacgcggggttcaaccacggatttaactgcgctgaatccaccaactttgccacacttaggtggatcgactacgggaaagtggctactcaatgcacctgtcgaaaagacatggttaagatttcaatggacgtcttcgtgagaatcctccagcccgagaggtacgagttatggaaacaaggcaaagatctgaccgtgctcgaccacacccgaccaacggccctcacaagccccgaactgagctcatggtctgcttcccgggcaagcctgaaagcaaaactgctgcgccgacagattagcttaaaagagaaccggcattggagaaagactgaagaggagcgcaagcctagtttggaacggaaaaaagagcagaccaagaggccagggctgagttcgcacaggaaaagaagccagccaaaaaaaccaaagccagaggatcccaaattcccgggcgaagggaccgctggggcagcactcttggaagaggcaggaggcagtgtgaaagaggaagctggccctgaggtggacccagaagaggaggaggaggaaccccaaccgctcccacacggaagggaagcagaaggtgccgaggaagatgggagaggaaaactgcgcccaactaaggctaaatctgaaaggaagaagaaaagtttcggcctgttaccaccgcaactcccaccccctccagcacacttcccaagtgaggaagctctttggctcccaagccccctggagccaccagtactggggcctggcccggctgcgatggaagaatctcctctgccggccccgctcaatgtagtgcctcccgaggtgccatctgaagagctggaggcgaagccccggcccatcattccaatgctgtacgtagtcccgcgcccgggcaaagcagcctttaaccaagaacatgtgtcttgtcaacaggcattcgagcactttgcccagaaaggcccaacatggaaggagccggtaagcccaatggagctcactggccccgaagacggcgctgcctccagcggtgctggacgcatggaaacgaaggctagggccggggagggtcaggctcctagcacctttagcaaactgaagatggagataaaaaaaagcaggcgacatcctctagggcgccctccaactcggtctccgctctccgtagtgaaacaggaggccagttctgacgaagaggctagtcctttctctggcgaggaagacgtctccgacccagacgctcttcgtccgctcctctcattgcagtggaaaaaccgggccgcctccttccaggccgaaaggaaattcaacgcggcagctgcgagaacggagccctattgtgccatctgcaccctattctatccctattgccaggccctgcaaactgagaaggaggcacccattgccagcctcggcaaggggtgtcccgctactctaccttccaagtcccggcagaaaacaagacctttaatcccagagatgtgtttcacgtccggtggggaaaacacagagcccctcccggctaatagctacatcggggacgatggcacatcaccgcttattgcatgtggaaagtgttgtttgcaggtccatgcctcttgttacggaattagaccagagcttgtgaacgaaggatggacgtgctctcggtgcgccgcacatgcttggaccgcagagtgttgcttgtgcaatctgaggggaggtgcgctgcagatgacaaccgatagacgatggatccatgtgatctgcgcaatagcagttcctgaggcccggttcctgaatgtgattgaacgtcacccagtggacattagcgccattcccgaacagcggtggaagcttaaatgtgtatactgtcggaaaagaatgaagaaagtgtcaggagcgtgcattcagtgcagctacgaacattgctcaactagctttcacgttacttgcgcgcacgccgcaggggtattaatggagccagatgactggccctacgttgttagtattacatgcctgaaacacaagtccggtggccatgccgtccaattgctgagggccgtgtccttggggcaagtggttatcaccaaaaacaggaacggtctatattatcgttgccgagtgattggggccgcaagccagacctgctatgaggtgaacttcgatgatggctcttattctgacaatctgtaccctgaatcaattaccagccgtgactgtgtacagctgggaccccccagcgagggagagctggtggaactgcggtggaccgatggcaacctgtacaaggccaaattcatcagctctgtgacctcccatatctatcaggtggagttcgaggacggatctcaacttactgtgaagcgtggcgacatcttcacactggaagaagagctgccaaagagggtgcggtcaaggctttccctgtctaccggcgctccacaggaaccagcctttagcggggaggaggccaaggcagccaagcgtcccagggtgggtacgcccctcgcaaccgaggacagtggccggtcccaggattacgtagcattcgtggagtctcttctgcaggttcaggggcgtcccggtgctcctttttag

SEQ ID NO: 276149 - DNA, 3393 bp, Artificial Sequence
  derived and/or modified sequence
atgggttcagaagaccatggagctcagaacccttcctgtaaaatcatgacgtttaggcctacaatggaggaattcaaggacttcaacaagtatgtagcctacattgagtcacagggagctcatcgagccggattggccaagataattccaccaaaagaatggaaacctaggcaaacatatgacgacatagatgatgtggtcattccggcacctatacagcaagtagtgaccgggcaaagcggactctttacacagtacaatatccagaagaaagcaatgaccgtgggggagtaccggagactagccaatagtgagaaatattgtaccccacgccaccaggactttgacgaccttgaaaggaagtactggaagaatctcacatttgtgtctcctatctacggtgccgacatcagtgggtccctgtatgacgacgacgttgcccaatggaatatcggcagcctgaggaccattctcgacatggtggagagagagtgtgggacaatcatcgagggtgtgaatacaccttatctttacttcggaatgtggaagacgacattcgcatggcatacggaggacatggatctatacagcatcaattacctccacttcggcgagcctaaaagctggtatgctatacctcccgaacatggaaaacgcctggagcggctcgccatagggttctttcctggttcttcccaggggtgcgacgcattcctgcggcacaaaatgacacttatcagcccaatcatcctaaaaaaatacggcattcctttctcaagaataacccaggaggctggggaatttatgatcacatttccttacggctaccatgcgggatttaatcacggattcaactgtgccgaatcaacaaattttgccacactccggtggatcgattacggtaaggttgccacacagtgtacgtgccggaaggatatggttaaaatctcaatggatgtctttgttagaatcctgcagccagaacgatatgagttatggaaacaggggaaggatctgaccgtgttggaccatacccgccctaccgccttgacgagccctgaactgtctagctggagcgcctctagggcctcactgaaagctaagctgttaagacggcagatttccctgaaggagaaccgccactggcggaaaaccgaggaggagcgtaagccttcattagaacgaaaaaaggagcaaaccaaacggcctggtctttcttcacataggaagcgttcccaaccaaagaaaccaaagccagaggaccccaagtttcctggcgagggcaccgcgggagccgctctgttggaagaagctggcggtagcgtgaaggaagaagctggccctgaagtcgatcctgaggaagaggaggaggagcctcagccactgcctcatggtagggaagccgagggcgctgaagaagatggcagagggaaactccgcccaaccaaggctaagagcgagaggaagaagaagtcatttggcttgttgcctccgcagctgccccctcctccggcacacttcccaagcgaggaagcactgtggttaccttctcctctcgaacccccagtcctggggccaggccctgccgctatggaggagagccctctccccgctcccctgaacgtggtgccacccgaagtgccaagcgaagagctcgaagctaaaccccgaccgattattccgatgctgtacgtagttccaaggccagggaaggctgcttttaatcaggaacatgtgagctgccagcaggccttcgagcacttcgctcagaagggacctacctggaaagagcctgtgagcccaatggagctgaccggaccagaggacggcgcagcgagttcaggcgctggcagaatggaaacaaaagcaagggctggtgagggacaagcaccatcaaccttttcgaaactgaaaatggagatcaagaagtctagaaggcatcctctaggtagaccgccaacccggtctcctctctccgtagttaaacaggaggccagttccgacgaagaggcatcacccttttctggtgaggaggacgttagcgatcctgacgcgcttcggccattactctcgctccagtggaaaaaccgggctgcctccttccaagccgaaagaaaatttaacgccgctgccgcacgaacagagccatattgtgccatttgcaccctcttctacccatattgccaagcgttgcagaccgagaaggaggcgccaatcgctagccttggcaaaggctgcccggctacattgccttctaaatcaaggcagaaaaccagaccgctaattcccgagatgtgtttcacatcagggggagagaatacggaacccctgcccgctaattcctacataggtgatgacgggacatcaccgttaatagcatgcgggaagtgttgtctgcaagtgcacgcaagctgctacggtattcggcctgagctagtcaatgagggctggacgtgtagccggtgtgctgcgcacgcatggaccgcagaatgctgtctgtgcaacctgaggggtggcgctctgcagatgactacagaccgcaggtggatccatgtgatctgcgctatagccgtaccagaagcgaggttcctgaacgtcatcgagcggcaccccgttgacatcagcgccattccagagcagaggtggaagcttaagtgcgtgtactgcaggaagcgaatgaagaaggtgtccggagcctgcatccaatgttcgtatgagcattgtagtacctccttccacgtcacgtgtgctcacgccgctggagtgttaatggagcctgacgattggccatatgtggtctcaatcacatgtctgaaacataagagcgggggacacgcagtgcaactcctccgcgctgtttcgctgggacaagttgttataactaagaataggaacggcctttattataggtgcagggtcattggcgctgccagccagacatgttatgaggtcaactttgatgatggtagctactcagacaatctgtatccggagtccattacaagtcgtgattgtgtgcagctcggcccacccagcgaaggcgaactcgtagagctgcggtggactgacggtaatctatacaaagctaagtttatatcttccgtaacgtctcatatttaccaagtggaattcgaggacggatcccagttaaccgtgaagcgtggcgacatctttacccttgaagaggagttacccaaacgcgtccgctccaggctgtccctcagtaccggagctcctcaggaaccagccttctcaggggaagaagctaaggccgcaaaacgcccacgcgtcgggaccccattggccaccgaagacagtggtagatcccaagattatgtggcctttgttgaatccctgctgcaagtccagggaaggcctggggctcctttctag

SEQ ID NO: 276150 - DNA, 3393 bp, Artificial Sequence
  derived and/or modified sequence
atgggcagcgaggaccacggcgcccagaaccccagctgcaagatcatgaccttcagacccaccatggaggagttcaaggacttcaacaagtacgtggcctacatcgagagccagggcgcccacagagccggcctggccaagatcatcccccccaaggagtggaagcccagacagacctacgacgacatcgacgacgtggtgatccccgcccccatccagcaggtggtgaccggccagagcggcctgttcacccagtacaacatccagaagaaggccatgaccgtgggcgagtacagaagactggccaacagcgagaagtactgcacccccagacaccaggacttcgacgacctggagagaaagtactggaagaacctgaccttcgtgagccccatctacggcgccgacatcagcggcagcctgtacgacgacgacgtggcccagtggaacatcggcagcctgagaaccatcctggacatggtggagagagagtgcggcaccatcatcgagggcgtgaacaccccctacctgtacttcggcatgtggaagaccaccttcgcctggcacaccgaggacatggacctgtacagcatcaactacctgcacttcggcgagcccaagagctggtacgccatcccccccgagcacggcaagagactggagagactggccatcggcttcttccccggcagcagccagggctgcgacgccttcctgagacacaagatgaccctgatcagccccatcatcctgaagaagtacggcatccccttcagcagaatcacccaggaggccggcgagttcatgatcaccttcccctacggctaccacgccggcttcaaccacggcttcaactgcgccgagagcaccaacttcgccaccctgagatggatcgactacggcaaggtggccacccagtgcacctgcagaaaggacatggtgaagatcagcatggacgtgttcgtgagaatcctgcagcccgagagatacgagctgtggaagcagggcaaggacctgaccgtgctggaccacaccagacccaccgccctgaccagccccgagctgagcagctggagcgccagcagagccagcctgaaggccaagctgctgagaagacagatcagcctgaaggagaacagacactggagaaagaccgaggaggagagaaagcccagcctggagagaaagaaggagcagaccaagagacccggcctgagcagccacagaaagagaagccagcccaagaagcccaagcccgaggaccccaagttccccggcgagggcaccgccggcgccgccctgctggaggaggccggcggcagcgtgaaggaggaggccggccccgaggtggaccccgaggaggaggaggaggagccccagcccctgccccacggcagagaggccgagggcgccgaggaggacggcagaggcaagctgagacccaccaaggccaagagcgagagaaagaagaagagcttcggcctgctgcccccccagctgccccccccccccgcccacttccccagcgaggaggccctgtggctgcccagccccctggagccccccgtgctgggccccggccccgccgccatggaggagagccccctgcccgcccccctgaacgtggtgccccccgaggtgcccagcgaggagctggaggccaagcccagacccatcatccccatgctgtacgtggtgcccagacccggcaaggccgccttcaaccaggagcacgtgagctgccagcaggccttcgagcacttcgcccagaagggccccacctggaaggagcccgtgagccccatggagctgaccggccccgaggacggcgccgccagcagcggcgccggcagaatggagaccaaggccagagccggcgagggccaggcccccagcaccttcagcaagctgaagatggagatcaagaagagcagaagacaccccctgggcagaccccccaccagaagccccctgagcgtggtgaagcaggaggccagcagcgacgaggaggccagccccttcagcggcgaggaggacgtgagcgaccccgacgccctgagacccctgctgagcctgcagtggaagaacagagccgccagcttccaggccgagagaaagttcaacgccgccgccgccagaaccgagccctactgcgccatctgcaccctgttctacccctactgccaggccctgcagaccgagaaggaggcccccatcgccagcctgggcaagggctgccccgccaccctgcccagcaagagcagacagaagaccagacccctgatccccgagatgtgcttcaccagcggcggcgagaacaccgagcccctgcccgccaacagctacatcggcgacgacggcaccagccccctgatcgcctgcggcaagtgctgcctgcaggtgcacgccagctgctacggcatcagacccgagctggtgaacgagggctggacctgcagcagatgcgccgcccacgcctggaccgccgagtgctgcctgtgcaacctgagaggcggcgccctgcagatgaccaccgacagaagatggatccacgtgatctgcgccatcgccgtgcccgaggccagattcctgaacgtgatcgagagacaccccgtggacatcagcgccatccccgagcagagatggaagctgaagtgcgtgtactgcagaaagagaatgaagaaggtgagcggcgcctgcatccagtgcagctacgagcactgcagcaccagcttccacgtgacctgcgcccacgccgccggcgtgctgatggagcccgacgactggccctacgtggtgagcatcacctgcctgaagcacaagagcggcggccacgccgtgcagctgctgagagccgtgagcctgggccaggtggtgatcaccaagaacagaaacggcctgtactacagatgcagagtgatcggcgccgccagccagacctgctacgaggtgaacttcgacgacggcagctacagcgacaacctgtaccccgagagcatcaccagcagagactgcgtgcagctgggcccccccagcgagggcgagctggtggagctgagatggaccgacggcaacctgtacaaggccaagttcatcagcagcgtgaccagccacatctaccaggtggagttcgaggacggcagccagctgaccgtgaagagaggcgacatcttcaccctggaggaggagctgcccaagagagtgagaagcagactgagcctgagcaccggcgccccccaggagcccgccttcagcggcgaggaggccaaggccgccaagagacccagagtgggcacccccctggccaccgaggacagcggcagaagccaggactacgtggccttcgtggagagcctgctgcaggtgcagggcagacccggcgcccccttctag

SEQ ID NO: 276151 - protein, 365 aa, Artificial Sequence
  derived and/or modified sequence
MDPLGPAKPQWSWRCCLTTLLFQLLMAVCFFSYLRVSQDDPTVYPNGSRFPDSTGTPAHSIPLILLWTWPFNKPIALPRCSEMVPGTADCNITADRKVYPQADAVIVHHREVMYNPSAQLPRSPRRQGQRWIWFSMESPSHCWQLKAMDGYFNLTMSYRSDSDIFTPYGWLEPWSGQPAHPPLNLSAKTELVAWAVSNWGPNSARVRYYQSLQAHLKVDVYGRSHKPLPQGTMMETLSRYKFYLAFENSLHPDYITEKLWRNALEAWAVPVVLGPSRSNYERFLPPDAFIHVDDFQSPKDLARYLQELDKDHARYLSYFRWRETLRPRSFSWALAFCKACWKLQEESRSGGLIYLRTRLPEASPA

SEQ ID NO: 276152 - protein, 69 aa, Artificial Sequence
  derived and/or modified sequence
MDPLGPAKPQWSWRCCLTTLLFQLLMAVCFFSYLRVSQDDPTVYPNGSRFPDSTGTPAHSIPLILLWTW

SEQ ID NO: 276153 - DNA, 1098 bp, Artificial Sequence
  derived and/or modified sequence
atggatcccctgggcccggccaagccacagtggtcgtggcgctgctgtctgaccacgctgctgtttcagctgctgatggctgtgtgtttcttctcctatctgcgtgtgtctcaagacgatcccactgtgtaccctaatgggtcccgcttcccagacagcacagggacccccgcccactccatccccctgatcctgctgtggacgtggccttttaacaaacccatagctctgccccgctgctcagagatggtgcctggcacggctgactgcaacatcactgccgaccgcaaggtgtatccacaggcagacgcggtcatcgtgcaccaccgagaggtcatgtacaaccccagtgcccagctcccacgctccccgaggcggcaggggcagcgatggatctggttcagcatggagtccccaagccactgctggcagctgaaagccatggacggatacttcaatctcaccatgtcctaccgcagcgactccgacatcttcacgccctacggctggctggagccgtggtccggccagcctgcccacccaccgctcaacctctcggccaagaccgagctggtggcctgggcagtgtccaactgggggccaaactccgccagggtgcgctactaccagagcctgcaggcccatctcaaggtggacgtgtacggacgctcccacaagcccctgccccagggaaccatgatggagacgctgtcccggtacaagttctatctggccttcgagaactccttgcaccccgactacatcaccgagaagctgtggaggaacgccctggaggcctgggccgtgcccgtggtgctgggccccagcagaagcaactacgagaggttcctgccacccgacgccttcatccacgtggacgacttccagagccccaaggacctggcccggtacctgcaggagctggacaaggaccacgcccgctacctgagctactttcgctggcgggagacgctgcggcctcgctccttcagctgggcactcgctttctgcaaggcctgctggaaactgcaggaggaatccaggagtgggggcctcatctacctaaggactcgtttgcctgaagcttcacctgcctga

SEQ ID NO: 276154 - DNA, 527 bp, Artificial Sequence
  derived and/or modified sequence
ctcagaatccagctgttactccgtccgcggcctctcagctctagggccctctgcacactggcccccccagtgggtgtctgtctgtctctcttgcagagctctgcggtagaatcccgtgccccccgaccccatcagcagcctacaccccttcatccttcctggccccggattttctctgcctctgccactcccggtggtaaaagagggcttagaatgcggtttgctttctggctttgtttttttgcatcctgatctttgtggcgtggatcgatcattttccagggaaagtaccttggtgtcacgggcatccagacgggatccagtgcatcctcttttagaagaaaggcctgtctccagatccccgagtccctctagcatctcccagaaggtgtcagacgcagcagtgtccagggagcggcagcagatactctgacccatggatcccctgggcccggccaagccacagtggtcgtggcgctgctgtctgaccacgctgctgtttcagctgctgatggctgtgtgtttct

SEQ ID NO: 276155 - DNA, 700 bp, Artificial Sequence
  derived and/or modified sequence
gtggttggaaagggcctggtttcagctccgggtacacttcctccttccttctgctgcgtggtgtggcctcttccacgtcctcagaatccagctgttactccgtccgcggcctctcagctctagggccctctgcacactggcccccccagtgtcacgggcatccagacgggatccagtgcatcctcttttagaagaaaggcctgtctccagatccccgagtccctctagcatctcccagaaggtgtcagacgcagcagtgtccagggagcggcagcagatactctgacccatggatcccctgggcccggccaagccacagtggtcgtggcgctgctgtctgaccacgctgctgtttcagctgctgatggctgtgtgtttcttctcctatctgcgtgtgtctcaagacgatcccactgtgtaccctaatgggtcccgcttcccagacagcacagggacccccgcccactccatccccctgatcctgctgtggacgtggccttttaacaaacccatagctctgccccgctgctcagagatggtgcctggcacggctgactgcaacatcactgccgaccgcaaggtgtatccacaggcagacgcggtcatcgtgcaccaccgagaggtcatgtacaaccccagtgcccagctcccacgctccccgaggcggcaggggcagcgatggatctggttcagcatggag

SEQ ID NO: 276156 - DNA, 682 bp, Artificial Sequence
  derived and/or modified sequence
tgtcacgggcatccagacgggatccagtgcatcctcttttagaagaaaggcctgtctccagatccccgagtccctctagcatctcccagaaggtgtcagacgcagcagtgtccagggagcggcagcaggtccttatcatggtccaagggtccctcccagcctccaagtctcaccccatacatgaaaaaaggtggccccggtttcccgccacctcctccacagcaccatctctttgaagacccagtgcccacactccgggggatttgggccctcccctgtctccctccagccccctggggccagtccgctgctgggtatctccaggacgggccaggctcagcaagttccaccaaagcctgcttctctcctgggggttccccatgtctctgggtggccccactgccctcctggtcagcatattgaggaagagtctggggacacaccagaaaaggacaggatcaagatactctgacccatggatcccctgggcccggccaagccacagtggtcgtggcgctgctgtctgaccacgctgctgtttcagctgctgatggctgtgtgtttcttctcctatctgcgtgtgtctcaagacgatcccactgtgtaccctaatgggtcccgcttcccagacagcacagggacccccgcccactccatccccctgatcctgctgtggacgtgg

SEQ ID NO: 276157 - DNA, 564 bp, Artificial Sequence
  derived and/or modified sequence
acttcctccttccttctgctgcgtggtgtggcctcttccacgtcctcagaatccagctgttactccgtccgcggcctctcagctctagggccctctgcacactggcccccccagtgtcacgggcatccagacgggatccagtgcatcctcttttagaagaaaggcctgtctccagatccccgagtccctctagcatctcccagaaggtgtcagacgcagcagtgtccagggagcggcagcaggtccttatcatggtccaagggtccctcccagcctccaagtctcaccccatacatgaaaaaaggtggccccggtttcccgccacctcctccacagcaccatctctttgaagatactctgacccatggatcccctgggcccggccaagccacagtggtcgtggcgctgctgtctgaccacgctgctgtttcagctgctgatggctgtgtgtttcttctcctatctgcgtgtgtctcaagacgatcccactgtgtaccctaatgggtcccgcttcccagacagcacagggacccccgcccactccatccccctgatcctgctgtg

SEQ ID NO: 276158 - DNA, 530 bp, Artificial Sequence
  derived and/or modified sequence
gttactccgtccgcggcctctcagctctagggccctctgcacactggcccccccagagctctgcggtagaatcccgtgccccccgaccccatcagcagcctacaccccttcatccttcctggccccggattttctctgcctctgccactcccggtggtaaaagagggcttagaatgcggtttgctttctggctttgtttttttgcatcctgatctttgtggcgtggatcgatcattttccagggaaagtaccttggtgtcacgggcatccagacgggatccagtgcatcctcttttagaagaaaggcctgtctccagatccccgagtccctctagcatctcccagaaggtgtcagacgcagcagtgtccagggagcggcagcagatactctgacccatggatcccctgggcccggccaagccacagtggtcgtggcgctgctgtctgaccacgctgctgtttcagctgctgatggctgtgtgtttcttctcctatctgcgtgtgtctcaagacgatcccactgtgtaccc

SEQ ID NO: 276159 - DNA, 1098 bp, Artificial Sequence
  derived and/or modified sequence
atggacccactcggacccgcaaagcctcaatggagttggcgctgctgtctgaccaccctgctgtttcaactcctaatggctgtgtgcttcttctcctatctcagggtgagccaggatgaccccacagtgtatcccaacggttctaggtttcctgattcaacagggaccccagctcatagtatcccattaatactgttgtggacctggccttttaacaagccaatagcgctgcctcgctgtagcgagatggtaccaggcaccgcagattgtaatatcaccgctgatcgaaaggtgtaccctcaagcggacgccgtcatcgtgcaccatcgtgaagttatgtacaacccctcggcccaactgccaaggtcccctcgccggcagggacagcgctggatttggttcagtatggaaagccctagccactgctggcagctgaaggcaatggatggatacttcaatttaacgatgtcttaccgctccgattctgacatttttaccccctacggttggctcgaaccatggtccgggcagcctgcccacccaccacttaacctctccgctaagactgagctcgtcgcctgggcagtctctaattggggaccaaactccgcccgggtaaggtactatcagagcctgcaggctcacctcaaggtggacgtctacggtcgcagccataagccactcccccagggcacaatgatggagaccttgtcgaggtataaattctacctggctttcgagaactctctgcatccggattacataacagagaagctgtggcgcaacgccttggaggcttgggccgttccagtggtgttgggaccctccaggtccaattacgagaggtttcttccacctgatgccttcatccacgtcgatgactttcagagtcccaaggacctggctaggtacctccaggagctggacaaggatcatgctcgctatctaagctactttaggtggcgggagaccctacgaccccggagtttcagttgggctttggccttctgcaaagcttgctggaagctacaggaagaatccagatctggcggccttatctatttacgtacaagattaccagaggctagtcccgcatag

SEQ ID NO: 276160 - DNA, 93 bp, Artificial Sequence
  derived and/or modified sequence
atggacccactgggtccggcaaaacctcaatggtcttggaggtgctgtctgactaccttgctgttccaactgctaatggcagtgtgcttctag

SEQ ID NO: 276161 - DNA, 414 bp, Artificial Sequence
  derived and/or modified sequence
atggatcctctaggaccagcaaagccccagtggagttggcggtgctgtttgacaaccttgttattccagctgctgatggccgtgtgctttttctcatacttgagggtgtcgcaggatgacccgaccgtctaccctaatggctcccggttccctgactctaccggaactcctgcacattccattccacttatccttctgtggacttggccgtttaataagccaattgcgctgccacggtgttcagagatggttccaggtacggcagattgcaacataaccgcagaccggaaagtctatccccaggccgacgccgtgatcgtccatcacagggaagtcatgtacaatccttccgcccaactcccgcggagcccacgcagacagggacagaggtggatctggttttccatggagtag

SEQ ID NO: 276162 - DNA, 210 bp, Artificial Sequence
  derived and/or modified sequence
atggatccactgggccctgccaaaccgcagtggagctggagatgttgcctgactacgctactgttccagcttctcatggctgtctgtttttttagctacctccgcgtgagtcaggacgaccccaccgtataccccaacggtagtaggtttcctgattcgacaggaaccccagcccacagtatccctctgatcctgctctggacctggtag

SEQ ID NO: 276163 - DNA, 201 bp, Artificial Sequence
  derived and/or modified sequence
atggaccctctgggtcccgccaagcctcagtggagttggcgctgctgtttaactacgctccttttccagctcctcatggccgtgtgttttttctcttacttgcgggtctctcaagatgatcctacagtctacccaaacggttctagattccctgatagcaccggaaccccagcccactcgataccattgatcctcctctag

SEQ ID NO: 276164 - DNA, 138 bp, Artificial Sequence
  derived and/or modified sequence
atggatccactcggccctgcaaagccccagtggtcttggcggtgctgcctgacaaccttattgtttcagttactgatggcagtgtgcttcttctcctatttgagggtgtcccaggatgacccgaccgtgtacccatag

SEQ ID NO: 276165 - DNA, 1098 bp, Artificial Sequence
  derived and/or modified sequence
atggaccccctgggccctgccaagccccagtggagctggcgctgctgcctgaccaccctgctcttccagctgctgatggctgtgtgcttcttctcctacctgcgggtgtcccaggatgaccccaccgtgtaccccaacggcagccgcttcccagacagcacaggcaccccagcccacagcatccccctcatcctgctgtggacctggcccttcaacaagcccatcgccctgccccgctgcagcgagatggtgcctggaacagctgactgcaacatcacagctgacaggaaggtgtacccccaggctgatgctgtgattgtgcaccaccgggaggtgatgtacaaccccagcgcccagctgcccaggagcccccggcggcagggccagcgctggatctggttctccatggagagccccagccactgctggcagctgaaggccatggatggctacttcaacctgaccatgagctacagaagtgacagcgacatcttcaccccctacggctggctggagccctggagcggccagcctgcccacccccccctgaacctgagcgccaagacagagctggtggcctgggccgtgagcaactggggccccaacagcgcccgggtgcgctactaccagagcctgcaggcccacctgaaggtggatgtgtatggccgcagccacaagcccctgccccagggcaccatgatggagaccctgagccgctacaagttctacctggcctttgagaacagcctgcacccagactacatcacagagaagctgtggagaaatgccctggaggcctgggccgtgcctgtggtgctgggccccagccgcagcaactatgagcgcttcctgcccccagatgccttcatccacgtggatgacttccagagccccaaggacctggcccgctacctgcaggagctggacaaggaccacgcccgctacctgagctacttccgctggagggagaccctgcggcccaggagcttctcctgggccctggccttctgcaaggcctgctggaagctgcaggaggagagccgcagcggcggcctcatctacctgcggacccggctgcctgaggccagccctgcctag

SEQ ID NO: 276166 - DNA, 93 bp, Artificial Sequence
  derived and/or modified sequence
atggaccccctgggccctgccaagccccagtggagctggcgctgctgcctgaccaccctgctcttccagctgctgatggctgtgtgcttctag

SEQ ID NO: 276167 - DNA, 414 bp, Artificial Sequence
  derived and/or modified sequence
atggaccccctgggccctgccaagccccagtggagctggcgctgctgcctgaccaccctgctcttccagctgctgatggctgtgtgcttcttctcctacctgcgggtgtcccaggatgaccccaccgtgtaccccaacggcagccgcttcccagacagcacaggcaccccagcccacagcatccccctcatcctgctgtggacctggcccttcaacaagcccatcgccctgccccgctgcagcgagatggtgcctggaacagctgactgcaacatcacagctgacaggaaggtgtacccccaggctgatgctgtgattgtgcaccaccgggaggtgatgtacaaccccagcgcccagctgcccaggagcccccggcggcagggccagcgctggatctggttctccatggagtag

SEQ ID NO: 276168 - DNA, 210 bp, Artificial Sequence
  derived and/or modified sequence
atggaccccctgggccctgccaagccccagtggagctggcgctgctgcctgaccaccctgctcttccagctgctgatggctgtgtgcttcttctcctacctgcgggtgtcccaggatgaccccaccgtgtaccccaacggcagccgcttcccagacagcacaggcaccccagcccacagcatccccctcatcctgctgtggacctggtag

SEQ ID NO: 276169 - DNA, 201 bp, Artificial Sequence
  derived and/or modified sequence
atggaccccctgggccctgccaagccccagtggagctggcgctgctgcctgaccaccctgctcttccagctgctgatggctgtgtgcttcttctcctacctgcgggtgtcccaggatgaccccaccgtgtaccccaacggcagccgcttcccagacagcacaggcaccccagcccacagcatccccctcatcctgctgtag

SEQ ID NO: 276170 - DNA, 138 bp, Artificial Sequence
  derived and/or modified sequence
atggaccccctgggccctgccaagccccagtggagctggcgctgctgcctgaccaccctgctcttccagctgctgatggctgtgtgcttcttctcctacctgcgggtgtcccaggatgaccccaccgtgtacccctag

SEQ ID NO: 276171 - DNA, 1098 bp, Artificial Sequence
  derived and/or modified sequence
atggaccccctgggccccgccaagccccagtggagctggcggtgctgcctcacaacactactgtttcaactattgatggccgtgtgctttttctcatacctacgcgtatcccaggatgatcctacagtgtatcccaacgggtcccgttttccagacagcactggaaccccagcccacagtatccctctgattctgctatggacatggccattcaataagcccatcgctctgccccgatgcagcgaaatggtccctggcacagccgactgtaacatcaccgccgaccggaaagtctatccacaggctgacgccgttattgtgcaccatcgggaagtgatgtataacccctcggcccagctccctcgcagtccccggcggcagggccaacgatggatctggtttagtatggagtcgccgtcccactgttggcagcttaaagctatggacggatattttaacctgacaatgtcgtatagaagtgactccgatattttcaccccttatggctggctcgagccttggagcggacaaccagcccaccccccattgaacctttcagccaagaccgaacttgtagcttgggccgtatctaattggggacccaatagtgcacgggtgagatactaccagtcactccaggctcacctgaaggttgacgtctatggacgaagtcacaagccactgccccaggggactatgatggagacgcttagccggtataagttctacctggcattcgaaaattccctgcacccggattatatcactgaaaaactgtggcgcaatgccctggaagcttgggctgtgcctgttgtgctcggccctagtaggtcaaattatgaacgttttttacccccagatgccttcatacatgtggacgatttccagtcccccaaggacctcgcgcgctacctgcaagaactcgacaaagaccatgcccgctatctctcttatttccgctggagagagaccctccggcccaggtcattctcatgggccctggccttttgcaaagcctgttggaagctgcaagaggagtcgcggtcaggtggactgatttatttgagaacgaggcttcccgaggcttcgcctgcctag

SEQ ID NO: 276172 - DNA, 93 bp, Artificial Sequence
  derived and/or modified sequence
atggaccccctgggccccgccaagccccagtggagctggcggtgctgtctcaccaccctgttgttccagctgctgatggcggtgtgcttttag

SEQ ID NO: 276173 - DNA, 414 bp, Artificial Sequence
  derived and/or modified sequence
atggaccccctgggccccgccaagccccagtggagctggcggtgctgcctaacaaccctgctcttccagctgcttatggcagtttgcttcttcagttatctaagagtctctcaagacgatcccaccgtctaccctaatggcagccgctttcctgacagcaccggaactccggcacacagtatcccactgattttgctttggacgtggccctttaataaaccaattgccctgcctaggtgctcagagatggtacctggtaccgcagattgtaacatcaccgcggatcgcaaagtttacccccaggctgacgccgtcatcgtccatcatcgggaggttatgtataatccatccgcccagttgcctagaagccctcgcaggcagggacagagatggatctggttctctatggagtag

SEQ ID NO: 276174 - DNA, 210 bp, Artificial Sequence
  derived and/or modified sequence
atggaccccctgggccccgccaagccccagtggagctggcggtgctgcctgactactcttctgttccagcttttgatggctgtgtgctttttttcatacctgcgtgtgagccaagatgacccgacagtctatcctaatggttcaaggttcccagatagtactgggacccccgcacatagcataccgttgatccttctatggacctggtag

SEQ ID NO: 276175 - DNA, 201 bp, Artificial Sequence
  derived and/or modified sequence
atggaccccctgggccccgccaagccccagtggagctggcggtgctgtcttacgaccctgttattccagcttttgatggcggtgtgcttcttctcctacctcagggtgtcccaggacgaccccaccgtgtacccaaatggatcaagattccccgactccacgggaactccagcacactccatcccactgatcctgctctag

SEQ ID NO: 276176 - DNA, 138 bp, Artificial Sequence
  derived and/or modified sequence
atggaccccctgggccccgccaagccccagtggagctggcggtgctgtttaacaaccttactgttccaactcctcatggctgtctgttttttttcatacttgagggtgtctcaggacgatcctactgtctatccatag

SEQ ID NO: 276177 - DNA, 1098 bp, Artificial Sequence
  derived and/or modified sequence
atggatccactgggcccagcaaagccacagtggtcttggcgctgttgccttacaactttgttatttcaacttctgatggccgtgtgtttctttagctatcttagagtgagccaggatgatccaaccgtatatccaaacggctctaggtttccagatagcacaggcacaccggctcacagcatccctttgattttgctgtggacatggcccttcaataagccaatagcgttaccacgctgtagtgaaatggtcccaggaaccgcggattgtaatatcacggccgatagaaaggtctatccccaggctgatgccgttatcgtgcaccatcgcgaggtcatgtacaatccctctgcccaactgccacgaagtccaagaagacagggtcagagatggatttggtttagcatggaatcacctagccactgctggcagctgaaagcaatggatggctactttaatcttactatgtcttatcggtcggacagcgacatattcactccgtacggatggctggagccatggagtggtcagccagcccaccctccactcaatctgtcagccaagacggaactcgtcgcctgggcagtgagcaattggggtccaaactcggctagggttcgctactatcaaagccttcaagctcacctgaaagtggatgtttacggcagatcacataagcctctgcctcaaggaaccatgatggagaccctgtccaggtacaagttctatctggcgtttgagaactcactccatcccgattacataactgagaaactttggcgaaacgcgttggaggcctgggccgtgcctgtagtccttgggccttcccgctctaattacgaacgctttctacctcccgacgcctttattcatgtagatgacttccagtcccctaaagatctggcacgctatctccaggagctggataaagatcacgcaagatatctaagttatttcagatggagagagaccctgagaccgaggagctttagctgggccctggctttctgtaaggcttgctggaaattgcaggaggagagtaggagtgggggacttatatatttgcgtaccaggttgcctgaagcaagcccagcatag

SEQ ID NO: 276178 - DNA, 93 bp, Artificial Sequence
  derived and/or modified sequence
atggatccgctcggacctgccaaacctcagtggtcttggcgctgctgtctgactactctgctatttcagctgctcatggctgtttgtttttag

SEQ ID NO: 276179 - DNA, 414 bp, Artificial Sequence
  derived and/or modified sequence
atggatcctctcgggccagccaaaccacagtggtcatggagatgctgtctcactactttactgtttcagttattaatggcagtgtgcttttttagttatcttcgcgtctctcaggacgatccgacagtatacccaaacggttcccgctttcccgacagcaccggtactccggcacactccatccccctaatccttctctggacgtggcccttcaataagcccattgcgctgcccaggtgctcagagatggtgcccggaaccgccgactgtaatatcactgcagataggaaagtatatccccaagctgatgctgtgattgtgcaccatagggaggtgatgtataatccttctgcgcagcttccgaggtctcccagaagacaggggcagaggtggatttggtttagcatggaatag

SEQ ID NO: 276180 - DNA, 210 bp, Artificial Sequence
  derived and/or modified sequence
atggatccgctcggaccagccaagccccaatggagttggaggtgctgtctcactacacttctgttccagctgctgatggccgtctgctttttctcctaccttagagtgtcccaggatgacccgaccgtatacccgaacgggtcgaggttccccgacagtacggggactcccgctcacagcattccactcatcctgctttggacatggtag

SEQ ID NO: 276181 - DNA, 201 bp, Artificial Sequence
  derived and/or modified sequence
atggatccgttaggaccagctaaaccacagtggagctggcgttgctgcctcaccactctactattccagttgcttatggccgtgtgcttcttttcctacctccgggtgtcacaggacgaccccactgtgtatcctaatgggtctcggtttccggactccacaggcacccccgctcattcaattccactaatcctgctttag

SEQ ID NO: 276182 - DNA, 138 bp, Artificial Sequence
  derived and/or modified sequence
atggatcccctaggtcctgcgaagccacaatggagttggaggtgctgtctaaccacactgctgttccagctgctgatggccgtatgttttttttcgtacttgagagtcagtcaggatgaccctaccgtgtatccttag

SEQ ID NO: 276183 - DNA, 1098 bp, Artificial Sequence
  derived and/or modified sequence
atggaccccctgggccccgccaagccccagtggagctggagatgctgcctgaccaccctgctgttccagctgctgatggccgtgtgcttcttcagctacctgagagtgagccaggacgaccccaccgtgtaccccaacggcagcagattccccgacagcaccggcacccccgcccacagcatccccctgatcctgctgtggacctggcccttcaacaagcccatcgccctgcccagatgcagcgagatggtgcccggcaccgccgactgcaacatcaccgccgacagaaaggtgtacccccaggccgacgccgtgatcgtgcaccacagagaggtgatgtacaaccccagcgcccagctgcccagaagccccagaagacagggccagagatggatctggttcagcatggagagccccagccactgctggcagctgaaggccatggacggctacttcaacctgaccatgagctacagaagcgacagcgacatcttcaccccctacggctggctggagccctggagcggccagcccgcccacccccccctgaacctgagcgccaagaccgagctggtggcctgggccgtgagcaactggggccccaacagcgccagagtgagatactaccagagcctgcaggcccacctgaaggtggacgtgtacggcagaagccacaagcccctgccccagggcaccatgatggagaccctgagcagatacaagttctacctggccttcgagaacagcctgcaccccgactacatcaccgagaagctgtggagaaacgccctggaggcctgggccgtgcccgtggtgctgggccccagcagaagcaactacgagagattcctgccccccgacgccttcatccacgtggacgacttccagagccccaaggacctggccagatacctgcaggagctggacaaggaccacgccagatacctgagctacttcagatggagagagaccctgagacccagaagcttcagctgggccctggccttctgcaaggcctgctggaagctgcaggaggagagcagaagcggcggcctgatctacctgagaaccagactgcccgaggccagccccgcctag

SEQ ID NO: 276184 - DNA, 93 bp, Artificial Sequence
  derived and/or modified sequence
atggaccccctgggccccgccaagccccagtggagctggagatgctgcctgaccaccctgctgttccagctgctgatggccgtgtgcttctag

SEQ ID NO: 276185 - DNA, 414 bp, Artificial Sequence
  derived and/or modified sequence
atggaccccctgggccccgccaagccccagtggagctggagatgctgcctgaccaccctgctgttccagctgctgatggccgtgtgcttcttcagctacctgagagtgagccaggacgaccccaccgtgtaccccaacggcagcagattccccgacagcaccggcacccccgcccacagcatccccctgatcctgctgtggacctggcccttcaacaagcccatcgccctgcccagatgcagcgagatggtgcccggcaccgccgactgcaacatcaccgccgacagaaaggtgtacccccaggccgacgccgtgatcgtgcaccacagagaggtgatgtacaaccccagcgcccagctgcccagaagccccagaagacagggccagagatggatctggttcagcatggagtag

SEQ ID NO: 276186 - DNA, 210 bp, Artificial Sequence
  derived and/or modified sequence
atggaccccctgggccccgccaagccccagtggagctggagatgctgcctgaccaccctgctgttccagctgctgatggccgtgtgcttcttcagctacctgagagtgagccaggacgaccccaccgtgtaccccaacggcagcagattccccgacagcaccggcacccccgcccacagcatccccctgatcctgctgtggacctggtag

SEQ ID NO: 276187 - DNA, 201 bp, Artificial Sequence
  derived and/or modified sequence
atggaccccctgggccccgccaagccccagtggagctggagatgctgcctgaccaccctgctgttccagctgctgatggccgtgtgcttcttcagctacctgagagtgagccaggacgaccccaccgtgtaccccaacggcagcagattccccgacagcaccggcacccccgcccacagcatccccctgatcctgctgtag

SEQ ID NO: 276188 - DNA, 138 bp, Artificial Sequence
  derived and/or modified sequence
atggaccccctgggccccgccaagccccagtggagctggagatgctgcctgaccaccctgctgttccagctgctgatggccgtgtgcttcttcagctacctgagagtgagccaggacgaccccaccgtgtacccctag

SEQ ID NO: 276189 - protein, 481 aa, Artificial Sequence
  derived and/or modified sequence
MGKLRPGRVEWLASGHTERPHLFQNLLLFLWALLNCGLGVSAQGPGEWTPWVSWTRCSSSCGRGVSVRSRRCLRLPGEEPCWGDSHEYRLCQLPDCPPGAVPFRDLQCALYNGRPVLGTQKTYQWVPFHGAPNQCDLNCLAEGHAFYHSFGRVLDGTACSPGAQGVCVAGRCLSAGCDGLLGSGALEDRCGRCGGANDSCLFVQRVFRDAGAFAGYWNVTLIPEGARHIRVEHRSRNHLALMGGDGRYVLNGHWVVSPPGTYEAAGTHVVYTRDTGPQETLQAAGPTSHDLLLQVLLQEPNPGIEFEFWLPRERYSPFQARVQALGWPLRQPQPRGVEPQPPAAPAVTPAQTPTLAPDPCPPCPDTRGRAHRLLHYCGSDFVFQARVLGHHHQAQETRYEVRIQLVYKNRSPLRAREYVWAPGHCPCPMLAPHRDYLMAVQRLVSPDGTQDQLLLPHAGYARPWSPAEDSRIRLTARRCPG

SEQ ID NO: 276190 - DNA, 1446 bp, Artificial Sequence
  derived and/or modified sequence
atgggcaaactgcgccctggacgtgtcgagtggctggcctctggacacaccgagcgcccacacctgttccagaacctgctcctgtttctgtgggcccttctgaactgtggccttggagtgagcgcgcaggggcctggcgagtggaccccgtgggtgtcgtggaccagatgcagtagcagttgtggccgtggcgtgagtgttagaagcaggagatgcctccggctaccaggcgaggagccctgctggggcgactcacacgagtatcgactttgtcaactgccagactgccctcctggagctgtcccattccgggatctgcagtgcgccctgtataatggtaggccagtgttagggacacagaagacctaccagtgggttcccttccatggcgcaccaaatcagtgtgacctgaattgtctcgctgagggccacgcattctatcacagttttggcagagtcctggacggcaccgcatgcagccctggcgcacagggcgtatgcgtggccggaagatgcttgagtgccggttgtgacggcctgctcggatccggcgcactggaagataggtgtgggcgttgcggaggggctaacgactcttgcctgttcgtccaaagggtattccgagatgccggtgcattcgccggatactggaacgtgacgcttattcctgaaggagctcggcatataagggtcgaacatcgctctcggaatcaccttgcccttatgggcggagacggacggtacgtgctgaatgggcattgggtcgtttctccccctggtacctacgaggctgcaggtacccacgtggtgtatacccgcgatacgggaccgcaggagacattacaggctgctgggccaacctcccatgacctcctactacaggtacttctgcaggagccaaacccgggaattgagttcgagttctggctcccccgtgagcggtactcaccttttcaggcccgagtgcaagctctgggctggcctctaagacaacctcaaccgcgaggggttgaaccacaaccccctgccgcaccagcggtcaccccagcacagaccccgaccttggctccagatccctgccccccatgccctgacacccgcggacgggctcaccggttgctccactactgtggcagcgacttcgttttccaagctagggtcctcggccaccatcaccaggcacaagagaccaggtatgaagttcgcattcagcttgtttataaaaaccgttccccccttagggcccgagaatatgtttgggcacctgggcactgtccctgtcctatgcttgcccctcaccgcgattacctcatggcagtgcaacgcctggtgagccctgacggtacccaagaccaacttttgttgccccacgcaggatacgccagaccctggtccccagctgaagactcaaggatcagattaacagctcggcgttgccccggatag

SEQ ID NO: 276191 - DNA, 2443 bp, Artificial Sequence
  derived and/or modified sequence
atggggaaactgaggcctgggagagtggagtggctggcctcaggccacacggaaaggccccacctcttccagaacctcctgctcttcctgtgggccctgctgaactgtggtttgggggtcagtgctcagggtccgggcgagtggaccccgtgggtgtcctggacccgctgctccagctcctgcgggcgtggcgtctctgtgcgcagccggcgctgcctccggcttcctggggaagaaccgtgctggggagactcccatgagtaccgcctctgccagttgccagactgccccccaggggctgtgcccttccgagacctacagtgtgccctgtacaatggccgccctgtcctgggcacccagaagacctaccagtgggtgcccttccatggggcgcccaaccagtgcgacctcaactgcctggctgaggggcacgccttctaccacagcttcggccgcgtcctggacggcaccgcctgcagcccgggtgcccagggggtctgcgtggctggccgctgccttagcgccggctgtgatgggttgttgggctcgggtgccctcgaggaccgctgtggccgctgcggaggcgccaacgactcgtgccttttcgtgcagcgcgtgtttcgtgacgccggtgccttcgctgggtactggaacgtgaccctgatccccgagggcgccagacacatccgcgtggaacacaggagccgcaaccacctggcactgatggggggcgatgggcgctacgtgcttaatgggcactgggtggtcagcccaccagggacctacgaggcggccggcacgcatgtggtctacacccgagacacagggccccaggagacattgcaagcagccgggcccacctcccatgacctgctcctacaggtcctcctgcaggagcccaaccctggcatcgagtttgagttctggctccctcgggagcgctacagccccttccaggctcgtgtgcaggccctgggctggcccctgaggcagcctcagccccggggggtggagcctcagccccccgcagcccctgctgtcacccctgcacagaccccaacgctggccccagacccctgcccaccctgccctgacacccgcggccgcgcccaccgactactccactattgcggcagtgactttgtgttccaggcccgagtgctgggccaccaccaccaggcccaggagacccgctatgaggtgcgcatccagctcgtctacaagaaccgctcgccactgcgggcacgcgagtacgtgtgggcgccaggccactgcccctgcccgatgctggcaccccaccgggactacctgatggctgtccagcgtcttgtcagccccgacggcacacaggaccagctgctgctgccccacgccggctacgcccggccctggagccctgcggaggacagccgcatacgcctgactgcccggcgctgtcctggctgagcccctgcaggagccccggccacacacagcaagaaagatacatctgaccagcctcaacgtcaacgtatttcccctctcaccctggcttccaggcagctctgaaatacgtcccacctgtgcagctatgtgactccctcccacacacgcttaagacacctctgcatgcagtcaaagccactgtcacaagccggcaggcactggtgaggaggcactaaggagactctgacttttatttcgcctctctccttggctgccaggaagctcatagctatttatactcagaaagtttaacgctgctttctttctctttgcgcgcgtcacacttgcttggagacactgtcatgaacgagcatgacaccctgctgccctgggtacccagaagatcatctgtttacttcccagacactgtgctgtctctgctctctgctactcacacacaccctcatgtgtgaagggcagagacactgtcacaaacaggcatgccccttagaagacatgcctaaccaggcactgtaacgtaccaacgtaccaatttccccttttcccctggctaccaggaaactcggagacaatcttttcagcctcagcatttctggctggatttccacccatcaacacgtgcttgctcctcctttttttttttttctgaggtagacccttgctctgtcacctaggctgaagtgcggtggtgcaatcatggctcactgcagcctcaaattcctgggctcaagcgatcctcccacctcagcctccacagcagctggaactccaggtgtgaatcaccatgcccggctaacttttaaattttttgtagagatggggtcttgctacgttgcccacactgctctccaactactggcctcaaacgatcctcctgcctcggcctcccaaagcactggaatttcaggcatgcactatcgtactggctgttcaccccccttttattcctctttaatttttacaagcactttttaaaaaaaaattttactttaagttc

SEQ ID NO: 276192 - DNA, 1446 bp, Artificial Sequence
  derived and/or modified sequence
atggggaaactgcgccccggcagggtggagtggttggcaagcgggcatacagagcgaccacacctctttcaaaatctgttgctttttttatgggcactgctcaattgtggacttggcgtttccgcccaaggacccggggagtggactccttgggtcagctggacccgctgttcttcttcatgtggacggggcgtttcagtgaggagtcgccgctgcctacgcttacccggcgaggagccatgttggggtgattctcatgagtacaggctgtgccaactgccagattgtccgccaggtgcagtaccattccgagacctgcagtgcgcactgtataatgggcggcccgtgttgggtactcagaagacttaccaatgggtgccttttcatggcgcgccaaaccagtgtgatcttaactgcttagcagaagggcatgccttttaccattccttcggccgtgtgctagacggcactgcctgcagtcctggagcccaaggcgtttgtgttgctggccgttgtctttcggcaggctgtgatggattgctaggatctggcgccttggaagataggtgtggccgatgcggcggcgccaatgatagttgtctctttgtacagcgggttttcagagacgcaggcgcctttgcaggctactggaatgttacactgatcccggagggcgcacgccacattcgcgtggagcaccgttcaagaaatcatctggctcttatgggcggcgatggccgctatgttctgaacggccactgggttgtcagccccccaggcacgtatgaagctgccggaacccacgtagtatatacacgcgataccggaccccaagagaccctgcaagccgctggccccacttcacacgacctgctgttgcaggtgctcctgcaggaacctaatccaggcattgagttcgaattctggttacccagagaacgatactccccctttcaagctcgagtgcaagcgctcgggtggcccctccgccagccccaacccaggggcgtcgagcctcagcctcctgctgcgcccgctgttaccccggcgcaaacccccaccttggcacccgacccatgccccccttgtcccgacaccagaggaagggcccatcgcctgttacactattgtggttctgacttcgttttccaggctcgcgtgctcggacatcatcaccaagcgcaagagacccgctatgaagtaaggatacagctggtgtacaaaaatcgtagccccttaagagcaagggaatatgtctgggctccgggccactgtccctgtccaatgctcgcccctcaccgggactacttgatggctgtgcaacgactcgtctctcccgacggaacacaagatcagttactgctccctcatgcaggttacgctcgtccgtggagcccagctgaagactcccgcattcggctgaccgcgcgcagatgccctgggtag

SEQ ID NO: 276193 - DNA, 1446 bp, Artificial Sequence
  derived and/or modified sequence
atgggaaaactccgtcctggcagagtggagtggttagcctcaggacataccgagagacctcacctcttccagaatttgttacttttcctttgggcattactcaactgtggactaggcgtctccgcacagggccctggagagtggaccccatgggtaagttggacacggtgcagcagctcctgtggaaggggtgttagtgtgcgatcaagacgctgcttgcggctccctggtgaggaaccatgttggggagactcccatgagtacaggctgtgccaactgccggattgtcctcccggagctgtgcccttccgagatcttcagtgcgccctgtacaacggaagaccagttctcggaacgcaaaaaacttatcagtgggtacctttccacggcgcccctaaccagtgtgatctcaactgcttagccgagggtcatgccttctaccactcatttggcagagtgcttgacggcaccgcatgttcaccaggcgctcagggcgtgtgcgtagccggaagatgcctttctgcaggttgcgacggcttgcttgggtcaggagcccttgaagaccgttgcggtaggtgcggcggtgcaaatgatagctgtttgtttgttcaacgggtatttcgagatgcaggggctttcgctggatactggaatgtgaccctcatcccagagggagccagacacattagagtcgaacacaggtcaagaaatcacctggctctcatgggtggagacgggcgttatgtgctgaatggccactgggtggttagtcccccaggcacatacgaagccgcaggcactcatgttgtgtacacaagagatacaggcccccaggagactcttcaagctgccggccctacgagccacgaccttctcctgcaagtactgctccaggaacccaaccctgggatcgagtttgaattctggttgcctcgggaaaggtattcacccttccaagctagagtccaggctttgggatggccattaaggcaacctcagccccgtggcgtggagccccagcctcctgcagcaccagccgtgacgcccgcccaaactccaacactggcacccgatccctgccccccctgcccagatacacggggtcgcgcccacagactcctccactattgcggctcagacttcgtttttcaagctcgcgtgctcggacatcaccaccaggcacaggaaactcgttatgaagttagaatccagcttgtctacaagaataggtccccacttcgcgcgagggagtacgtgtgggctcccggccattgcccctgccctatgctggcacctcacagagactacctaatggctgttcagaggttagtgtcacccgatggaacacaggatcagctgttgcttccacacgctggctatgctcgaccgtggagccctgccgaggactctcgtatccgactcacagccagaagatgccctggatag

SEQ ID NO: 276194 - DNA, 1446 bp, Artificial Sequence
  derived and/or modified sequence
atgggcaagctgagacccggcagagtggagtggctggccagcggccacaccgagagaccccacctgttccagaacctgctgctgttcctgtgggccctgctgaactgcggcctgggcgtgagcgcccagggccccggcgagtggaccccctgggtgagctggaccagatgcagcagcagctgcggcagaggcgtgagcgtgagaagcagaagatgcctgagactgcccggcgaggagccctgctggggcgacagccacgagtacagactgtgccagctgcccgactgcccccccggcgccgtgcccttcagagacctgcagtgcgccctgtacaacggcagacccgtgctgggcacccagaagacctaccagtgggtgcccttccacggcgcccccaaccagtgcgacctgaactgcctggccgagggccacgccttctaccacagcttcggcagagtgctggacggcaccgcctgcagccccggcgcccagggcgtgtgcgtggccggcagatgcctgagcgccggctgcgacggcctgctgggcagcggcgccctggaggacagatgcggcagatgcggcggcgccaacgacagctgcctgttcgtgcagagagtgttcagagacgccggcgccttcgccggctactggaacgtgaccctgatccccgagggcgccagacacatcagagtggagcacagaagcagaaaccacctggccctgatgggcggcgacggcagatacgtgctgaacggccactgggtggtgagcccccccggcacctacgaggccgccggcacccacgtggtgtacaccagagacaccggcccccaggagaccctgcaggccgccggccccaccagccacgacctgctgctgcaggtgctgctgcaggagcccaaccccggcatcgagttcgagttctggctgcccagagagagatacagccccttccaggccagagtgcaggccctgggctggcccctgagacagccccagcccagaggcgtggagccccagccccccgccgcccccgccgtgacccccgcccagacccccaccctggcccccgacccctgccccccctgccccgacaccagaggcagagcccacagactgctgcactactgcggcagcgacttcgtgttccaggccagagtgctgggccaccaccaccaggcccaggagaccagatacgaggtgagaatccagctggtgtacaagaacagaagccccctgagagccagagagtacgtgtgggcccccggccactgcccctgccccatgctggccccccacagagactacctgatggccgtgcagagactggtgagccccgacggcacccaggaccagctgctgctgccccacgccggctacgccagaccctggagccccgccgaggacagcagaatcagactgaccgccagaagatgccccggctag

SEQ ID NO: 276195 - DNA, 1446 bp, Artificial Sequence
  derived and/or modified sequence
atgggcaagttgaggccgggcagggtggagtggctagccagcggccatacagaacggccgcatttattccagaacttgttgctgttcctgtgggcactgctgaactgtggtcttggcgtgtccgctcagggtcccggtgagtggaccccatgggtcagctggacacgctgttcatctagttgtggccggggtgtctccgttaggagccgacgatgcctcagactccccggcgaggaaccatgctggggggacagccacgaataccgcctctgccaactcccagattgccctcccggcgccgttccttttcgcgacttacagtgtgccttgtacaatggtcgacccgtgctggggacgcagaagacatatcagtgggtaccattccacggtgcccccaaccagtgtgaccttaactgtctagccgagggccacgcgttctaccactcattcgggagagtgctcgatggaaccgcctgctcgccaggcgctcagggcgtctgtgttgcgggacgttgtttgagcgccggctgcgacgggctgttgggcagcggcgctctggaggaccgctgcggtagatgcggcggcgccaacgacagttgtttatttgtgcagagggttttccgagatgccggcgcgttcgccggctattggaacgtgactcttatccctgaaggagcacgacacattagagttgagcatcgttcacgaaaccacttagcccttatgggtggcgacgggagatatgttctgaacggacattgggtggttagcccacctggtacctacgaagctgcaggtactcatgtggtatataccagagatactggccctcaggagactcttcaggcagctggacctaccagtcacgatctgctccttcaggttcttctgcaggaaccaaaccccggcattgaatttgaattctggcttccccgcgagaggtattcccctttccaggctagggtgcaggcattgggatggccactgaggcagccccagcccagaggcgtggagcctcagcccccagcggctccggccgtgacaccagcgcagacacccacactagcaccggatccttgccctccctgccccgataccaggggcagagcccaccggctccttcactactgcggatcagacttcgtgtttcaggctagggttctgggccaccaccaccaggcccaagagacccgctatgaggtacgcatccagctagtgtataaaaacagaagcccactcagggcccgcgagtacgtgtgggcccctggccattgcccctgtcctatgctggccccccaccgggactacctcatggccgtccagcgcctggtttcccccgacggtacgcaggaccagcttctgctgccgcatgcaggctatgctagaccatggtcacctgccgaagatagtagaatccggcttacggcacgccggtgcccaggctag

SEQ ID NO: 276196 - DNA, 1446 bp, Artificial Sequence
  derived and/or modified sequence
atgggcaagctgcggcccggccgggtggagtggctggccagcggccacacagagcggccccacctgttccagaacctgctgctcttcctgtgggccctgctgaactgtggcctgggcgtgtctgcccagggccctggagagtggaccccctgggtgtcctggacccgctgcagcagcagctgtggccggggcgtgtctgtgcgcagccgccgctgcctgcggctgcccggggaggagccctgctggggagacagccatgagtaccgcctgtgccagctgcctgactgccccccaggagctgtgcccttccgggacctgcagtgtgccctgtacaacggccggcctgtgctgggcacccagaagacctaccagtgggtgcccttccatggagcccccaaccagtgtgacctgaactgcctggccgagggccacgccttctaccacagctttggccgggtgctggatggaacagcctgcagccctggggcccagggcgtgtgtgtggccggccgctgcctgtctgctggctgtgatggcctgctgggcagcggggccctggaggacagatgtggccgctgtggcggggccaatgacagctgcctgtttgtgcagagggtcttcagagatgctggggcctttgctggctactggaatgtgaccctcatccctgagggcgcccggcacatccgggtggagcacaggagcaggaaccacctggccctgatgggaggagatggccgctacgtgctgaatggccactgggtggtgagccccccaggcacctatgaggccgccggcacccacgtggtgtacacccgggacaccggcccccaggagaccctgcaggccgccggccccaccagccatgacctgctgctgcaggtgctgctgcaggagcccaaccctggcatcgagtttgagttctggctgccccgggagcgctacagccccttccaggcccgggtgcaggccctgggctggcccctgcggcagccccagccccggggcgtggagccccagcccccagctgccccagctgtgaccccagcccagacccccaccctggccccagacccctgccccccctgcccagacacccggggccgggcccaccggctgctgcactactgcggcagtgactttgtgttccaggcccgggtgctgggccaccaccaccaggcccaggagaccaggtatgaggtgcgcatccagctggtgtacaagaacagaagccccctgcgggcccgggagtatgtgtgggcccctggccactgcccctgccccatgctggccccccaccgggactacctgatggctgtgcagaggctggtgtccccagatggcacccaggaccagctgctgctgccccacgccggctacgcccggccctggagccctgctgaggacagccgcatccggctgacagcccggcgctgccccggctag

SEQ ID NO: 276197 - DNA, 1446 bp, Artificial Sequence
  derived and/or modified sequence
atgggcaagctgcggcccggccgggtggagtggctggccagcggccatactgagaggccacacctgtttcagaatttgctgctgtttctgtgggccctgctcaattgtggtttgggagtgtccgcacaaggtccaggagagtggacaccatgggtttcgtggacccggtgttcatcatcttgcggccggggcgtgtcagtaagaagccgccgctgtctaagactgcctggcgaagagccatgctggggggacagtcacgagtatagactttgtcaacttccggactgcccgccgggggctgttccctttcgtgacctacagtgtgctctgtacaacggaaggcctgtactagggacacagaagacgtaccagtgggtgcccttccacggagcccccaaccagtgtgatctcaattgtctggctgagggccatgcattttaccattctttcgggcgcgttctggatggcactgcttgcagccccggggcccaaggcgtgtgcgtcgcaggtaggtgcctgagcgccggatgtgacggactgcttggttccggggccctggaggataggtgcggtagatgtggcggagctaacgattcctgtctattcgtccagcgcgttttccgggatgccggtgcattcgcaggctattggaacgtcacacttattcccgagggcgcgagacatatacgcgtcgagcacagaagcagaaaccatttagccttgatgggcggagatggccgctacgtgttaaatggtcactgggtcgtgtctccacctggcacttacgaggcggcagggactcatgtcgtgtatacaagggataccggaccacaggagacacttcaggcagccggacccacttctcacgatctgttactgcaggttctcctccaggaaccgaaccccggcatcgaattcgaattctggcttcctcgggaacgctactcaccatttcaggctcgggtgcaagctctcggctggccattacgccagccccagccccgaggcgtcgaaccccagccaccagctgctccagctgtcacccccgcgcagactcccacacttgcaccggacccctgcccaccgtgccccgacactcggggaagggctcatcggctcttgcattattgtggctctgacttcgtgttccaggccagagtcctgggccaccaccaccaggctcaggaaacccgctatgaagtgaggatccagcttgtgtataagaaccggtcgcccctcagagctcgcgagtacgtctgggcccccgggcattgcccctgcccgatgctggccccccaccgcgattacttgatggctgtgcaacggctggtgagtccggacggcacgcaagatcagctgctgctgccgcacgcaggctatgcaagaccttggtccccagcggaggacagccggatccggttaactgcccgccgctgcccgggatag

SEQ ID NO: 276198 - RNA, 1446 nt, Artificial Sequence
  derived and/or modified sequence
auggggaaacugcgccccggcaggguggagugguuggcaagcgggcauacagagcgaccacaccucuuucaaaaucuguugcuuuuuuuaugggcacugcucaauuguggacuuggcguuuccgcccaaggacccggggaguggacuccuugggucagcuggacccgcuguucuucuucauguggacggggcguuucagugaggagucgccgcugccuacgcuuacccggcgaggagccauguuggggugauucucaugaguacaggcugugccaacugccagauuguccgccaggugcaguaccauuccgagaccugcagugcgcacuguauaaugggcggcccguguuggguacucagaagacuuaccaaugggugccuuuucauggcgcgccaaaccagugugaucuuaacugcuuagcagaagggcaugccuuuuaccauuccuucggccgugugcuagacggcacugccugcaguccuggagcccaaggcguuuguguugcuggccguugucuuucggcaggcugugauggauugcuaggaucuggcgccuuggaagauagguguggccgaugcggcggcgccaaugauaguugucucuuuguacagcggguuuucagagacgcaggcgccuuugcaggcuacuggaauguuacacugaucccggagggcgcacgccacauucgcguggagcaccguucaagaaaucaucuggcucuuaugggcggcgauggccgcuauguucugaacggccacuggguugucagccccccaggcacguaugaagcugccggaacccacguaguauauacacgcgauaccggaccccaagagacccugcaagccgcuggccccacuucacacgaccugcuguugcaggugcuccugcaggaaccuaauccaggcauugaguucgaauucugguuacccagagaacgauacucccccuuucaagcucgagugcaagcgcucggguggccccuccgccagccccaacccaggggcgucgagccucagccuccugcugcgcccgcuguuaccccggcgcaaacccccaccuuggcacccgacccaugccccccuugucccgacaccagaggaagggcccaucgccuguuacacuauugugguucugacuucguuuuccaggcucgcgugcucggacaucaucaccaagcgcaagagacccgcuaugaaguaaggauacagcugguguacaaaaaucguagccccuuaagagcaagggaauaugucugggcuccgggccacugucccuguccaaugcucgccccucaccgggacuacuugauggcugugcaacgacucgucucucccgacggaacacaagaucaguuacugcucccucaugcagguuacgcucguccguggagcccagcugaagacucccgcauucggcugaccgcgcgcagaugcccuggguag

SEQ ID NO: 276199 - RNA, 1446 nt, Artificial Sequence
  derived and/or modified sequence
augggaaaacuccguccuggcagaguggagugguuagccucaggacauaccgagagaccucaccucuuccagaauuuguuacuuuuccuuugggcauuacucaacuguggacuaggcgucuccgcacagggcccuggagaguggaccccauggguaaguuggacacggugcagcagcuccuguggaagggguguuagugugcgaucaagacgcugcuugcggcucccuggugaggaaccauguuggggagacucccaugaguacaggcugugccaacugccggauuguccucccggagcugugcccuuccgagaucuucagugcgcccuguacaacggaagaccaguucucggaacgcaaaaaacuuaucaguggguaccuuuccacggcgccccuaaccagugugaucucaacugcuuagccgagggucaugccuucuaccacucauuuggcagagugcuugacggcaccgcauguucaccaggcgcucagggcgugugcguagccggaagaugccuuucugcagguugcgacggcuugcuugggucaggagcccuugaagaccguugcgguaggugcggcggugcaaaugauagcuguuuguuuguucaacggguauuucgagaugcaggggcuuucgcuggauacuggaaugugacccucaucccagagggagccagacacauuagagucgaacacaggucaagaaaucaccuggcucucauggguggagacgggcguuaugugcugaauggccacugggugguuagucccccaggcacauacgaagccgcaggcacucauguuguguacacaagagauacaggcccccaggagacucuucaagcugccggcccuacgagccacgaccuucuccugcaaguacugcuccaggaacccaacccugggaucgaguuugaauucugguugccucgggaaagguauucacccuuccaagcuagaguccaggcuuugggauggccauuaaggcaaccucagccccguggcguggagccccagccuccugcagcaccagccgugacgcccgcccaaacuccaacacuggcacccgaucccugcccccccugcccagauacacggggucgcgcccacagacuccuccacuauugcggcucagacuucguuuuucaagcucgcgugcucggacaucaccaccaggcacaggaaacucguuaugaaguuagaauccagcuugucuacaagaauagguccccacuucgcgcgagggaguacgugugggcucccggccauugccccugcccuaugcuggcaccucacagagacuaccuaauggcuguucagagguuagugucacccgauggaacacaggaucagcuguugcuuccacacgcuggcuaugcucgaccguggagcccugccgaggacucucguauccgacucacagccagaagaugcccuggauag

SEQ ID NO: 276200 - protein, 294 aa, Artificial Sequence
  derived and/or modified sequence
MAVLSAPGLRGFRILGLRSSVGPAVQARGVHQSVATDGPSSTQPALPKARAVAPKPSSRGEYVVAKLDDLVNWARRVSTMSCRPSSSARASLHTHRHTHTHTNVQTRTHTTHACTLTCAHVHASSHVWTDVYTDHTHTHAHNAHMHTRTHAHLHTHAHTSTCAHTLAHIHTCTLALMHTHAHIYTCTRTLAHTCTYMHSHAHTCTLTHMHTRPCVDTCMCACWHACTQAHSLMHTHPCGRGAGRTLPEAPVLAWWPVVPSEDSDPAGDDPSVSVILFLASVCSSCFSFKVKAVF

SEQ ID NO: 276201 - DNA, 417 bp, Artificial Sequence
  derived and/or modified sequence
atggagcggttcctgaacagcaaggcccggcggctgggcagctgctctcaccctgccttttacttactttgcgttcccgacgaagacacatcttgcagtaccatctacttgccccttaaaaggagggccgatccagatcagttgttcagcgatctattgggcggaactcagcggctttggagcaaccgcttcggtaatgaagagtctttcccgggccgggtaagggccctggtggataccttttgctggatagctcgggctcctcctctgggtaatccgctccgattggaggaaagaattgcctggcgcatccagcggctaaaaagcggtcagacagctctcatcgaaaaaaagaaacagaaaatcgaagaggatgtcaggcaccagtgccagcaaaccacatgcgaccgctgctag

SEQ ID NO: 276202 - DNA, 885 bp, Artificial Sequence
  derived and/or modified sequence
atggctgtgttaagcgcccctggcctgcgtggtttcagaatacttgggctgagatccagtgtgggcccggccgtgcaggcacggggggtgcatcagagtgttgcaacagatggtccctcaagcacgcagcccgccctccccaaagcacgtgccgtggcaccaaaacctagttctcggggtgagtatgtcgtggctaagctcgatgaccttgttaactgggccaggagggtgagtaccatgtcatgccggccgagtagctcagcccgggcctcccttcatacacacagacatactcacactcacaccaacgttcagacacgaacgcacaccacgcacgcttgtactctgacttgtgctcatgtgcatgcaagttcccacgtttggactgacgtgtacacagatcatacccatacacacgctcataatgctcacatgcacactcggacccacgctcacctgcatacacacgctcataccagcacgtgtgctcacactctggctcacatccatacatgcacgctggctcttatgcacactcacgcacacatctacacttgtaccagaacattagcccatacctgcacttacatgcactcacacgcccacacttgcactctcactcatatgcatacaaggccctgcgttgacacctgtatgtgtgcatgctggcacgcttgtacccaggcccattccctgatgcacactcacccatgtgggagaggggctggccgtactctgcctgaggctcccgttttagcctggtggcccgtggtgcctagtgaggactcagaccccgccggggacgatccgtccgtgagcgtgattctgttcttggcgtctgtgtgtagcagttgttttagctttaaggttaaagccgtcttctag

SEQ ID NO: 276203 - DNA, 885 bp, Artificial Sequence
  derived and/or modified sequence
atggctgtgctgagcgcccctggcctgcggggcttccgcatcctgggcctgcggagctctgtgggccctgctgtgcaggcccggggcgtgcaccagagcgtggccacagatggccccagcagcacccagcctgccctgcccaaggcccgggctgtggcccccaagcccagcagcagaggagaatatgtggtggccaagctggatgacctggtgaactgggccaggagagtgtccaccatgagctgccggcccagcagcagcgcccgggccagcctgcacacccaccgccacacccacacccacaccaacgtgcagaccaggacccacaccacccacgcctgcaccctgacctgtgcccacgtgcacgccagcagccacgtgtggacagatgtgtacacagaccacacccacacccacgcccacaatgcccacatgcacaccaggacccacgcccacctgcacacccacgcccacaccagcacctgtgcccacaccctggcccacatccacacctgcaccctggccctgatgcacacccacgcccacatctacacctgcaccaggaccctggcccacacctgcacctacatgcacagccacgcccacacctgcaccctgacccacatgcacacccggccctgtgtggacacctgcatgtgtgcctgctggcacgcctgcacccaggcccacagcctgatgcacacccacccctgtggccgcggggccggccgcaccctgcctgaggcccctgtgctggcctggtggcctgtggtgcccagtgaagattctgaccctgctggagatgaccccagcgtgtctgtcatcctcttcctggcctctgtgtgcagcagctgcttctccttcaaggtgaaggctgtgttctag

SEQ ID NO: 276204 - DNA, 885 bp, Artificial Sequence
  derived and/or modified sequence
atggccgtgctgagcgcccccggcctgcggggcttccggatcctgggacttaggtccagcgtcgggccagccgtacaagcgaggggcgtccatcagagcgtggccaccgacggtccctctagcactcagcctgcgttgcctaaggctagggccgtggcccccaagccttcttcccgcggagagtatgtggtggccaagttggacgatttggtgaactgggcacgacgggtatcaacgatgagctgccgtccatcgtccagcgcgagggcgtctctgcatacccaccgccacacacacactcatacgaatgttcagacacgaacacacacaacccatgcctgcaccctcacttgcgctcatgtgcacgcaagctctcatgtgtggactgacgtttacacggaccacacccacactcatgctcacaacgcacacatgcataccagaactcacgctcacctacatactcatgcccacacatctacttgcgcacacactctcgcgcacatccacacgtgcaccctggcacttatgcacactcacgcacatatatatacatgcacccgcactttggctcatacttgtacatacatgcacagtcatgctcatacatgtacgctcacccatatgcacacccgcccctgtgtggacacttgtatgtgtgcgtgctggcatgcgtgcactcaagcacactccctcatgcatactcacccttgcggcaggggcgctggcagaaccttgcctgaagcacccgttctggcatggtggcctgttgtaccatccgaagactcagatccagctggggacgatccctctgttagtgtaatcttatttctggcctctgtgtgcagcagttgcttttcattcaaagtaaaggcagtcttctag

SEQ ID NO: 276205 - DNA, 885 bp, Artificial Sequence
  derived and/or modified sequence
atggccgttttgagtgccccaggcctcagaggctttcggatccttgggctccgctcaagtgtgggaccggcagtacaggccaggggagtccaccagtctgtggcgactgatggtccatcatcaactcaacctgccctgcctaaggcccgagctgttgcacctaagccttcatctaggggcgagtacgttgtcgcaaagctggacgacctggtgaattgggcaagaagagtgtcgacgatgtcctgtcgaccgtccagttctgccagggcctcgcttcacacccacaggcatactcatacacatactaacgtccagacacggacccatactacacatgcctgtaccctgacatgtgcacacgtacacgcctcttcccacgtctggactgacgtatacaccgaccacacacacacacacgctcataatgcccacatgcataccaggactcacgcacatctgcatacacacgcacatactagcacttgcgctcatacgctcgcacatattcatacctgcacactcgctctgatgcacacccatgcccacatttacacctgcactagaacactcgctcatacgtgtacctacatgcactcgcacgctcatacctgcaccctgacacacatgcacaccaggccatgcgttgatacgtgcatgtgtgcgtgctggcacgcttgtacacaggcccattccctcatgcacacacatccatgcggaaggggcgcagggaggacgctgccagaagcaccagtgctggcctggtggccagttgtgccttcagaggattcagatccagctggcgacgatcctagtgtaagcgtgatcctgttcttggcttcagtgtgcagctcatgtttctcatttaaggtgaaagcggtgttctag

SEQ ID NO: 276206 - DNA, 885 bp, Artificial Sequence
  derived and/or modified sequence
atggccgtgctgagcgcccccggcctgagaggcttcagaatcctgggcctgagaagcagcgtgggccccgccgtgcaggccagaggcgtgcaccagagcgtggccaccgacggccccagcagcacccagcccgccctgcccaaggccagagccgtggcccccaagcccagcagcagaggcgagtacgtggtggccaagctggacgacctggtgaactgggccagaagagtgagcaccatgagctgcagacccagcagcagcgccagagccagcctgcacacccacagacacacccacacccacaccaacgtgcagaccagaacccacaccacccacgcctgcaccctgacctgcgcccacgtgcacgccagcagccacgtgtggaccgacgtgtacaccgaccacacccacacccacgcccacaacgcccacatgcacaccagaacccacgcccacctgcacacccacgcccacaccagcacctgcgcccacaccctggcccacatccacacctgcaccctggccctgatgcacacccacgcccacatctacacctgcaccagaaccctggcccacacctgcacctacatgcacagccacgcccacacctgcaccctgacccacatgcacaccagaccctgcgtggacacctgcatgtgcgcctgctggcacgcctgcacccaggcccacagcctgatgcacacccacccctgcggcagaggcgccggcagaaccctgcccgaggcccccgtgctggcctggtggcccgtggtgcccagcgaggacagcgaccccgccggcgacgaccccagcgtgagcgtgatcctgttcctggccagcgtgtgcagcagctgcttcagcttcaaggtgaaggccgtgttctag

SEQ ID NO: 276207 - protein, 423 aa, Artificial Sequence
  derived and/or modified sequence
MYSSPLCLTQDEFHPFIEALLPHVRAFAYTWFNLQARKRKYFKKHEKRMSKDEERAVKDELLGEKPEVKQKWASRLLAKLRKDIRPECREDFVLSITGKKAPGCVLSNPDQKGKMRRIDCLRQADKVWRLDLVMVILFKGIPLESTDGERLVKAAQCGHPVLCVQPHHIGVAVKELDLYLAYFVRERDAEQSGSPRTGMGSDQEDSKPITLDTTDFQESFVTSGVFSVTELIQVSRTPVVTGTGPNFSLGELQGHLAYDLNPASTGLRRTLPSTSSSGSKRHKSGSMEEDVDTSPGGDYYTSPSSPTSSSRNWTEDMEGGISSPVKKTEMDKSPFNSPSPQDSPRLSSFTQHHRPVIAVHSGIARSPHPSSALHFPTTSILPQTASTYFPHTAIRYPPHLNPQDPLKDLVSLACDPASQQPGP

SEQ ID NO: 276208 - protein, 283 aa, Artificial Sequence
  derived and/or modified sequence
MEERGLAPKFDTTFESARPTQTHMALVQLERVGLLRFLVSQNVDGLHVRSGFPRDKLAELHGNMFVEECAKCKTQYVRDTVVGTMGLKATGRLCTVAKARGLRACRGELRDTILDWEDSLPDRDLALADEASRNADLSITLGTSLQIRPSGNLPLATKRRGGRLVIVNLQPTKHDRHADLRIHGYVDEVMTRLMKHLGLEIPAWDGPRVLERALPPLPRPPTPKLEPKEESPTRINGSIPAGPKQEPCAQHNGSEPASPKRERPTSPAPHRPPKRVKAKAVPS

SEQ ID NO: 276209 - DNA, 849 bp, Artificial Sequence
  derived and/or modified sequence
atggaggagcgcggcctggcccccaagttcgacaccaccttcgagagcgcccgccccacccagacccacatggccctggtgcagctggagcgcgtgggcctgctgcgcttcctggtgagccagaacgtggacggcctgcacgtgcgcagcggcttcccccgcgacaagctggccgagctgcacggcaacatgttcgtggaggagtgcgccaagtgcaagacccagtacgtgcgcgacaccgtggtgggcaccatgggcctgaaggccaccggccgcctgtgcaccgtggccaaggcccgcggcctgcgcgcctgccgcggcgagctgcgcgacaccatcctggactgggaggacagcctgcccgaccgcgacctggccctggccgacgaggccagccgcaacgccgacctgagcatcaccctgggcaccagcctgcagatccgccccagcggcaacctgcccctggccaccaagcgccgcggcggccgcctggtgatcgtgaacctgcagcccaccaagcacgaccgccacgccgacctgcgcatccacggctacgtggacgaggtgatgacccgcctgatgaagcacctgggcctggagatccccgcctgggacggcccccgcgtgctggagcgcgccctgccccccctgccccgcccccccacccccaagctggagcccaaggaggagagccccacccgcatcaacggcagcatccccgccggccccaagcaggagccctgcgcccagcacaacggcagcgagcccgccagccccaagcgcgagcgccccaccagccccgccccccaccgcccccccaagcgcgtgaaggccaaggccgtgcccagc

SEQ ID NO: 276210 - DNA, 852 bp, Artificial Sequence
  derived and/or modified sequence
atggaggagagaggcctggcccccaagttcgacaccaccttcgagagcgccagacccacccagacccacatggccctggtgcagctggagagagtgggcctgctgagattcctggtgagccagaacgtggacggcctgcacgtgagaagcggcttccccagagacaagctggccgagctgcacggcaacatgttcgtggaggagtgcgccaagtgcaagacccagtacgtgagagacaccgtggtgggcaccatgggcctgaaggccaccggcagactgtgcaccgtggccaaggccagaggcctgagagcctgcagaggcgagctgagagacaccatcctggactgggaggacagcctgcccgacagagacctggccctggccgacgaggccagcagaaacgccgacctgagcatcaccctgggcaccagcctgcagatcagacccagcggcaacctgcccctggccaccaagagaagaggcggcagactggtgatcgtgaacctgcagcccaccaagcacgacagacacgccgacctgagaatccacggctacgtggacgaggtgatgaccagactgatgaagcacctgggcctggagatccccgcctgggacggccccagagtgctggagagagccctgccccccctgcccagaccccccacccccaagctggagcccaaggaggagagccccaccagaatcaacggcagcatccccgccggccccaagcaggagccctgcgcccagcacaacggcagcgagcccgccagccccaagagagagagacccaccagccccgccccccacagaccccccaagagagtgaaggccaaggccgtgcccagctag

SEQ ID NO: 276211 - DNA, 852 bp, Artificial Sequence
  derived and/or modified sequence
atggaagaaagaggcctggcccctaagttcgacaccacattcgaaagcgcccgcccaacacaaacccatatggcactcgtccagctcgaaagggtagggctcttgcgattcctcgtctctcagaacgtagacgggctacatgtgcgaagtggattccctagagataagctggccgaactccacggaaatatgttcgtcgaagagtgtgccaaatgcaagacgcagtacgtcagggacacagtagtgggaacgatggggctgaaggccactggaaggctctgtaccgttgcgaaggccaggggcctgagagcatgtcgaggagagctgagggatactattctggattgggaggacagcttgcctgaccgcgatctcgccctggcagacgaagcaagccgtaatgccgacctgtccatcacactggggacctctctgcaaatcagacccagcgggaatctccccctggccaccaagcgacgcggggggagactggtcattgtgaatcttcagcctactaaacatgatagacacgccgatctgcgcattcatggatatgtggatgaagtgatgactcgcctgatgaagcatctaggcctcgagattcccgcgtgggacggtccccgggtcttggaaagagcactgccccctctgcctcggccacctacccctaagctggagccaaaagaagaatctcccactagaatcaacgggagcatccctgccggacctaaacaagagccatgcgcacagcacaatggctctgagcccgcttccccaaaaagggagaggcccacttcacccgctccacaccgtcctccaaagagggtgaaagctaaggcggtgcctagctag

SEQ ID NO: 276212 - DNA, 852 bp, Artificial Sequence
  derived and/or modified sequence
atggaggagcggggcctggcccccaagtttgacaccacctttgagagcgcccggcccacccagacccacatggccctggtgcagctggagcgggtgggcctgctgcgcttcctggtgtcccagaatgtggatggcctgcacgtgcgcagcggcttcccccgggacaagctggccgagctgcacggcaacatgtttgtggaggagtgtgccaagtgcaagacccagtatgtgcgggacacagtggtgggcaccatgggcctgaaggccaccggccgcctgtgcaccgtggccaaggcccggggcctgcgggcctgccgcggggagctgcgggacaccatcctggactgggaggacagcctgcctgaccgggacctggccctggctgatgaggccagcagaaatgctgacctgagcatcaccctgggcaccagcctgcagatccggcccagcggcaacctgcccctggccaccaagagaagaggaggccgcctggtgattgtgaacctgcagcccaccaagcatgacagacatgctgacctgcgcatccacggctacgtggatgaggtgatgacccggctgatgaagcacctgggcctggagatcccagcctgggatggcccccgggtgctggagcgggccctgccccccctgccccggccccccacccccaagctggagcccaaggaggagagccccacccgcatcaatggcagcatcccagctggccccaagcaggagccctgtgcccagcacaacggcagcgagcccgccagccccaagcgggagcggcccaccagccctgccccccaccggccccccaagagggtgaaggccaaggctgtgcccagctag

SEQ ID NO: 276213 - DNA, 852 bp, Artificial Sequence
  derived and/or modified sequence
atggaggagcggggcctggcccccaagttcgacaccaccttcgagtctgccagaccaacacagactcacatggctctcgtccaactggagcgcgtgggacttcttcgattcctggtgagccaaaatgttgacgggctgcacgtgcggtcgggatttccgcgagataaacttgctgaacttcatggcaatatgtttgttgaggaatgcgctaagtgcaaaacccaatacgtgcgcgacactgtggtgggtacgatggggcttaaggccaccggcaggctttgcacggtggcaaaagcaaggggattgcgagcatgcagaggcgagcttagagataccattctggactgggaagattccttgccagatagagacctggctcttgcagacgaggctagccgcaacgctgatttatctatcactctcgggacctctctacagatacggccttccggcaacctccccctggcgacaaaacgccgggggggtagacttgtgattgtcaatctgcagcctaccaagcacgaccgacatgctgatctcaggatccacgggtacgtggatgaagtaatgacacgcttgatgaagcacctaggactggagatacctgcctgggatggacctcgggtgctcgaacgcgctctcccccctcttccgagaccacctactcctaagctagaaccaaaagaggaaagtcccactcgaatcaacggaagcatccctgccggtcctaagcaggagccatgtgcccagcacaacggatctgagccagcatcccctaagcgagaaagaccaaccagcccagccccacatagacctccaaaaagggtgaaggctaaggccgtgccttcttag

SEQ ID NO: 276214 - DNA, 852 bp, Artificial Sequence
  derived and/or modified sequence
atggaagaaagagggctggcccctaaatttgacactacgtttgagtctgcgaggcctacacaaacccacatggcactcgtacaattagaaagggtgggcttactgcggttcctggtctcccagaacgtggatgggctccacgtgaggtccggctttccacgcgataaacttgctgagctgcatggcaatatgtttgtcgaggaatgcgccaagtgtaagacacagtacgtaagagataccgtcgtgggaaccatgggcctcaaagccaccggaagactctgcaccgtcgccaaagcccgtggattgagggcatgtcggggtgagctcagggataccatcctggactgggaagacagcctccctgacagggatctagccctggctgacgaggcaagcagaaatgcggacttgagcatcacgctcggaacctccctccaaatcagaccctcgggcaacctgcccctggcgactaaacgcagaggcggaagattggtaattgtgaatcttcagcccacaaagcacgataggcacgcagatcttagaattcacgggtacgtggacgaggtcatgacaagacttatgaagcatctcggcctcgagatcccggcatgggacgggcctagggtactggagcgggctttgcctcctctgcccaggccgccaacccctaagttagaacctaaagaagaatcacctacaagaattaacggaagcattccagctggcccaaagcaggagccatgtgcccagcacaacgggtctgagcccgcaagccctaaaagggagagacctactagccccgctcctcacaggccacccaagcgcgtcaaggccaaggccgtgccctcttag

SEQ ID NO: 276215 - DNA, 852 bp, Artificial Sequence
  derived and/or modified sequence
atggaggagagaggactggcacccaagtttgataccactttcgagtccgcaagaccaacacagactcacatggccctggtgcaactggaacgggtgggcctgctccgattcttggtgtcacagaacgtggacggcctccatgtccggtctggatttccgagggacaagttagccgagctgcatggaaatatgttcgtggaggaatgcgctaagtgtaaaacacaatatgttagggacaccgttgttggaactatgggcctgaaggcaaccgggagattgtgcactgtggcaaaagcccgaggcctcagagcttgtaggggggaactgagggataccatccttgactgggaagactcactccccgatcgcgaccttgcccttgccgatgaggcgtctcggaacgccgacctctcgatcaccttgggtacctccctccagattcgtccgagcggcaatttacccttagccactaagaggagaggaggccgactggtgattgtaaatcttcagccaactaagcacgacaggcatgccgatttaagaatacacggatatgtcgatgaagtgatgacgcgcctgatgaaacacttgggacttgagatccctgcatgggatggaccccgcgtactcgagcgggccttacccccacttccgaggccccccacccctaagttagagcctaaagaggaaagccctaccagaattaacggatccatacccgccggaccgaaacaagagccatgcgcccagcacaacggaagtgagcctgctagccccaaacgggagcggccaacaagtccagcccctcatagaccaccgaagcgggttaaagccaaggcagtccctagttag

SEQ ID NO: 276216 - DNA, 852 bp, Artificial Sequence
  derived and/or modified sequence
atggaagagagagggctcgcccctaaatttgatacaacatttgagagcgcaagaccgacccagacacacatggcgctggttcaactggaacgggtgggtttattgaggtttctggtgtctcagaacgtcgatgggctccacgtgagatctggcttccccagagacaaattggctgaactccacggaaatatgttcgtcgaggaatgcgccaaatgcaaaacacagtacgtacgggacacagtggtcggcactatggggctgaaggctaccgggcgcctctgtacagtcgccaaggcaaggggcctcagagcttgtaggggggaactgagggataccatccttgactgggaagactcactccccgatcgcgaccttgcccttgccgatgaggcgtctcggaacgccgacctctcgatcaccttgggtacctccctccagattcgtccgagcggcaatttacccttagccactaagaggagaggaggccgactggtgattgtaaatcttcagccaactaagcacgacaggcatgccgatttaagaatacacggatatgtcgatgaagtgatgacgcgcctgatgaaacacttgggacttgagatccccgcttgggatggacctagggttttagaaagagcgctacccccactccctagaccccccactcctaaattggagcctaaggaggagtcaccaacgaggattaacggaagtattccagcaggccccaagcaggagccctgtgcacagcataatggttcagagcccgcgtcccccaaacgagagaggcctacatcccccgccccacatcgcccgccaaagagagtcaaagccaaggccgtgcccagctag

SEQ ID NO: 276217 - RNA, 852 nt, Artificial Sequence
  derived and/or modified sequence
auggaggagagaggacuggcacccaaguuugauaccacuuucgaguccgcaagaccaacacagacucacauggcccuggugcaacuggaacgggugggccugcuccgauucuuggugucacagaacguggacggccuccauguccggucuggauuuccgagggacaaguuagccgagcugcauggaaauauguucguggaggaaugcgcuaaguguaaaacacaauauguuagggacaccguuguuggaacuaugggccugaaggcaaccgggagauugugcacuguggcaaaagcccgaggccucagagcuuguaggggggaacugagggauaccauccuugacugggaagacucacuccccgaucgcgaccuugcccuugccgaugaggcgucucggaacgccgaccucucgaucaccuuggguaccucccuccagauucguccgagcggcaauuuacccuuagccacuaagaggagaggaggccgacuggugauuguaaaucuucagccaacuaagcacgacaggcaugccgauuuaagaauacacggauaugucgaugaagugaugacgcgccugaugaaacacuugggacuugagaucccugcaugggauggaccccgcguacucgagcgggccuuacccccacuuccgaggccccccaccccuaaguuagagccuaaagaggaaagcccuaccagaauuaacggauccauacccgccggaccgaaacaagagccaugcgcccagcacaacggaagugagccugcuagccccaaacgggagcggccaacaaguccagccccucauagaccaccgaagcggguuaaagccaaggcagucccuaguuag

SEQ ID NO: 276218 - RNA, 852 nt, Artificial Sequence
  derived and/or modified sequence
auggaagagagagggcucgccccuaaauuugauacaacauuugagagcgcaagaccgacccagacacacauggcgcugguucaacuggaacggguggguuuauugagguuucuggugucucagaacgucgaugggcuccacgugagaucuggcuuccccagagacaaauuggcugaacuccacggaaauauguucgucgaggaaugcgccaaaugcaaaacacaguacguacgggacacaguggucggcacuauggggcugaaggcuaccgggcgccucuguacagucgccaaggcaaggggccucagagcuuguaggggggaacugagggauaccauccuugacugggaagacucacuccccgaucgcgaccuugcccuugccgaugaggcgucucggaacgccgaccucucgaucaccuuggguaccucccuccagauucguccgagcggcaauuuacccuuagccacuaagaggagaggaggccgacuggugauuguaaaucuucagccaacuaagcacgacaggcaugccgauuuaagaauacacggauaugucgaugaagugaugacgcgccugaugaaacacuugggacuugagauccccgcuugggauggaccuaggguuuuagaaagagcgcuacccccacucccuagaccccccacuccuaaauuggagccuaaggaggagucaccaacgaggauuaacggaaguauuccagcaggccccaagcaggagcccugugcacagcauaaugguucagagcccgcgucccccaaacgagagaggccuacaucccccgccccacaucgcccgccaaagagagucaaagccaaggccgugcccagcuag

SEQ ID NO: 276219 - DNA, 69 bp, Artificial Sequence
  derived and/or modified sequence
atgaaaaaaaacattgcgtttctgctggcgagcatgtttgtgtttagcattgcgaccaacgcgtatgcg

SEQ ID NO: 276220 - DNA, 3800 bp, Artificial Sequence
  derived and/or modified sequence
ggcgcgggcgcatgcgcaggcgcgggccggtggggtggcctggagcggcgtgcgtaatgtcggcactttgctggggccgcggagcggcggggctcaaacgagccctacggccttgcggccgcccgggactccccggcaaagaagggaccgccggtggcgtctgcggccccaggaggagctcgtccgccagcccccaggagcaagaccaagaccgcaggaaggactggggccacgtggagctgctggaggtgctccaggcgcgggtgcggcagctgcaggctgagagcgtgtcggaggtggtggtgaacagggtggatgtggcgcggctcccagaatgtggcagtggagatggtagcctccagccacccaggaaggtccagatgggggccaaggatgccaccccggtgccctgtggccgctgggcaaagatactggagaaggataagcggacccagcagatgcgtatgcagcggttgaaggcgaagctgcagatgccattccagagcggggagttcaaggcgctgaccaggcgcctgcaggtggagccccggctcctgagcaagcagatggccgggtgcctggaggactgcacgcgccaggcccccgagagcccctgggaggagcagctggcccggctgctgcaggaggcccctgggaagctgagcctcgatgtggagcaggccccgtcggggcagcactcgcaggcccagctctcaggtcagcagcagaggctcctggccttcttcaagtgctgcctgctcactgaccagctgcccctcgcccaccacctgctggtcgtccaccacggccagcggcagaagcggaagctgctcacgctggacatgtacaacgccgtgatgcttggctgggcgcggcagggtgccttcaaggagctggtatatgtgttattcatggtgaaggatgccggcttgactccggacctgctgtcctatgcggctgccctccagtgcatggggaggcaggaccaggacgccgggaccatcgaaaggtgtctggaacagatgagccaggaggggctgaagctgcaggcactcttcaccgccgttctgctgtctgaggaggatcgggccactgttctgaaggccgtgcacaaggtgaagcccaccttcagcctcccgccgcagctgccgcccccggtcaacacctccaagctgctcagggacgtgtatgccaaggatgggcgtgtgtcctacccgaagctgcacctgcccttgaagaccctgcagtgcctctttgagaagcagctccacatggagctggccagcagggtgtgcgtggtgtccgtggagaagcccacgttgccaagcaaggaggtcaagcacgcgcggaagaccctgaagaccctgcgggaccaatgggagaaagcactgtgccgggcgctgcgggagaccaagaaccgcctagagcgcgaggtgtacgagggccggttctcactttaccccttcctgtgcctgctggacgagcgcgaggtggtgcggatgctcctgcaggtcctgcaggcgctgcccgcccaaggtgagtccttcaccaccctggcccgggagctgagtgcgcgcactttcagccggcacgtggtgcagaggcagcgggtcagtggccaggtgcaggcgctgcagaaccactacaggaagtacctctgcttgctggcctccgacgccgaggtgcccgagccctgcctgccgcggcagtactgggaggagctgggggcgcccgaggccctgcgggagcagccctggcccctgccagtgcagatggagctgggcaagctgctggcggagatgctggtgcaggctacgcagatgccatgcagcctggacaagccgcatcgttcctctcggcttgtccccgtgctctaccacgtgtattccttccgcaacgtccagcagatcggcatcctgaagccgcacccggcctacgtgcagctgctggagaaggccgcggagcccacgctgaccttcgaggcggtggatgtacccatgctttgccccccgctgccctggacatcgccgcactctggtgctttcctgctcagccccaccaagctgatgcgcacggtggaaggcgccacgcagcaccaggagctgctggaaacctgcccgcccaccgcgctgcatggcgcactggacgccctcacccaactgggcaactgcgcctggcgcgtcaacgggcgcgtgctggacctggtgctgcagctcttccaggccaagggctgcccccagctaggcgtgccggccccgccctccgaggcgccccagccgcccgaggcccacctgccgcacagcgccgcgcccgcccgcaaggccgagctgcgccgtgagctggcgcactgccagaaggtggcccgggagatgcacagcctgcgggcggaggcgctgtaccgcctctcgctggcgcagcacctgcgggaccgcgtcttctggctgccgcacaacatggacttccgcggccgcacctacccctgcccgccgcacttcaaccacctgggcagcgacgtggcgcgggccctgctggagttcgcccagggccgcccgctcggcccgcacggcctggattggctcaagatccacctggtcaatctcacggggttgaagaagcgggagccgctgcggaagcgcctggcctttgcggaggaggtgatggatgacatcctggactccgcggaccaacccttgacgggccgaaagtggtggatgggcgcggaggaaccctggcagacgctggcctgctgtatggaggtggcgaacgctgtgcgcgcctccgaccctgccgcctatgtctcccacctccccgtccatcaggacggctcttgcaacggcctgcagcattatgctgctctgggccgcgacagcgtgggcgccgcctccgtcaacctggagccctcggatgtgccgcaggacgtgtacagcggcgtggccgcgcaggtggaggtgttccgtaggcaggacgcccagcggggcatgcgggtggcacaggtgctggaaggtttcatcacccgcaaggtggtgaagcagacggtgatgacggtggtgtacggggtcacgcgctatggcgggcgcctgcagattgagaagcgcctccgggagctgagcgactttccccaggagttcgtgtgggaggcctctcactatctcgtacgccaggtcttcaagagtctacaggagatgttctcggggacccgggccatccagcactggctgaccgagagtgcccgcctcatctcccacatgggctctgtggtggagtgggtcacacccctgggcgtccccgtcatccagccctatcgcctggactccaaggtcaagcaaataggaggtggaattcagagcatcacctacacccacaacggagacatcagccgaaagcccaacacacgtaagcagaagaacggcttcccgcccaacttcatccactcgctggactcctcccacatgatgctcaccgccctgcactgctacaggaagggcctgaccttcgtctctgtgcacgactgttactggactcacgcagctgatgtctccgtcatgaaccaggtgtgccgggagcagtttgtccgcttgcacagcgagcccatcctgcaggacctgtccagattcctggtcaagcggttctgctctgagccccagaagatcttggaggccagccagctgaaggagacactgcaggcggtgcccaagccaggggccttcgacctggagcaggtgaagcgttccacctacttcttcagctgacaccccgtgagccttgtcagtgtgtaaataaagctcttttgccacccccag

SEQ ID NO: 276221 - protein, 197 aa, Artificial Sequence
  derived and/or modified sequence
MDGIVPDIAVGTKRVTPQSLFILFGVYGDVQRVKILFNKKENALVQMADGNQAQLAMSHLNGHKLHGKPIRITLSKHQNVQLPREGQEDQGLTKDYGNSPLHRFKKPGSKNFQNIFPPSATLHLSNIPPSVSEEDLKVLFSSNGGVVKGFKFFQKDRKMALIQMGSVEEAVQALIDLHNHDLGENHHLRVSFSKSTI

SEQ ID NO: 276222 - protein, 269 aa, Artificial Sequence
  derived and/or modified sequence
MAAALFVLLGFALLGTHGASGAAGTVFTTVEDLGSKILLTCSLNDSATEVTGHRWLKGGVVLKEDALPGQKTEFKVDSDDQWGEYSCVFLPEPMGTANIQLHGPPRVKAVKSSEHINEGETAMLVCKSESVPPVTDWAWYKITDSEDKALMNGSESRFFVSSSQGRSELHIENLNMEADPGQYRCNGTSSKGSDQAIITLRVRSHLAALWPFLGIVAEVLVLVTIIFIYEKRRKPEDVLDDDDAGSAPLKSSGQHQNDKGKNVRQRNSS

SEQ ID NO: 276223 - protein, 176 aa, Artificial Sequence
  derived and/or modified sequence
MGTANIQLHGPPRVKAVKSSEHINEGETAMLVCKSESVPPVTDWAWYKITDSEDKALMNGSESRFFVSSSQGRSELHIENLNMEADPGQYRCNGTSSKGSDQAIITLRVRSHLAALWPFLGIVAEVLVLVTIIFIYEKRRKPEDVLDDDDAGSAPLKSSGQHQNDKGKNVRQRNSS

SEQ ID NO: 276224 - DNA, 810 bp, Artificial Sequence
  derived and/or modified sequence
atggccgccgccctgttcgtgctcctgggctttgctttgctcgggacgcacggcgcttctggcgcagccggcactgtgttcaccacagtagaagaccttggctctaaaattctgctcacgtgttccctaaatgacagtgccaccgaagtaaccggtcaccggtggctgaagggcggtgtggtactaaaagaagacgcgttaccgggtcagaagacggagttcaaagtcgactccgacgaccagtggggagagtatagctgcgtttttctgcccgaacccatgggaaccgcaaacatccagttgcatggcccgccccgcgtcaaggcagtgaaaagctcagagcacattaatgagggagaaaccgccatgctcgtgtgtaaatccgagtctgtgccccctgtaactgattgggcatggtataaaattaccgacagcgaggataaggcccttatgaacggaagcgagagtaggtttttcgtttcctcaagccaaggaagatcagagctccacatcgagaacctcaacatggaagcagatcctggccagtacaggtgtaatgggacatcatccaagggtagcgatcaagccattataaccctgcgggttcggtcccatctggccgctctttggcctttcctgggaattgtggctgaggttttggttctcgtaaccatcatcttcatctacgagaaacgcagaaagcctgaagacgttctggacgacgatgatgcaggatctgctcccctgaaaagttctggccaacaccagaacgataaaggtaagaacgttagacagcggaatagcagttag

SEQ ID NO: 276225 - DNA, 810 bp, Artificial Sequence
  derived and/or modified sequence
atggctgctgccctgtttgtgctgctgggctttgccctgctgggcacccatggagccagcggggctgctggcaccgtcttcaccaccgtggaggacctgggcagcaagatcctgctgacctgcagcctgaatgacagcgccacagaggtgacaggccaccgctggctgaagggcggcgtggtgctgaaggaggatgccctgcccggccagaagacagagttcaaggtggacagtgatgaccagtggggcgagtacagctgtgtgttcctgcctgagcccatgggcacagccaacatccagctgcacggccccccccgggtgaaggctgtgaagagcagcgagcacatcaatgaaggagaaacagccatgctggtgtgcaagtctgagagcgtgccccctgtgacagactgggcctggtacaagatcacagattctgaggacaaggccctgatgaatggcagcgagagccgcttctttgtgagcagcagccagggccgctctgagctgcacatcgagaacctgaacatggaggccgaccccggccagtaccgctgcaatggcaccagcagcaaaggaagtgaccaggccatcatcaccctgcgggtgcgcagccacctggccgccctgtggcccttcctgggcatcgtggccgaggtgctggtgctggtgaccatcatcttcatctatgagaagaggaggaagccagaagatgtgctggatgatgatgatgctggcagcgcccccctgaagagcagcggccagcaccagaatgacaagggcaagaatgtgcggcagaggaacagcagctag

SEQ ID NO: 276226 - DNA, 810 bp, Artificial Sequence
  derived and/or modified sequence
atggccgccgccctgttcgtgctgctgggcttcgccctgctgggcacacatggggccagcggggcggccgggactgtctttactacagttgaggacctggggtcaaaaatactcctcacatgctcccttaacgatagcgcaactgaggtgacagggcatagatggctcaaaggcggagtcgtcctgaaggaagacgcactgcctggacagaagacggagttcaaagttgattccgatgaccagtggggggaatactcttgcgtgttcctaccagaaccgatgggcactgctaatatccagctccacggtccaccccgcgtcaaggccgtgaagtcttcagaacacatcaatgaaggagagacagctatgctagtgtgcaagtccgagtctgtgccgccagtgactgattgggcctggtataaaattactgattcagaggacaaggcgctaatgaacggctcagaaagccgcttctttgtctcttcatcgcagggtaggagtgagctgcatatagaaaatctgaacatggaggctgatcccggccagtatcgctgtaacgggactagctccaaggggtccgaccaagctataatcacgctccgggtgcgttcccatctggccgcactgtggcccttcctgggtattgtcgccgaagtgctggttttggtgacaattatattcatttatgagaagcgtcggaagcctgaggacgtgcttgacgacgacgacgcggggagcgctcccttgaaatcctctggacagcatcaaaatgataagggaaaaaatgtgcgtcagcgcaacagttcatag

SEQ ID NO: 276227 - DNA, 810 bp, Artificial Sequence
  derived and/or modified sequence
atggctgccgctttgttcgttctgctggggttcgccctgcttggtacccacggagcatccggtgcggcaggaacggtgtttaccacggttgaggacctaggcagtaaaatcctgctcacttgcagcctgaatgattccgcgaccgaagtgaccggacacagatggctcaagggaggagttgtcctcaaagaagatgctctgcctggtcagaagacagagttcaaggtggattcagatgatcagtggggggaatacagttgcgtattcctccccgaacctatggggaccgccaacatacaactgcatggccctcccagggttaaggcagtaaagtccagcgagcatataaatgagggagagaccgcgatgctcgtgtgcaagagcgagtccgtccctccagtaacagactgggcctggtacaaaataactgattccgaagataaggctctgatgaatggcagcgaatcgaggtttttcgtcagttccagccagggcagaagtgagctccatatcgaaaacttaaacatggaagccgaccccggtcagtaccgatgtaatggaactagttcgaagggatccgatcaagcgatcataacactgcgggttcgatcccacctagccgctctgtggcctttcttggggatcgtggcagaggtgctagtgctagtgactataatctttatctacgagaaacgtaggaaaccagaagatgtcctcgatgacgatgacgcaggatcggctccactgaaaagttccggacagcatcagaacgacaaaggcaagaatgtgcgtcagcggaatagttcatag

SEQ ID NO: 276228 - DNA, 1656 bp, Artificial Sequence
  derived and/or modified sequence
gtgcgcgcgcccggtccgcgcctccgccgctttttatagcggccgcgggcggcggcggcagcggttggaggttgtaggaccggcgaggaataggaatcatggcggctgcgctgttcgtgctgctgggattcgcgctgctgggcacccacggagcctccggggctgccggcacagtcttcactaccgtagaagaccttggctccaagatactcctcacctgctccttgaatgacagcgccacagaggtcacagggcaccgctggctgaaggggggcgtggtgctgaaggaggacgcgctgcccggccagaaaacggagttcaaggtggactccgacgaccagtggggagagtactcctgcgtcttcctccccgagcccatgggcacggccaacatccagctccacgggcctcccagagtgaaggctgtgaagtcgtcagaacacatcaacgagggggagacggccatgctggtctgcaagtcagagtccgtgccacctgtcactgactgggcctggtacaagatcactgactctgaggacaaggccctcatgaacggctccgagagcaggttcttcgtgagttcctcgcagggccggtcagagctacacattgagaacctgaacatggaggccgaccccggccagtaccggtgcaacggcaccagctccaagggctccgaccaggccatcatcacgctccgcgtgcgcagccacctggccgccctctggcccttcctgggcatcgtggctgaggtgctggtgctggtcaccatcatcttcatctacgagaagcgccggaagcccgaggacgtcctggatgatgacgacgccggctctgcacccctgaagagcagcgggcagcaccagaatgacaaaggcaagaacgtccgccagaggaactcttcctgaggcaggtggcccgaggacgctccctgctccacgtctgcgccgccgccggagtccactcccagtgcttgcaagattccaagttctcacctcttaaagaaaacccaccccgtagattcccatcatacacttccttcttttttaaaaaagttgggttttctccattcaggattctgttccttaggtttttttccttctgaagtgtttcacgagagcccgggagctgctgccctgcggccccgtctgtggctttcagcctctgggtctgagtcatggccgggtgggcggcacagccttctccactggccggagtcagtgccaggtccttgccctttgtggaaagtcacaggtcacacgaggggccccgtgtcctgcctgtctgaagccaatgctgtctggttgcgccatttttgtgcttttatgtttaattttatgagggccacgggtctgtgttcgactcagcctcagggacgactctgacctcttggccacagaggactcacttgcccacaccgagggcgaccccgtcacagcctcaagtcactcccaagccccctccttgtctgtgcatccgggggcagctctggagggggtttgctggggaactggcgccatcgccgggactccagaaccgcagaagcctccccagctcacccctggaggacggccggctctctatagcaccagggctcacgtgggaacccccctcccacccaccgccacaataaagatcgcccccacctccaccctc

SEQ ID NO: 276229 - DNA, 1761 bp, Artificial Sequence
  derived and/or modified sequence
agttagcccttcgcgttcggcttagtctgcggtcctcttgcattgcgactccgagtttaacttccaacacacactttcaacctccaagagacgcccccacctgtgtcgccccaatagcgacttttctcaccgtggtcgccgcggaacttcaagggtccttcctacccgcgttgctgagagtctgggtttacgcgtcacctcgggcgggacccgatcctccgctcctgaggcccccacaatgaagcagtcggacgcgtctccccaagaaagccggcacagtcttcactaccgtagaagaccttggctccaagatactcctcacctgctccttgaatgacagcgccacagaggtcacagggcaccgctggctgaaggggggcgtggtgctgaaggaggacgcgctgcccggccagaaaacggagttcaaggtggactccgacgaccagtggggagagtactcctgcgtcttcctccccgagcccatgggcacggccaacatccagctccacgggcctcccagagtgaaggctgtgaagtcgtcagaacacatcaacgagggggagacggccatgctggtctgcaagtcagagtccgtgccacctgtcactgactgggcctggtacaagatcactgactctgaggacaaggccctcatgaacggctccgagagcaggttcttcgtgagttcctcgcagggccggtcagagctacacattgagaacctgaacatggaggccgaccccggccagtaccggtgcaacggcaccagctccaagggctccgaccaggccatcatcacgctccgcgtgcgcagccacctggccgccctctggcccttcctgggcatcgtggctgaggtgctggtgctggtcaccatcatcttcatctacgagaagcgccggaagcccgaggacgtcctggatgatgacgacgccggctctgcacccctgaagagcagcgggcagcaccagaatgacaaaggcaagaacgtccgccagaggaactcttcctgaggcaggtggcccgaggacgctccctgctccacgtctgcgccgccgccggagtccactcccagtgcttgcaagattccaagttctcacctcttaaagaaaacccaccccgtagattcccatcatacacttccttcttttttaaaaaagttgggttttctccattcaggattctgttccttaggtttttttccttctgaagtgtttcacgagagcccgggagctgctgccctgcggccccgtctgtggctttcagcctctgggtctgagtcatggccgggtgggcggcacagccttctccactggccggagtcagtgccaggtccttgccctttgtggaaagtcacaggtcacacgaggggccccgtgtcctgcctgtctgaagccaatgctgtctggttgcgccatttttgtgcttttatgtttaattttatgagggccacgggtctgtgttcgactcagcctcagggacgactctgacctcttggccacagaggactcacttgcccacaccgagggcgaccccgtcacagcctcaagtcactcccaagccccctccttgtctgtgcatccgggggcagctctggagggggtttgctggggaactggcgccatcgccgggactccagaaccgcagaagcctccccagctcacccctggaggacggccggctctctatagcaccagggctcacgtgggaacccccctcccacccaccgccacaataaagatcgcccccacctccaccctc

SEQ ID NO: 276230 - DNA, 810 bp, Artificial Sequence
  derived and/or modified sequence
atggccgccgccctgttcgtgctgctgggcttcgccctgctgggcacccacggcgccagcggcgccgccggcaccgtgttcaccaccgtggaggacctgggcagcaagatcctgctgacctgcagcctgaacgacagcgccaccgaggtgaccggccacagatggctgaagggcggcgtggtgctgaaggaggacgccctgcccggccagaagaccgagttcaaggtggacagcgacgaccagtggggcgagtacagctgcgtgttcctgcccgagcccatgggcaccgccaacatccagctgcacggcccccccagagtgaaggccgtgaagagcagcgagcacatcaacgagggcgagaccgccatgctggtgtgcaagagcgagagcgtgccccccgtgaccgactgggcctggtacaagatcaccgacagcgaggacaaggccctgatgaacggcagcgagagcagattcttcgtgagcagcagccagggcagaagcgagctgcacatcgagaacctgaacatggaggccgaccccggccagtacagatgcaacggcaccagcagcaagggcagcgaccaggccatcatcaccctgagagtgagaagccacctggccgccctgtggcccttcctgggcatcgtggccgaggtgctggtgctggtgaccatcatcttcatctacgagaagagaagaaagcccgaggacgtgctggacgacgacgacgccggcagcgcccccctgaagagcagcggccagcaccagaacgacaagggcaagaacgtgagacagagaaacagcagctag

SEQ ID NO: 276231 - protein, 360 aa, Artificial Sequence
  derived and/or modified sequence
MYPQGRHPTPLQSGQPFKFSILEICDRIKEEFQFLQAQYHSLKLECEKLASEKTEMQRHYVMYYEMSYGLNIEMHKQAEIVKRLSGICAQIIPFLTQESASPSPPESLVEEERPSGPGGGGKQRADEKEPSGPYESDEDKSDYNLVVDEDQPSEPPSPATTPCGKVPICIPARRDLVDSPASLASSLGSPLPRAKELILNDLPASTPASKSCDSSPPQDASTPGPSSASHLCQLAAKPAPSTDSVALRSPLTLSSPFTTSFSLGSHSTLNGDLSVPSSYVSLHLSPQVSSSVVYGRSPVMAFESHPHLRGSSVSSSLPSIPGGKPAYSFHVSADGQMQPVPFPSDALVGAGIPPWPSSTA

SEQ ID NO: 276232 - DNA, 1083 bp, Artificial Sequence
  derived and/or modified sequence
atgtacccccagggcagacaccccacccccctgcagagcggccagcccttcaagttcagcatcctggagatctgcgacagaatcaaggaggagttccagttcctgcaggcccagtaccacagcctgaagctggagtgcgagaagctggccagcgagaagaccgagatgcagagacactacgtgatgtactacgagatgagctacggcctgaacatcgagatgcacaagcaggccgagatcgtgaagagactgagcggcatctgcgcccagatcatccccttcctgacccaggagagcgccagccccagcccccccgagagcctggtggaggaggagagacccagcggccccggcggcggcggcaagcagagagccgacgagaaggagcccagcggcccctacgagagcgacgaggacaagagcgactacaacctggtggtggacgaggaccagcccagcgagccccccagccccgccaccaccccctgcggcaaggtgcccatctgcatccccgccagaagagacctggtggacagccccgccagcctggccagcagcctgggcagccccctgcccagagccaaggagctgatcctgaacgacctgcccgccagcacccccgccagcaagagctgcgacagcagccccccccaggacgccagcacccccggccccagcagcgccagccacctgtgccagctggccgccaagcccgcccccagcaccgacagcgtggccctgagaagccccctgaccctgagcagccccttcaccaccagcttcagcctgggcagccacagcaccctgaacggcgacctgagcgtgcccagcagctacgtgagcctgcacctgagcccccaggtgagcagcagcgtggtgtacggcagaagccccgtgatggccttcgagagccacccccacctgagaggcagcagcgtgagcagcagcctgcccagcatccccggcggcaagcccgcctacagcttccacgtgagcgccgacggccagatgcagcccgtgcccttccccagcgacgccctggtgggcgccggcatccccccctggcccagcagcaccgcctag

SEQ ID NO: 276233 - DNA, 1083 bp, Artificial Sequence
  derived and/or modified sequence
atgtatccacagggtcgccatccgaccccattgcaaagcggccagccctttaagtttagcatccttgagatatgcgatagaataaaagaggaatttcagtttctgcaagcacaatatcacagcctcaagttagagtgcgaaaaacttgcttctgagaagaccgaaatgcagcgccactacgtcatgtactatgaaatgtcctacggcctcaacatagagatgcacaaacaagcagagatcgtaaagcgactgtcgggtatttgcgcccagataatccccttcttgacccaggaatctgccagcccatcccccccggaaagcctagtggaggaagaacggccctccggcccaggcggaggtggcaagcaaagggctgacgaaaaagaacctagcggtccttacgaaagcgatgaggataagagtgactataatctggtggtagacgaagaccagccaagtgaacccccgtccccagcgactacaccctgtggcaaggtcccaatttgcataccagctaggcgtgatctggtggactcacccgcttctctagcttctagtctgggctctcccctgcctagggcaaaggaattaattctcaacgatctgcctgcaagtacgcccgcttccaaatcttgtgacagtagcccacctcaagacgcttccacccccgggccaagctctgcatctcacctgtgccaattagcagctaaaccggcccctagtacagatagtgttgccctccggtcaccactgaccctcagcagcccgttcactaccagtttctccctaggtagccattcgactctgaatggcgatctgagcgtaccctcttcctatgtgagtctgcacctctcgccacaagtcagttcttcagtcgtttacggacgatcgcccgtgatggcattcgagagccatcctcatctccgggggagctcggtgtcgtccagcctgccttcaatacccggaggtaagcctgcttattccttccatgtaagtgccgatggccagatgcagccagtcccatttccttcggacgcgctggttggtgccgggattcctccctggccctcatccaccgcttag

SEQ ID NO: 276234 - DNA, 1083 bp, Artificial Sequence
  derived and/or modified sequence
atgtacccccagggccgccaccccacccccctgcagagcggccagcccttcaagttcagcatcctggagatctgtgaccgcatcaaggaggagttccagttcctgcaggcccagtaccacagcctgaagctggagtgtgagaagctggccagcgagaagacagagatgcagaggcactacgtgatgtactatgagatgtcctatggcctgaacatcgagatgcacaagcaggccgagatcgtgaagaggctgagcggcatctgtgcccagatcatccccttcctgacccaggagagcgccagccccagccccccagagagcctggtggaggaggagcggcccagcggccctgggggcggcggcaagcagagagcagatgagaaggagcccagcggcccctatgaaagtgatgaggacaagagtgactacaacctggtggtggatgaggaccagcccagcgagccccccagccctgccaccaccccctgtgggaaggtgcccatctgcatcccagcccggcgggacctggtggacagccctgccagcctggccagcagcctgggcagccccctgccccgggccaaggagctgatcctgaatgacctgcctgccagcaccccagccagcaagagctgtgacagcagccccccccaggatgccagcaccccaggccccagcagcgccagccacctgtgccagctggccgccaagccagcccccagcacagacagcgtggccctgcggagccccctgaccctgagcagccccttcaccaccagcttcagcctgggcagccacagcaccctgaatggagacctgtctgtgcccagcagctatgtgtccctgcacctgagcccccaggtgagcagctctgtggtgtatggccgcagccctgtgatggcctttgagagccacccccacctgcggggcagctctgtgagcagcagcctgcccagcatccctgggggcaagccagcctacagcttccacgtgtctgcagatggccagatgcagcctgtgcccttccccagtgatgccctggtgggcgccggcatccccccctggcccagcagcacagcctag

SEQ ID NO: 276235 - DNA, 1083 bp, Artificial Sequence
  derived and/or modified sequence
atgtacccccagggccggcaccccacccccctgcagagcggccagcccttcaagtttagtattctggagatttgcgataggattaaagaggaatttcagtttctgcaggcccaataccattcactgaaactggaatgtgaaaaactggcatccgagaaaaccgagatgcaacggcactacgtgatgtattacgaaatgagttatggcctcaatatcgaaatgcataagcaggctgaaatcgttaaacgattatctggtatttgcgcacagatcatcccttttttgactcaggagtcagcaagcccgagtccccccgagtccctggttgaagaagagcggccatcagggccgggaggaggcgggaaacagagggccgacgaaaaagagccttctggcccctacgaaagtgacgaggataagagtgactataacctggtcgtggacgaggaccaaccctcagaacctccaagcccagctactaccccctgcggcaaggtgcccatctgtatacctgcccggcgggacctagtcgacagccctgccagcctggccagtagcctggggtctccactgccacgcgccaaagagctgatcctcaatgatctcccggcatccacaccagcttcgaagtcatgtgattcctcgccacctcaggatgcctctaccccaggcccgtcttcagcctcacacctgtgtcaattggccgccaagcccgctccttcgaccgactccgttgcgctccgctctcccctgaccctgtctagcccattcacgactagcttctctcttggatcgcacagcacccttaacggggacctgtccgtgccaagctcttatgtgagcctccatctgagccctcaggtatcttcctcagttgtgtatggtaggagccctgttatggcatttgagagccacccccacttaaggggaagctctgtatcctccagtctgccgtctataccagggggaaaacccgcgtattcctttcatgtgagcgccgatggacagatgcagcctgtgcccttccctagtgacgctttggttggtgctggtattcctccttggccttcatccactgcttag

SEQ ID NO: 276236 - DNA, 1083 bp, Artificial Sequence
  derived and/or modified sequence
atgtaccctcagggcaggcacccaaccccactacagtcgggacaacccttcaagttttccatcctggagatctgcgaccgaattaaggaggagttccaatttttacaggctcagtatcacagcctaaaactagaatgcgagaaactggcgtctgagaagactgagatgcagcgacattacgtaatgtattacgaaatgtcctacgggcttaacatcgaaatgcataaacaagccgagatcgtaaagagactctccggcatctgcgctcagattatcccattcttgacacaggagagcgcctcccccagccccccagagtcactcgtcgaagaggaaagaccctctggaccagggggaggaggaaagcagagagcagatgaaaaggaaccttccggcccatatgaatctgacgaggataaaagtgactacaacctagtcgtggacgaagaccagccatcagaaccacctagcccagcgacaactccttgcggcaaggtccccatttgcattcctgcacggcgagacctcgtggactctcctgccagcctcgcctcttcactgggttccccactgccgagggccaaagagttaattctgaatgatcttcccgcatcgactccagcctccaaaagctgtgactcctcgcccccacaggacgcatcaacccctggcccaagcagcgcatcacatctgtgtcagcttgccgctaaaccagctccttctacagacagcgtggctctgcggagtcccctgaccctgtcctccccctttactaccagtttttccctaggctcgcacagcacgttaaacggcgatttgagtgtaccttccagttatgtgagcctgcaccttagcccgcaggtatctagcagcgtcgtgtacgggaggagtccagtcatggcctttgaatcccacccacaccttagaggctctagtgtaagttccagtctgcctagtatccctggaggaaaaccagcttattcttttcatgtgtccgctgacgggcagatgcaaccggtcccatttcctagcgatgccctggtcggggcaggcattcccccatggccctcatctaccgcctag

SEQ ID NO: 276237 - DNA, 1343 bp, Artificial Sequence
  derived and/or modified sequence
tcgccgcgctcccgccccggccgctgcccctgcccgccccgctcgccccgcgcaccccaacccggggaggggctcccacgaccccgggcgcgcgcgcttgggggcgcgccagggactccagggtcccttgccccgcgccgcttctccctcctccctctttcttcgggcagcctccccaccaccccacttcagcctcccccactcttgccgcctccatatcatcaagctctggtggcgcctggggggcttttcggatcggcaggatgtacccccagggaaggcacccgaccccgctccagtccggccagcccttcaagttctcgatcttggagatctgcgaccgcatcaaagaagaattccagtttcttcaggctcaataccacagcctcaagctagaatgtgagaagctggccagcgagaagacggaaatgcagcgacattatgtcatgtattatgagatgtcgtacgggctcaacattgaaatgcataagcaggcggagattgtgaagcgtctgagcggtatctgcgctcagattatccccttcctgacccaggagagtgcatctccctcgccccctgagagtctcgtggaggaggagcgaccgagtggccctggtggtggcgggaagcagagagcagatgagaaggagccatcaggaccttatgaaagcgacgaagacaagagtgattacaatctggtggtggacgaggaccaaccctcagagccccccagcccggctaccaccccctgcggaaaggtacccatctgcattcctgcccgtcgggacctggtggacagtccagcctccttggcctctagccttggctcaccgctgcctagagccaaggagctcatcctgaatgaccttcccgccagcactcctgcctccaaatcctgtgactcctccccgccccaggacgcttccacccccgggcccagctcggccagtcacctctgccagcttgctgccaagccagcaccttccacggacagcgtcgccctgaggagccccctgactctgtccagtcccttcaccacgtccttcagcctgggctcccacagcactctcaacggagacctctccgtgcccagctcctacgtcagcctccacctgtccccccaggtcagcagctctgtggtgtacggacgctcccccgtgatggcatttgagtctcatccccatctccgagggtcatccgtctcttcctccctacccagcatccctgggggaaagccggcctactccttccacgtgtctgcggacgggcagatgcagccggttcccttcccctcggatgcactggtaggcgcgggcatcccgccgtggcccagctcgactgcc

SEQ ID NO: 276238 - DNA, 2108 bp, Artificial Sequence
  derived and/or modified sequence
agaaaagccatttccgactccagactggtccccgctccccgcaagcccccccccccgctcccacgaccccgctccagtccggccagcccttcaagttctcgatcttggagatctgcgaccgcatcaaagaagaattccagtttcttcaggctcaataccacagcctcaagctagaatgtgagaagctggccagcgagaagacggaaatgcagcgacattatgtcatgtattatgagatgtcgtacgggctcaacattgaaatgcataagcaggcggagattgtgaagcgtctgagcggtatctgcgctcagattatccccttcctgacccaggagcatcagcagcaggtgctccaggccgtagaacgcgccaagcaggtcaccgtgggggagctgaacagcctcatcgggagtgcatctccctcgccccctgagagtctcgtggaggaggagcgaccgagtggccctggtggtggcgggaagcagagagcagatgagaaggagccatcaggaccttatgaaagcgacgaagacaagagtgattacaatctggtggtggacgaggaccaaccctcagagccccccagcccggctaccaccccctgcggaaaggtacccatctgcattcctgcccgtcgggacctggtggacagtccagcctccttggcctctagccttggctcaccgctgcctagagccaaggagctcatcctgaatgaccttcccgccagcactcctgcctccaaatcctgtgactcctccccgccccaggacgcttccacccccgggcccagctcggccagtcacctctgccagcttgctgccaagccagcaccttccacggacagcgtcgccctgaggagccccctgactctgtccagtcccttcaccacgtccttcagcctgggctcccacagcactctcaacggagacctctccgtgcccagctcctacgtcagcctccacctgtccccccaggtcagcagctctgtggtgtacggacgctcccccgtgatggcatttgagtctcatccccatctccgagggtcatccgtctcttcctccctacccagcatccctgggggaaagccggcctactccttccacgtgtctgcggacgggcagatgcagccggttcccttcccctcggatgcactggtaggcgcgggcatcccgcggcacgcccggcagctgcacacgctggcccatggcgaggtggtctgcgcggtcaccatcagcggctccacacagcatgtgtacacgggcggcaagggctgtgtgaaggtgtgggacgtgggccagcctggggccaagacgcccgtggcccagctcgactgcctgaaccgagacaactacattcgttcctgcaagttgctgccggatggccggagtctgatcgtgggcggtgaggccagcaccttgtccatttgggacctggcggcgcccaccccccgtatcaaggccgagctgacttcctcagccccagcctgctacgccctggccgtcagccccgacgccaaggtttgcttctcctgctgcagcgatggcaacattgtggtctgggacctgcagaatcagactatggtcaggcagttccagggccacacggacggcgccagctgcattgatatttccgattacggcactcggctctggacagggggcctggacaacacggtgcgctgctgggacctgcgggagggccgccagctgcagcagcatgacttcagctcccagattttctccctgggccactgccctaaccaggactggctggcggtcggaatggagagtagcaacgtggagatcctgcacgtccgcaagccggagaaataccagctgcacctccacgagagctgcgtgctgtccctgaagtttgcctcctgcggacggtggtttgtgagcaccgggaaggacaacctgctcaacgcctggaggacgccgtacggggccagcattttccagtccaaggagtcgtcctcagtcctgagttgtgacatctccagaaataacaaatacatcgtgacaggctcgggggacaagaaggccaccgtgtatgaggtggtctactgagacatgaccccccttcctgtacccgaagtccagact

SEQ ID NO: 276239 - DNA, 2253 bp, Artificial Sequence
  derived and/or modified sequence
ccccgctcgccccgcgcaccccaacccgcccccccagaccccgctccagtccggccagcccttcaagttctcgatcttggagatctgcgaccgcatcaaagaagaattccagtttcttcaggctcaataccacagcctcaagctagaatgtgagaagctggccagcgagaagacggaaatgcagcgacattatgtcatgtattatgagatgtcgtacgggctcaacattgaaatgcataagcaggcggagattgtgaagcgtctgagcggtatctgcgctcagattatccccttcctgacccaggagcatcagcagcaggtgctccaggccgtagaacgcgccaagcaggtcaccgtgggggagctgaacagcctcatcgggagtgcatctccctcgccccctgagagtctcgtggaggaggagcgaccgagtggccctggtggtggcgggaagcagagagcagatgagaaggagccatcaggaccttatgaaagcgacgaagacaagagtgattacaatctggtggtggacgaggaccaaccctcagagccccccagcccggctaccaccccctgcggaaaggtacccatctgcattcctgcccgtcgggacctggtggacagtccagcctccttggcctctagccttggctcaccgctgcctagagccaaggagctcatcctgaatgaccttcccgccagcactcctgcctccaaatcctgtgactcctccccgccccaggacgcttccacccccgggcccagctcggccagtcacctctgccagcttgctgccaagccagcaccttccacggacagcgtcgccctgaggagccccctgactctgtccagtcccttcaccacgtccttcagcctgggctcccacagcactctcaacggagacctctccgtgcccagctcctacgtcagcctccacctgtccccccaggtcagcagctctgtggtgtacggacgctcccccgtgatggcatttgagtctcatccccatctccgagggtcatccgtctcttcctccctacccagcatccctgggggaaagccggcctactccttccacgtgtctgcggacgggcagatgcagccggttcccttcccctcggatgcactggtaggcgcgggcatcccgcggcacgcccggcagctgcacacgctggcccatggcgaggtggtctgcgcggtcaccatcagcggctccacacagcatgtgtacacgggcggcaagggctgtgtgaaggtgtgggacgtgggccagcctggggccaagacgcccgtggcccagctcgactgcctgaaccgagacaactacattcgttcctgcaagttgctgccggatggccggagtctgatcgtgggcggtgaggccagcaccttgtccatttgggacctggcggcgcccaccccccgtatcaaggccgagctgacttcctcagccccagcctgctacgccctggccgtcagccccgacgccaaggtttgcttctcctgctgcagcgatggcaacattgtggtctgggacctgcagaatcagactatggtcaggcagttccagggccacacggacggcgccagctgcattgatatttccgattacggcactcggctctggacagggggcctggacaacacggtgcgctgctgggacctgcgggagggccgccagctgcagcagcatgacttcagctcccagattttctccctgggccactgccctaaccaggactggctggcggtcggaatggagagtagcaacgtggagatcctgcacgtccgcaagccggagaaataccagctgcacctccacgagagctgcgtgctgtccctgaagtttgcctcctgcggacggtggtttgtgagcaccgggaaggacaacctgctcaacgcctggaggacgccgtacggggccagcattttccagtccaaggagtcgtcctcagtcctgagttgtgacatctccagaaataacaaatacatcgtgacaggctcgggggacaagaaggccaccgtgtatgaggtggtctactgagacatgaccccccttcctgtacccgaagtccagactcccaggggaatcagcagccaggacagacatcctagcagccgcctcccagccctgcctaggaaccgtacatcccatctgctctctggccaacggcttcacaccttcccctgctgcatgtgggggccgatgggcaggggacctcggtggaaataaaatgtatctatcacatccgc

SEQ ID NO: 276240 - protein, 1740 aa, Artificial Sequence
  derived and/or modified sequence
MGEKLELRLKSPVGAEPAVYPWPLPVYDKHHDAAHEIIETIRWVCEEIPDLKLAMENYVLIDYDTKSFESMQRLCDKYNRAIDSIHQLWKGTTQPMKLNTRPSTGLLRHILQQVYNHSVTDPEKLNNYEPFSPEVYGETSFDLVAQMIDEIKMTDDDLFVDLGSGVGQVVLQVAAATNCKHHYGVEKADIPAKYAETMDREFRKWMKWYGKKHAEYTLERGDFLSEEWRERIANTSVIFVNNFAFGPEVDHQLKERFANMKEGGRIVSSKPFAPLNFRINSRNLSDIGTIMRVVELSPLKGSVSWTGKPVSYYLHTIDRTILENYFSSLKNPKLREEQEAARRRQQRESKSNAATPTKGPEGKVAGPADAPMDSGAEEEKAGAATVKKPSPSKARKKKLNKKGRKMAGRKRGRPKKMNTANPERKPKKNQTALDALHAQTVSQTAASSPQDAYRSPHSPFYQLPPSVQRHSPNPLLVAPTPPALQKLLESFKIQYLQFLAYTKTPQYKASLQELLGQEKEKNAQLLGAAQQLLSHCQAQKEEIRRLFQQKLDELGVKALTYNDLIQAQKEISAHNQQLREQSEQLEQDNRALRGQSLQLLKARCEELQLDWATLSLEKLLKEKQALKSQISEKQRHCLELQISIVELEKSQRQQELLQLKSCVPPDDALSLHLRGKGALGRELEPDASRLHLELDCTKFSLPHLSSMSPELSMNGQAAGYELCGVLSRPSSKQNTPQYLASPLDQEVVPCTPSHVGRPRLEKLSGLAAPDYTRLSPAKIVLRRHLSQDHTVPGRPAASELHSRAEHTKENGLPYQSPSVPGSMKLSPQDPRPLSPGALQLAGEKSSEKGLRERAYGSSGELITSLPISIPLSTVQPNKLPVSIPLASVVLPSRAERARSTPSPVLQPRDPSSTLEKQIGANAHGAGSRSLALAPAGFSYAGSVAISGALAGSPASLTPGAEPATLDESSSSGSLFATVGSRSSTPQHPLLLAQPRNSLPASPAHQLSSSPRLGGAAQGPLPEASKGDLPSDSGFSDPESEAKRRIVFTITTGAGSAKQSPSSKHSPLTASARGDCVPSHGQDSRRRGRRKRASAGTPSLSAGVSPKRRALPSVAGLFTQPSGSPLNLNSMVSNINQPLEITAISSPETSLKSSPVPYQDHDQPPVLKKERPLSQTNGAHYSPLTSDEEPGSEDEPSSARIERKIATISLESKSPPKTLENGGGLAGRKPAPAGEPVNSSKWKSTFSPISDIGLAKSADSPLQASSALSQNSLFTFRPALEEPSADAKLAAHPRKGFPGSLSGADGLSPGTNPANGCTFGGGLAADLSLHSFSDGASLPHKGPEAAGLSSPLSFPSQRGKEGSDANPFLSKRQLDGLAGLKGEGSRGKEAGEGGLPLCGPTDKTPLLSGKAAKARDREVDLKNGHNLFISAAAVPPGSLLSGPGLAPAASSAGGAASSAQTHRSFLGPFPPGPQFALGPMSLQANLGSVAGSSVLQSLFSSVPAAAGLVHVSSAATRLTNSHAMGSFSGVAGGTVGAGGVFNHAVPSASAHPFGARVGRGAACGSATLGPSPLQAAASASASSFQAPASVETRPPPPPPPPPPPLPPPAHLGRSPAGPPVLHAPPPPNAALPPPPTLLASNPEPALLQSLASLPPNQAFLPPTSAASLPPANASLSIKLTSLPHKGARPSFTVHHQPLPRLALAQAAPGIPQASATGPSAVWVSLGMPPPYAAHLSGVKPR

SEQ ID NO: 276241 - DNA, 5223 bp, Artificial Sequence
  derived and/or modified sequence
atgggagagaagctggagctgcgcttgaaaagtccggtaggggctgaacccgctgtttatccatggcccctgcctgtgtacgacaaacatcatgacgctgcacacgagattatcgagacaatacgatgggtgtgtgaggagatacccgacctgaagctggccatggagaattacgttctgattgactacgacacgaagtcattcgagtccatgcagcggttgtgtgacaagtataatcgcgccatcgattctatacatcagttatggaaaggtacaacacaaccaatgaagttaaacactagaccatctactggactgctgcgccacatcctccagcaggtctacaatcactccgtgacagaccctgagaagttgaataattacgagccattctccccagaggtatatggggagacttcatttgatcttgtggcacagatgattgatgaaatcaagatgacagacgatgacttatttgtggacctgggttctggcgtcgggcaggtggttcttcaggtcgcggctgccaccaactgcaagcatcattatggagtcgaaaaggcagacattcctgctaaatatgccgagaccatggatagagagtttcgtaagtggatgaagtggtatgggaagaagcatgccgagtacacacttgaacgaggagattttcttagcgaagagtggagggagaggatcgccaatacttctgttatctttgtgaacaacttcgccttcggaccagaagtggatcaccaattgaaggagcgtttcgccaatatgaaggaaggtggaagaatcgtctcttccaagccgtttgcacctctgaattttagaatcaacagccgcaatttaagcgacataggcactatcatgcgggtagtggaactgtctcctctcaagggctcagtatcatggaccggcaagccagtgtcatattatttgcacactattgaccgtactattctagagaattatttttctagcttgaaaaaccccaagcttcgggaagaacaggaggctgccagaaggcgtcaacaaagagaatctaagtccaacgccgctacccctaccaaaggtcccgagggcaaagtagccggacccgcagacgctcctatggattcaggagccgaagaagaaaaagctggcgccgcgactgtgaaaaaaccttcaccctctaaagcccgcaagaagaagctgaacaagaaagggcgaaagatggcgggccgtaagcgagggcggccaaagaaaatgaacaccgcaaacccagagcgcaagcccaaaaagaaccagacagctctggacgcattgcacgcccaaaccgttagtcaaacagcggcgtccagccctcaggacgcttaccgaagcccccacagtcctttctaccaactgccaccaagcgttcagcgccacagcccgaatccgctgttggtcgcccctacacccccggcattgcagaaactgcttgagtccttcaaaatccagtatctgcagttcctggcatacacaaagacacctcaatataaagcgagtctccaggaactcttagggcaggagaaagagaaaaatgcacaactgttgggagctgcccaacaactcctaagccactgtcaagcccagaaggaggaaatccgccggctgtttcaacagaagctggacgagctgggcgtgaaagcattgacctacaatgacctcatccaggcccaaaaagaaatcagcgcacacaatcagcaactgcgagagcagtctgagcagcttgagcaagacaatcgcgcattacgtggtcagagcctgcagctgcttaaggcacggtgtgaggagttgcagctggattgggcaactctgagcctggaaaagctgcttaaggaaaagcaggccctgaaatcccaaatcagtgagaagcagcgacactgcctggagcttcagatctccatcgtggaactggagaaatcccagagacagcaggaactgctgcagcttaagagttgtgtgcctccggacgatgcactgtcactgcaccttcgggggaagggcgcactgggacgagaactggagccagacgccagcagattgcacctcgaactggactgcacaaaattcagtctccctcatctcagcagcatgagtcctgagctgagcatgaatggacaggcagccgggtacgagctgtgcggggtcctgtcacgaccgtcatccaaacagaatacccctcagtatttggcctccccactcgatcaggaggttgtgccgtgcactccctcccacgtggggcgcccccgattagagaaacttagtggcctggctgctcccgattacacccgattatctcccgcgaagatcgtcctgcgtcgccaccttagccaggaccacactgtgccaggccgaccagcggccagtgaactccacagccgcgcagaacacactaaggaaaacggcctcccataccagagcccaagcgtgcctgggagcatgaaattgtctccccaggaccctcgtcctctgtcccctggagcacttcaattggccggggagaagagcagtgagaaaggactgagagagagggcatacggaagcagcggcgagctcatcacatccctacctatctccatcccgctaagtactgtgcagcccaataagttgcccgtcagcattcctctggcatctgtcgtcttaccgtcgcgcgctgagcgggctcgaagcactccatctccagtgctgcaaccacgtgacccttcctcaactttagaaaagcagattggcgcgaacgctcacggagccggaagcaggagcctggcactggcccctgcaggtttttcctatgcgggttccgtggcgatttccggggctctcgccggttcaccagccagcctgacaccaggcgcagagcccgctaccctcgatgagagctcctcttcagggtctctcttcgcaacggttgggtccaggtcatccacaccccagcacccattactcctggctcagccacgaaactccctaccagcctcacctgcccaccagctgagcagcagcccgagattaggcggggctgctcagggaccgctgcccgaggcatccaagggagatctcccaagcgatagtgggttctccgatcctgagagcgaggctaagaggagaattgtgtttactatcaccaccggcgcgggatctgcgaaacagtctccctccagtaagcactctccgcttactgcctccgcccgcggagactgtgtgcccagtcatggtcaggatagtagacgcaggggcaggagaaagagagcctctgccgggaccccctccctgtccgctggcgtgagtccaaagcgccgggcccttccttccgttgctggtttgtttactcaacccagcggatctccattaaatcttaactcaatggtgtccaacattaaccagccgctggaaatcacagctatttccagtcctgagacctcattaaaatcctcaccagtgccttaccaggaccacgaccaaccccccgtgctgaagaaggaacgccccctgtcacagacgaacggcgctcactattcaccactgaccagtgacgaggagcccgggtccgaggacgaaccctcaagtgcgagaatagaaaggaaaatcgccactattagtcttgaatccaaatcacctccgaaaaccctggaaaacggcggaggcctggcaggccgaaaaccggcacccgctggggagcctgttaattcctcaaaatggaagagcacattttcacccatttctgacatagggctggcgaagagtgccgattcacctctccaggcgtccagtgccctttcacaaaacagcctcttcacttttagaccagctttagaggaaccgtccgccgatgccaaacttgccgctcaccctagaaaggggttcccagggagcttatcgggagccgacgggctctcaccaggcactaatcctgctaacggatgtacctttggaggaggcttggccgcagacttgtcgctacactccttctccgacggagccagcctgccccataagggacctgaggccgccggcctgagctctcccctgtcgtttccgagccagcgtggaaaggaaggctctgacgcaaacccgttcctgagtaagcggcagttggacggtctggctgggctcaaaggagagggcagcagagggaaggaagccggggagggaggactgcccctgtgtgggcctacagataaaacaccactcctgagtgggaaagccgccaaagcaagagacagagaggtcgatctgaaaaatgggcacaacctcttcattagcgcagccgcggtgcctcccggttctctgctctcaggccccggactcgcccctgccgcctccagcgccggcggcgctgcaagctccgcccagacacatcgcagtttcctcggcccgttccctccaggtcctcagttcgcgctcgggcccatgtcactgcaagctaacctggggtccgtggctggctcatctgtgctccagagccttttcagctccgttccagccgcagctggtttggtgcacgtgagtagtgcggcaacccggctcaccaattctcatgccatggggagtttcagtggggttgcaggtggcaccgtcggggctggtggcgtgtttaaccacgccgtcccatccgccagcgcccatccttttggagcgagggtgggtcgaggcgccgcgtgtgggagcgctaccctggggccaagtcctctgcaggctgcagccagcgcttccgccagctcgttccaagctcccgcctctgtggagacgcgtcccccgcccccaccccccccccccccacctcctctgccaccgccggcacacctcggtcggtcccctgccggcccgccagttctgcacgcaccaccgccacccaacgcggctctgccacctccaccgactctgctggcatccaacccagaaccagctttgctgcagagtctggcctcactcccaccaaaccaagctttcttgccccccacatccgctgcctcactgcctccggccaacgcgtcactgtccatcaagctgacctccctgcctcacaagggggcccgcccgtcatttacagtccatcaccaaccactcccacgtctggctctggctcaggcagcccccggaattccgcaggcgtcagcgaccggaccctccgccgtatgggtctcattagggatgcctccaccttatgctgcacatcttagcggcgtgaagcctcggtag

SEQ ID NO: 276242 - DNA, 5223 bp, Artificial Sequence
  derived and/or modified sequence
atgggagagaagctggagctgcggctgaagagccctgtgggcgctgagcctgctgtgtacccctggcccctgcctgtgtatgacaagcaccatgatgctgcccacgagatcatcgagaccatccgctgggtgtgtgaggagatcccagacctgaagctggccatggagaactacgtgctgattgattatgacaccaagagctttgagagcatgcagaggctgtgtgacaagtacaacagagccatcgacagcatccaccagctgtggaagggcaccacccagcccatgaagctgaacacccggcccagcacaggcctgctgcggcacatcctgcagcaggtgtacaaccacagcgtgacagatcctgagaagctgaacaactatgagcccttcagccctgaggtgtatggagagaccagctttgacctggtggcccagatgattgatgagatcaagatgacagatgatgacctgtttgtggacctgggcagcggcgtgggccaggtggtgctgcaggtggccgccgccaccaactgcaagcaccactatggagtggagaaggctgacatcccagccaagtatgcagagaccatggaccgggagttcaggaagtggatgaagtggtacggcaagaagcacgccgagtacaccctggagcggggggacttcctgtctgaggagtggagggagcgcatcgccaacaccagcgtcatctttgtgaacaactttgcctttggacctgaggtggaccaccagctgaaggagagatttgccaacatgaaggagggcggccgcatcgtgagcagcaagccctttgcccccctgaacttccgcatcaacagcaggaacctgagtgacatcggcaccatcatgagggtggtggagctgagccccctgaagggctctgtgtcctggacaggcaagcctgtgtcctactacctgcacaccatcgacaggaccatcctggagaactacttcagcagcctgaagaaccccaagctgcgggaggagcaggaggccgcccggcggcggcagcagcgggagagcaagagcaatgctgccacccccaccaagggccctgagggcaaggtggccggccctgcagatgcccccatggacagcggggctgaggaggagaaggccggggccgccaccgtgaagaagcccagccccagcaaggccaggaagaagaagctgaacaagaagggcaggaagatggccggcaggaagaggggccggcccaagaagatgaacacagccaaccctgagaggaagcccaagaagaaccagacagccctggatgccctgcacgcccagacagtgtcccagacagctgccagcagcccccaggatgcctaccgcagcccccacagccccttctaccagctgccccccagcgtgcagaggcacagccccaaccccctgctggtggcccccaccccaccagccctgcagaagctgctggagagcttcaagatccagtacctgcagttcctggcctacaccaagaccccccagtacaaggccagcctgcaggagctgctgggccaggagaaggagaagaatgcccagctgctgggcgccgcccagcagctgctgagccactgccaggcccagaaggaggagatccggcggctcttccagcagaagctggatgagctgggcgtgaaggccctgacctacaatgacctgatccaggcccagaaggagatcagcgcccacaaccagcagctgcgggagcagagcgagcagctggagcaggacaacagagccctgcggggccagagcctgcagctgctgaaggcccgctgtgaggagctgcagctggactgggccaccctgagcctggagaagctgctgaaggagaagcaggccctgaagagccagatcagcgagaagcagaggcactgcctggagctgcagatcagcatcgtggagctggagaagagccagaggcagcaggagctgctgcagctgaagagctgtgtgcccccagatgatgccctgagcctgcacctgcggggcaagggggccctgggccgggagctggagccagatgccagccggctgcacctggagctggactgcaccaagttcagcctgccccacctgagctccatgagccctgagctgtccatgaatggccaggccgccggctatgagctgtgtggggtgctgagccggcccagcagcaagcagaacaccccccagtacctggccagccccctggaccaggaggtggtgccctgcacccccagccacgtgggccggccccggctggagaagctgagcggcctggccgccccagactacacccggctgagccctgccaagatcgtgctgcggcggcacctgagccaggaccacacagtgcccggccggcctgctgccagcgagctgcacagcagagctgagcacaccaaggaaaatggcctgccctaccagagccccagcgtgcccggctccatgaagctgagcccccaggacccccggcccctgagccctggggccctgcagctggccggggagaagagcagcgagaagggcctgcgggagcgggcctacggcagcagcggggagctgatcaccagcctgcccatcagcatccccctgagcacagtgcagcccaacaagctgcctgtgtccatccccctggcctctgtggtgctgcccagcagagctgagcgggcccggagcacccccagccctgtgctgcagccccgggaccccagcagcaccctggagaagcagatcggggccaatgcccatggagctggcagccgcagcctggccctggccccagctggcttctcctatgccggctctgtggccatcagcggggccctggccggcagccctgccagcctgaccccaggagctgagcccgccaccctggatgagagcagcagcagcggcagcctgtttgccaccgtgggcagccgcagcagcaccccccagcaccccctgctgctggcccagcccaggaacagcctgcctgccagccctgcccaccagctgagcagcagcccccggctgggcggggccgcccagggccccctgcctgaggccagcaaaggagacctgcccagcgacagcggcttcagtgaccctgagagcgaggccaagagaagaattgtgttcaccatcaccactggagctggcagcgccaagcagagccccagcagcaagcacagccccctgacagccagcgcccggggggactgtgtgcccagccacggccaggacagcagaagaagaggccgcaggaagagggccagcgctggcacccccagcctgtctgctggggtgagccccaagagaagagccctgcccagcgtggccggcctcttcacccagcccagcggcagccccctgaacctgaacagcatggtgagcaacatcaaccagcccctggagatcacagccatcagcagccctgagaccagcctgaagagcagccctgtgccctaccaggaccatgaccagccccctgtgctgaagaaggagcggcccctgagccagaccaacggggcccactacagccccctgaccagtgatgaggagcccggctctgaagatgagcccagcagcgcccgcatcgagaggaagatcgccaccatcagcctggagagcaagagcccccccaagaccctggagaatggaggcggcctggccggcaggaagccagccccagctggggagcctgtgaacagcagcaagtggaagagcaccttcagccccatcagtgacatcggcctggccaagtctgctgacagccccctgcaggccagcagcgccctgagccagaacagcctcttcaccttccggcctgccctggaggagcccagcgcagatgccaagctggccgcccaccccaggaagggcttccctggcagcctgtctggagcagatggcctgagccctggcaccaacccagccaacggctgcaccttcggcggcggcctggccgctgacctgagcctgcacagcttcagtgatggagccagcctgccccacaagggccctgaggccgccggcctgagcagccccctgtccttccccagccagaggggcaaggagggcagtgatgccaaccccttcctgagcaagaggcagctggatggcctggccggcctgaagggggagggcagccggggcaaggaggccggggagggcggcctgcccctgtgtggccccacagacaagacccccctgctgagcggcaaggccgccaaggcccgggaccgggaggtggacctgaagaatggccacaacctcttcatctctgctgctgctgtgcccccaggcagcctgctgagcggccctggcctggccccagctgccagcagcgctggaggagctgccagcagcgcccagacccaccgctccttcctgggccccttccccccaggcccccagtttgccctgggccccatgagcctgcaggccaacctgggctctgtggccggcagctctgtgctgcagagcctcttcagctctgtgcctgctgctgctggcctggtgcacgtgagcagcgctgccacccggctgaccaacagccacgccatgggcagcttctctggagtggccggcggcaccgtgggcgctgggggcgtcttcaaccacgctgtgcccagcgccagcgcccacccctttggagcccgggtgggccgcggggccgcctgtggcagcgccaccctgggccccagccccctgcaggccgccgccagcgccagcgccagcagcttccaggccccagcctctgtggagaccaggcctcctcctcctcctcctcctcctcctccacccctgcccccaccagcccacctgggccgcagccctgctggcccccctgtgctgcacgcccctcctcctccaaatgctgccctgcccccaccacccaccctgctggccagcaaccctgagcccgccctgctgcagagcctggccagcctgccccccaaccaggccttcctgccccccaccagcgctgccagcctgcccccagccaatgccagcctgagcatcaagctgaccagcctgccccacaagggggcccggcccagcttcaccgtgcaccaccagcccctgccccggctggccctggcccaggccgcccctggcatcccccaggccagcgccaccggccccagcgctgtgtgggtgtccctgggcatgcccccaccctatgctgcccacctgtctggagtgaagcccaggtag

SEQ ID NO: 276243 - DNA, 5223 bp, Artificial Sequence
  derived and/or modified sequence
atgggcgagaagctggagctgcggctgaagagccccgtgggcgccgaacccgctgtgtatccctggccactgccagtgtacgacaagcaccacgacgcggcgcatgaaataatcgagactatccgctgggtgtgcgaggagattcccgatttgaaacttgccatggagaactacgtgctcatagattatgacaccaagtcatttgagagcatgcagcgactttgtgataagtataatcgggccattgacagcatccaccagctctggaagggaacaacgcagcctatgaaactcaacacccgaccctccaccgggttgctccggcatatcctccagcaggtgtacaaccactctgtaacagatcccgagaagctgaataattatgagccattctctcctgaggtgtacggggaaaccagtttcgacttggtcgctcagatgattgacgagattaagatgaccgatgatgatttgttcgtggacctggggtctggcgttggccaagtagtgcttcaagtcgccgctgccacaaattgcaagcatcattatggcgtggaaaaggccgacattccggccaaatacgcagaaactatggacagggaatttaggaagtggatgaagtggtacggtaagaagcatgccgagtatactctggagcgaggagactttctgtcagaagagtggcgcgagaggatcgcaaatacctctgtaatatttgtgaacaattttgcattcggcccggaagtggatcatcagttaaaagaacgcttcgctaacatgaaggagggcggcaggattgtatccagcaagccttttgctcccctgaacttccgaatcaacagcagaaacctgtccgacatcggcaccattatgcgtgtggtagagctttcaccactgaaaggttccgtcagctggaccgggaagccagtctcttattatcttcacacaattgacaggaccatcctggagaactatttctcttccctgaaaaacccaaaactcagggaggagcaggaagccgccaggaggcgccaacagagagaatcaaaatccaatgcggccaccccaacgaagggccctgaaggaaaggtcgccggcccggccgacgcaccaatggactctggggcggaagaagagaaggctggggctgcaactgttaagaaaccaagtccaagcaaggccagaaaaaaaaagctcaataaaaaaggccggaagatggctggtcggaaacgcgggagacccaaaaaaatgaataccgccaaccccgaacgaaagcccaaaaagaatcagaccgccttggatgctttgcacgctcagaccgtgtctcagacggccgcttcatcgcctcaggacgcgtatagatcacctcactcgccgttttaccaattaccaccgagtgttcaaaggcacagccccaatcccttattagttgctccaactcctccagcattacagaaactcctggaaagcttcaagattcaatatttacagtttcttgcttacactaagactccgcaatacaaagccagcctgcaagaactgctgggtcaggagaaagaaaaaaacgcacagctgttgggggctgcacagcaactactctctcactgtcaagctcagaaagaggagatcaggcgactgttccagcaaaaactagatgagctgggggttaaagccctaacatataacgaccttattcaagcccaaaaagagatcagcgcccacaaccagcagcttagagaacagagtgaacagctggagcaagataaccgagccttgcgaggacagtccttgcagctgctgaaagctagatgtgaagagctccagctggactgggctaccctcagtttggaaaagctgctgaaagaaaagcaggccctgaagtctcagatttcagagaagcaacggcactgtcttgaactacagatatcgatcgtcgagctggaaaagtctcagcgccagcaggaattactccaactgaagagttgcgtccctccggacgatgccctctctttgcatctcagggggaagggagccctggggcgcgagcttgaacccgacgcctctcgcttgcatctagagttagattgtaccaaatttagccttccacacctatcctctatgtctcccgagttgagcatgaatgggcaggccgcgggttacgagttgtgtggagtcctgagccgaccttcctccaaacaaaatacaccacagtacctggccagccccctcgatcaggaggttgtgccttgcaccccgtcccacgtaggccgaccaagacttgagaagctctcaggcctggccgcccctgattatacccgcctgagccctgctaagattgtgttgaggaggcacctttctcaggaccatacagtccccgggaggccagcagccagcgaactgcatagccgagccgagcacacaaaagagaatggtctcccatatcagagtccctccgtgcccggctccatgaaattgagcccccaggacccaaggcccttgagtcccggagctctgcagctggcgggcgaaaagtctagcgagaaaggactgcgtgagcgcgcatacgggtcctccggggaacttattacttccttaccaatatccattccgctgtctacagtgcagccaaataagctcccagtgtcaatcccccttgcttcagtagtgctaccaagtcgggccgaacgggctcggtcgactcccagcccagtgttgcagccacgagatcctagctctactctcgaaaagcagatcggagccaatgcacatggtgccggttcacgctcactggctctggccccagcgggattttcgtacgctgggtccgtggccatatccggagctctggctggcagtcccgcatctttaaccccaggcgctgagccggcaactctggacgaatcctcctcctctggcagtctgttcgcaaccgtgggttctcggagtagtaccccccagcatccactgctgctggctcagccacgaaattcgcttcccgccagccctgcccaccaattgtcctcaagcccacgtctgggtggcgcagcgcagggacccttaccagaagcgagcaagggcgatctgccttctgactcaggcttctccgaccctgaatccgaagccaaacgccggatcgttttcactatcaccaccggagcaggcagcgccaagcaatcacctagtagcaagcacagcccgctcacagcctccgcgagaggagattgcgtccctagccatggacaggacagtcgtcgtcgcggcagaagaaaacgagctagcgccggtacgccatcactgagcgccggcgtttctcctaaaaggcgcgcccttccttctgtcgcaggcctgttcacacagccctcgggaagccctctcaacctgaactcgatggtctcaaatattaaccaacctctcgaaatcaccgccatctcaagtcctgaaacctccctgaaatcatcccccgtgccgtaccaagaccacgatcagccgcccgtcctcaagaaagaacgccccctctcgcagacaaatggagcccattactcccccctgacatctgacgaggaacccggctcggaggatgagccctcgtcagcaaggattgagaggaaaatagctacaatctcactcgaatcaaaatcccctccgaaaaccctcgaaaatggtgggggactcgcgggcaggaaacccgcccccgctggggagcccgtgaattcctctaaatggaagagcaccttttctcccatctccgatattggtctcgccaaaagcgcggacagtccattgcaggccagctccgcgctatcacagaacagtctgttcacatttaggcccgctctcgaagagccttctgcggacgccaaattggccgcccaccctcgcaagggatttccaggatctctgagtggggcagacggtttgagtcctggcaccaaccctgcaaacggctgcactttcggcggagggcttgcagcagatttgtcacttcacagtttctcagacggggcgagcctgccccacaaggggccagaggctgccggactcagttcaccattgtcttttccgtcacagagggggaaagagggatccgatgcgaacccattcttgtcaaagagacagctggacggactggctggccttaagggagaagggtcgcgaggcaaagaggccggtgagggtggactccccctgtgtgggccaacagataagacccctctcctaagcggcaaagccgccaaggcgcgggacagagaggtggatctcaagaatggccataatctgtttatttccgctgccgccgtgcctcccggttccctcctgtcaggcccgggtctggcccctgccgcctcctccgctgggggagcagcttcctccgcacagacacatcgcagcttccttgggccctttccaccagggcctcagttcgccttagggccgatgtccctgcaggcaaacttaggtagtgtcgcagggagcagcgtgctccagtctctgttttcaagcgtgccggccgccgccggtcttgtgcacgttagcagcgccgctacccgccttaccaactctcatgctatggggagtttttccggtgttgcgggcggtacagtgggagccgggggcgtgttcaatcatgctgtcccttccgccagcgctcacccctttggcgcgcgggtgggtcggggcgctgcctgcggctccgcaaccctaggcccttcccctctgcaggcagccgctagtgcctccgctagttctttccaggctcccgcaagtgtcgagacgcggcctccgcctcctccacctcctccaccccctccactgccacctccagcccacctgggaaggtctcccgcgggcccgcctgtccttcacgccccccctccccccaatgctgccctgccccctcctccaacactgctggcctcaaaccccgaacccgcattgctccaatcactggcctcactcccccctaaccaagccttcctcccacccacaagcgccgcatccctccccccggcaaacgcctccctttccatcaagcttactagcctcccgcacaaaggcgctcgaccatcgtttacagtacaccatcagcccctgccccgactggcccttgcccaggctgcccctgggatcccccaggcatccgctacgggccccagtgcagtgtgggtgtccctcggaatgccgcccccttacgccgctcatttatccggagtgaaacctagatag

SEQ ID NO: 276244 - DNA, 5223 bp, Artificial Sequence
  derived and/or modified sequence
atgggggagaaattagaactccgactgaagtcaccagttggagctgagcccgctgtgtatccctggcctcttccggtgtacgacaaacaccacgatgccgctcatgagattatcgaaacaatacggtgggtgtgtgaggagatccctgaccttaaattggcaatggagaattatgtactgatagactatgatactaagtccttcgaaagtatgcagcggctctgtgacaagtacaatagggcgatcgatagcatccatcagctatggaagggcactacccaacccatgaagttgaacacccgaccctccaccggccttctgcggcacattctgcagcaggtttataatcatagtgtgacagaccccgagaaactaaacaactacgagccattcagccctgaggtgtacggagagaccagcttcgatttagttgcacaaatgatcgacgaaatcaagatgaccgatgacgatctgttcgtcgacttgggctctggagttgggcaggtggtgttgcaggttgcagcagcgacgaattgcaagcatcactacggagtggaaaaagcggacatcccagccaagtacgccgagaccatggaccgggagttcaggaaatggatgaagtggtacgggaaaaaacacgcggaatatacactggagcgcggagactttctttccgaagaatggagggaaaggattgccaataccagcgtcatattcgtcaacaactttgcattcggcccagaggtcgaccaccaacttaaagagcgtttcgccaacatgaaggagggagggaggattgtttctagcaaacctttcgcacccctgaatttcagaataaactcgcgtaacctgagcgatattggcactatcatgcgtgtagtggagctaagccccctgaaaggttccgtgtcctggaccggaaagcccgttagctactacttgcacaccattgaccgcacgatactagagaattatttctctagcctaaaaaatcccaaactccgcgaagaacaggaagcagcaaggcggaggcagcaacgtgaaagcaagtctaacgcagctacgcccactaaaggccctgaaggaaaggtggctggcccagccgacgccccaatggatagtggggcagaagaagaaaaagcaggggctgctactgtgaaaaagcccagtcccagtaaggcccgtaagaaaaagctgaataagaaaggtcgtaagatggctgggagaaaaaggggacgaccaaaaaagatgaatactgcaaaccctgaacggaagcccaaaaagaatcaaacagcgctcgatgctctgcacgcccagactgtttcccagaccgccgcatcatcaccacaggatgcctaccggtcgccccatagccccttctaccagctgccaccaagcgttcagagacacagccctaatcctcttctcgtcgctcctactcctcccgcattgcagaaattgctggaatcattcaaaattcagtacctgcagttcctggcctataccaaaaccccacaatataaggcatccctacaggagcttctaggtcaggagaaggaaaagaatgcccaactactgggagccgctcagcagctgctgtctcactgccaggcacaaaaggaggaaattcgcaggctgtttcagcaaaagctcgacgaattaggcgttaaagcactcacatataatgatctgattcaagcccaaaaggagattagtgcccacaatcagcaactccgagaacagtcggagcagcttgagcaggacaacagagccctacgcggtcaatcacttcagctcttgaaagccaggtgtgaggagctacaactggactgggccaccctctcccttgagaagctcctgaaagagaaacaagccctcaagtctcagatttctgaaaagcagcgacattgtttagaacttcagatttctatagtagagcttgagaaaagtcagcggcagcaggaactactgcaactgaaatcctgtgtgccccctgatgatgctcttagtctgcatctccgtggcaagggagctcttggacgggagttggagccagatgctagtaggctgcatttggagctggactgtacaaaattttctctgccgcacctgagcagtatgtcacccgaactttccatgaatggacaagccgctggctacgaactctgtggcgtgctctctcgcccaagtagcaagcagaacacacctcagtacttggccagccctcttgaccaagaggttgtgccatgtacaccttctcacgtagggaggcctcgtctagaaaagctctccgggctggcggctcctgattacactcggctttctcctgcaaaaatcgtacttaggaggcacctgtcacaggaccataccgtgcctggtagaccagcggcatctgagttacactccagagccgagcatacgaaggagaatgggttaccatatcaatccccctcggtgccagggtccatgaagctctcaccacaggatccgagacccctctcaccaggggctctgcagctcgctggcgagaaatcaagcgagaaggggctgagagagagagcctacggtagctctggcgaactgatcacctcattacctatctctattccactgtcaacagttcagccaaacaagctgcccgtgtctatcccactcgccagcgtcgtcctgccgtctagggcagaaagggcgaggtctactccctcccccgtgttgcagcctcgcgatccctcctctaccctagagaagcagatcggcgcaaatgcacatggcgctgggtccagaagcttggcactggcccctgcgggtttttcatatgcgggatccgtcgctattagcggagcgctggctggctcgccggcatctctcaccccaggcgctgaacccgctacattggatgaatcaagttcttctgggtccctgttcgccactgtagggtcacggtcctcaactccccagcacccactgttgctggctcaaccacgcaacagtctccctgcctctccagctcatcagctctctagctcccctcgactggggggtgccgcacagggaccactccccgaggcttcgaagggggacttgcccagcgatagcggattcagtgaccccgagtcagaagctaaaagaaggatcgttttcaccatcaccaccggggctggtagtgccaagcagtccccttctagcaagcattcccccctgacggcctcggctaggggcgattgtgtgccctctcacggccaggatagtcggaggaggggaaggagaaaaagggcgtccgctggcacaccgtccctgagcgccggtgttagcccgaaaagacgggctctcccctccgtcgccggtctcttcacccagccatcgggatctccccttaacctcaactcgatggttagcaacatcaaccagccactcgaaatcaccgctatctccagtcccgagaccagtttgaagtctagccccgtcccttaccaggaccacgatcagccccctgttctgaaaaaggagcgtccattgtcccagacaaatggggcacattatagtccgctgacgagtgacgaggagcctggttccgaggatgagcccagctctgcaagaattgagcggaagattgcgacaatctccctcgagtcgaagtctccccctaaaacattagagaatggcggtggtcttgctgggaggaaacccgctcccgcaggagagcccgttaatagtagcaagtggaaatccacattttcgccgatatctgacatcggccttgcgaaaagcgctgattctcccctgcaggcttcttcggctctgtctcagaatagcctgttcacatttcgcccagcactggaagagcccagtgccgatgcaaagttagctgcacaccctcggaagggctttcccggaagcctgtccggtgctgacggtctttcacccggtacgaaccccgctaacggatgtaccttcggaggtggtctggccgcagatttgtctctacacagctttagtgacggcgcatcactgccccataaaggaccagaagccgcaggactctcttcacccttatccttcccgagccagcgcggtaaggaaggaagcgatgccaatccgtttctgtctaagagacagctcgatggtctcgccggtctcaaaggtgaggggagtcggggaaaggaagcaggggaggggggactgccactgtgtgggcctacagataagactccactgctgtccgggaaggcagccaaggctagggaccgtgaggtcgatttgaaaaacggccacaacctcttcatctcagccgctgccgtccctcctggctccctcctgtccggacccggacttgctccggctgccagctccgccggaggcgctgcttcctcagcgcaaacacatcgtagctttctggggccttttcctccaggcccacagtttgcactggggccaatgtccctgcaggcgaacctgggctccgtcgcgggttccagcgtcctgcaatccctcttctccagcgtgcctgccgcagccggactagtccatgtgtccagtgccgctacccgactgaccaactcacatgcaatgggatccttttccggcgttgccggaggaaccgttggggcaggtggagtattcaaccacgccgtcccatccgctagcgcgcatccatttggtgcacgtgtgggcaggggagccgcttgcggtagtgcaaccctgggcccatccccgcttcaagctgcggcatcggcatcagcctcgtctttccaagcccctgcatccgtggaaacccgcccacccccacccccaccacctcctcctcctcccctcccgccaccagcccatttgggtcgttcaccagctggcccacccgtgttacatgctccgcctcccccaaacgcggcacttccccctccgccaacgctcctagcctcaaatcccgagccagctctgctgcagagcctggcctccctgccaccaaaccaggcattccttcccccaacttctgccgcaagcctgccccctgccaacgctagtttgtcaataaaacttacctcactaccccacaagggagctcgaccttcatttaccgtccatcatcaacccctcccacgactcgccctagcacaggcagctcccggaataccccaagcctccgccaccggaccatcagcagtttgggtaagtctggggatgccccctccatatgccgctcacctctccggcgtcaaaccaaggtag

SEQ ID NO: 276245 - DNA, 5259 bp, Artificial Sequence
  derived and/or modified sequence
cccgcctagcatggtgcggcggccgcgcgcgcggacatgggggagaagctggagctgagactgaagtcgcccgtgggggctgagcccgccgtctacccgtggccgctgccggtctacgataaacatcacgatgctgctcatgaaatcatcgagaccatccgatgggtctgtgaagaaatcccggatctcaagctcgctatggagaattacgttttaattgactatgacaccaaaagcttcgagagcatgcagaggctctgcgacaagtacaaccgtgccatcgacagcatccaccagctgtggaagggcaccacgcagcccatgaagctgaacacgcggccgtccactggactcctgcgccatatcctgcagcaggtctacaaccactcggtgaccgaccccgagaagctcaacaactacgagcccttctcccccgaggtgtacggggagacctccttcgacctggtggcccagatgattgatgagatcaagatgaccgacgacgacctgtttgtggacttggggagcggtgtgggccaggtcgtgctccaggttgctgctgccaccaactgcaaacatcactatggcgtcgagaaagcagacatcccggccaagtatgcggagaccatggaccgcgagttcaggaagtggatgaaatggtatggaaaaaagcatgcagaatacacattggagagaggcgatttcctctcagaagagtggagggagcgaatcgccaacacgagtgttatatttgtgaataattttgcctttggtcctgaggtggatcaccagctgaaggagcggtttgcaaacatgaaggaaggtggcagaatcgtgtcctcgaaaccctttgcacctctgaacttcagaataaacagtagaaacttgagtgacatcggcaccatcatgcgcgtggtggagctctcgcccctgaagggctcggtgtcgtggacggggaagccagtctcctactacctgcacactatcgaccgcaccatacttgaaaactatttttctagtctgaaaaacccaaaactcagggaggaacaggaggcagcccggcgccgccagcagcgcgagagcaagagcaacgcggccacgcccactaagggcccagagggcaaggtggccggccccgccgacgcccccatggactctggtgctgaggaagagaaggcgggagcagccaccgtgaagaagccgtctccctccaaagcccgcaagaagaagctaaacaagaaggggaggaagatggctggccgcaagcgcgggcgccccaagaagatgaacactgcgaaccccgagcggaagcccaagaagaaccaaactgcactggatgccctgcacgctcagaccgtgtctcagacggcggcctcctcaccccaggatgcctacagatcccctcacagcccgttctaccagctacctccgagcgtgcagcggcactcccccaacccgctgctggtggcgcccaccccgcccgcgctgcagaagcttctagagtccttcaagatccagtacctgcagttcctggcatacacaaagaccccccagtacaaggccagcctgcaggagctgctgggccaggagaaggagaagaacgcccagctcctgggtgcggctcagcagctcctcagccactgccaggcccagaaggaggagatcaggaggctgtttcagcaaaaattggatgagctgggtgtgaaggcgctgacctacaacgacctgattcaagcgcagaaggagatctccgcccataaccagcagctgcgggagcagtcggagcagctggagcaggacaaccgcgcgctccgcggccagagcttgcagctgctcaaggctcgctgcgaggagctgcagctggactgggccacgctgtcgctggagaagctgttgaaggagaagcaggccctgaagagccagatctcggagaagcagaggcactgcctggagctgcagatcagcattgtggagctagagaagagccagcggcagcaggagctcctgcagctcaagtcctgtgtgccgcctgacgacgccctgtccctgcacctgcgtgggaagggcgccctgggccgcgagctggagcctgacgccagccggctgcacctggagctggactgcaccaagttctcgctgcctcacttgagcagcatgagcccggagctctccatgaacggccaggctgctggctatgagctctgcggtgtgctgagccggccttcgtcgaagcagaacacgccccagtacctggcctcacccctggaccaggaggtggtgccctgtacccctagccacgtcggccggccgcgcctggagaagctgtctggcctagccgcacccgactacactaggctgtccccggccaagattgtgctgaggcggcacctgagccaggaccacacggtgcccggcaggccggctgccagtgagctgcattcgagagctgagcacaccaaggagaacggccttccctaccagagccccagcgtgcctggcagcatgaagctgagccctcaggacccgcggcccctgtcccctggggccttgcagcttgctggagagaagagcagtgagaagggcctgagagagcgcgcctacggcagcagcggggagctcatcaccagcctgcccatcagcatcccgctcagcaccgtgcagcccaacaagctcccggtcagcattcccctggccagcgtggtgctgcccagccgcgccgagagggcgaggagcacccccagtcccgtgctgcagccccgtgacccctcgtccacacttgaaaagcagattggtgctaatgcccacggtgctgggagcagaagccttgccctggcccccgcaggcttctcctacgctggctcggtggccatcagcggggccttggcgggcagcccggcctctctcacacctggagccgagccggccaccttggatgagtcctccagctctgggagcctttttgccaccgtggggtcccgcagctccacgccacagcaccccctgctgctggcacagccccggaactcgcttcctgcctctcccgcccaccagctctcctccagtccccggcttggtggggccgcccagggcccgttgcccgaggccagcaagggagacctgccctccgattccggcttctcagatcctgagagtgaagccaagaggaggattgtgttcaccatcaccactggtgcgggcagtgccaagcagtcgccctccagcaagcacagccccctgaccgccagcgcccgtggggactgtgtgccgagccacgggcaggacagtcgcaggcgcggccggcggaagcgagcatctgcggggacgcccagcttgagcgcaggcgtgtcccccaagcgccgagccctgccgtccgtcgctggccttttcacacagccttcggggtctcccctcaacctcaactccatggtcagtaacatcaaccagcccctggagattacagccatctcgtccccggagacctccctgaagagctcccctgtgccctaccaggaccacgaccagccccccgtgctcaagaaggagcggcctctgagccagaccaatggggcacactactccccactcacctcagacgaggagccaggctctgaggacgagcccagcagtgctcgaattgagagaaaaattgcaacaatctccttagaaagcaaatctcccccgaaaaccttggaaaatggtggtggcttggcgggaaggaagcccgcgcccgccggcgagccagtcaatagcagcaagtggaagtccaccttctcgcccatctccgacatcggcctggccaagtcggcggacagcccgctgcaggccagctccgccctcagccagaactccctgttcacgttccggcccgccctggaggagccctctgccgatgccaagctggccgctcaccccaggaaaggctttcccggctccctgtcgggggctgacggactcagcccgggcaccaaccctgccaacggctgcaccttcggcgggggcctggccgcggacctgagtttacacagcttcagtgatggtgcttctcttccccacaagggccccgaggcggccggcctgagctccccgctgagcttcccctcgcagcgcggcaaggagggctcggacgccaaccctttcctgagcaagaggcagctggacggcctggctgggctgaagggcgagggcagccgcggcaaggaggcaggggagggcggcctaccgctgtgcgggcccacggacaagaccccactgctgagcggcaaggccgccaaggcccgggaccgcgaggtcgacctcaagaatggccacaacctcttcatctctgcggcggccgtgcctcccggaagcctcctcagcggccccggcctggccccggcggcgtcctccgcaggcggcgcggcgtcctccgcccagacgcaccggtccttcctgggccccttcccgccgggaccgcagttcgcgctcggccccatgtccctgcaggccaacctcggctccgtggccggctcctccgtgctgcagtcgctgttcagctctgtgccggccgccgcaggcctggtgcacgtgtcgtccgctgccaccagactgaccaactcgcacgccatgggcagcttttccggggtggcaggcggcacagttggagcaggaggtgtctttaaccacgcggtgccctccgcctctgctcatccgtttggagcccgtgtcggccgcggggctgcatgtggcagcgccacactgggcccgagcccgctgcaggcggcggccagcgcctcggcctcttcctttcaggccccggcctcggttgagacccggccgccccctccgcctccgcctccgcctcccccgctgcccccgcctgcgcacctgggccggtcccccgcggggccgcccgtcctccacgccccccctccacctaacgccgccttgcctcctcccccaacgctgctggcctctaaccctgagcccgcgcttctgcagagcctcgcgtccctcccgcctaaccaagctttcttgccccccacctctgctgcctctctgccgcctgctaacgcctctttgtctatcaagctcacctccctcccgcacaagggcgcccgcccctccttcacggtgcaccaccagcccctgccccggctggccctggcccaggccgcgcccgggatcccacaggccagcgccacggggccgtccgcggtgtgggtgtccctcggcatgccgcctccctatgccgcgcacctttcgggggttaagccgcgataa

SEQ ID NO: 276246 - DNA, 5223 bp, Artificial Sequence
  derived and/or modified sequence
atgggcgagaagctggagctgagactgaagagccccgtgggcgccgagcccgccgtgtacccctggcccctgcccgtgtacgacaagcaccacgacgccgcccacgagatcatcgagaccatcagatgggtgtgcgaggagatccccgacctgaagctggccatggagaactacgtgctgatcgactacgacaccaagagcttcgagagcatgcagagactgtgcgacaagtacaacagagccatcgacagcatccaccagctgtggaagggcaccacccagcccatgaagctgaacaccagacccagcaccggcctgctgagacacatcctgcagcaggtgtacaaccacagcgtgaccgaccccgagaagctgaacaactacgagcccttcagccccgaggtgtacggcgagaccagcttcgacctggtggcccagatgatcgacgagatcaagatgaccgacgacgacctgttcgtggacctgggcagcggcgtgggccaggtggtgctgcaggtggccgccgccaccaactgcaagcaccactacggcgtggagaaggccgacatccccgccaagtacgccgagaccatggacagagagttcagaaagtggatgaagtggtacggcaagaagcacgccgagtacaccctggagagaggcgacttcctgagcgaggagtggagagagagaatcgccaacaccagcgtgatcttcgtgaacaacttcgccttcggccccgaggtggaccaccagctgaaggagagattcgccaacatgaaggagggcggcagaatcgtgagcagcaagcccttcgcccccctgaacttcagaatcaacagcagaaacctgagcgacatcggcaccatcatgagagtggtggagctgagccccctgaagggcagcgtgagctggaccggcaagcccgtgagctactacctgcacaccatcgacagaaccatcctggagaactacttcagcagcctgaagaaccccaagctgagagaggagcaggaggccgccagaagaagacagcagagagagagcaagagcaacgccgccacccccaccaagggccccgagggcaaggtggccggccccgccgacgcccccatggacagcggcgccgaggaggagaaggccggcgccgccaccgtgaagaagcccagccccagcaaggccagaaagaagaagctgaacaagaagggcagaaagatggccggcagaaagagaggcagacccaagaagatgaacaccgccaaccccgagagaaagcccaagaagaaccagaccgccctggacgccctgcacgcccagaccgtgagccagaccgccgccagcagcccccaggacgcctacagaagcccccacagccccttctaccagctgccccccagcgtgcagagacacagccccaaccccctgctggtggcccccaccccccccgccctgcagaagctgctggagagcttcaagatccagtacctgcagttcctggcctacaccaagaccccccagtacaaggccagcctgcaggagctgctgggccaggagaaggagaagaacgcccagctgctgggcgccgcccagcagctgctgagccactgccaggcccagaaggaggagatcagaagactgttccagcagaagctggacgagctgggcgtgaaggccctgacctacaacgacctgatccaggcccagaaggagatcagcgcccacaaccagcagctgagagagcagagcgagcagctggagcaggacaacagagccctgagaggccagagcctgcagctgctgaaggccagatgcgaggagctgcagctggactgggccaccctgagcctggagaagctgctgaaggagaagcaggccctgaagagccagatcagcgagaagcagagacactgcctggagctgcagatcagcatcgtggagctggagaagagccagagacagcaggagctgctgcagctgaagagctgcgtgccccccgacgacgccctgagcctgcacctgagaggcaagggcgccctgggcagagagctggagcccgacgccagcagactgcacctggagctggactgcaccaagttcagcctgccccacctgagcagcatgagccccgagctgagcatgaacggccaggccgccggctacgagctgtgcggcgtgctgagcagacccagcagcaagcagaacaccccccagtacctggccagccccctggaccaggaggtggtgccctgcacccccagccacgtgggcagacccagactggagaagctgagcggcctggccgcccccgactacaccagactgagccccgccaagatcgtgctgagaagacacctgagccaggaccacaccgtgcccggcagacccgccgccagcgagctgcacagcagagccgagcacaccaaggagaacggcctgccctaccagagccccagcgtgcccggcagcatgaagctgagcccccaggaccccagacccctgagccccggcgccctgcagctggccggcgagaagagcagcgagaagggcctgagagagagagcctacggcagcagcggcgagctgatcaccagcctgcccatcagcatccccctgagcaccgtgcagcccaacaagctgcccgtgagcatccccctggccagcgtggtgctgcccagcagagccgagagagccagaagcacccccagccccgtgctgcagcccagagaccccagcagcaccctggagaagcagatcggcgccaacgcccacggcgccggcagcagaagcctggccctggcccccgccggcttcagctacgccggcagcgtggccatcagcggcgccctggccggcagccccgccagcctgacccccggcgccgagcccgccaccctggacgagagcagcagcagcggcagcctgttcgccaccgtgggcagcagaagcagcaccccccagcaccccctgctgctggcccagcccagaaacagcctgcccgccagccccgcccaccagctgagcagcagccccagactgggcggcgccgcccagggccccctgcccgaggccagcaagggcgacctgcccagcgacagcggcttcagcgaccccgagagcgaggccaagagaagaatcgtgttcaccatcaccaccggcgccggcagcgccaagcagagccccagcagcaagcacagccccctgaccgccagcgccagaggcgactgcgtgcccagccacggccaggacagcagaagaagaggcagaagaaagagagccagcgccggcacccccagcctgagcgccggcgtgagccccaagagaagagccctgcccagcgtggccggcctgttcacccagcccagcggcagccccctgaacctgaacagcatggtgagcaacatcaaccagcccctggagatcaccgccatcagcagccccgagaccagcctgaagagcagccccgtgccctaccaggaccacgaccagccccccgtgctgaagaaggagagacccctgagccagaccaacggcgcccactacagccccctgaccagcgacgaggagcccggcagcgaggacgagcccagcagcgccagaatcgagagaaagatcgccaccatcagcctggagagcaagagcccccccaagaccctggagaacggcggcggcctggccggcagaaagcccgcccccgccggcgagcccgtgaacagcagcaagtggaagagcaccttcagccccatcagcgacatcggcctggccaagagcgccgacagccccctgcaggccagcagcgccctgagccagaacagcctgttcaccttcagacccgccctggaggagcccagcgccgacgccaagctggccgcccaccccagaaagggcttccccggcagcctgagcggcgccgacggcctgagccccggcaccaaccccgccaacggctgcaccttcggcggcggcctggccgccgacctgagcctgcacagcttcagcgacggcgccagcctgccccacaagggccccgaggccgccggcctgagcagccccctgagcttccccagccagagaggcaaggagggcagcgacgccaaccccttcctgagcaagagacagctggacggcctggccggcctgaagggcgagggcagcagaggcaaggaggccggcgagggcggcctgcccctgtgcggccccaccgacaagacccccctgctgagcggcaaggccgccaaggccagagacagagaggtggacctgaagaacggccacaacctgttcatcagcgccgccgccgtgccccccggcagcctgctgagcggccccggcctggcccccgccgccagcagcgccggcggcgccgccagcagcgcccagacccacagaagcttcctgggccccttcccccccggcccccagttcgccctgggccccatgagcctgcaggccaacctgggcagcgtggccggcagcagcgtgctgcagagcctgttcagcagcgtgcccgccgccgccggcctggtgcacgtgagcagcgccgccaccagactgaccaacagccacgccatgggcagcttcagcggcgtggccggcggcaccgtgggcgccggcggcgtgttcaaccacgccgtgcccagcgccagcgcccaccccttcggcgccagagtgggcagaggcgccgcctgcggcagcgccaccctgggccccagccccctgcaggccgccgccagcgccagcgccagcagcttccaggcccccgccagcgtggagaccagacccccccccccccccccccccccccccccccccctgcccccccccgcccacctgggcagaagccccgccggcccccccgtgctgcacgccccccccccccccaacgccgccctgccccccccccccaccctgctggccagcaaccccgagcccgccctgctgcagagcctggccagcctgccccccaaccaggccttcctgccccccaccagcgccgccagcctgccccccgccaacgccagcctgagcatcaagctgaccagcctgccccacaagggcgccagacccagcttcaccgtgcaccaccagcccctgcccagactggccctggcccaggccgcccccggcatcccccaggccagcgccaccggccccagcgccgtgtgggtgagcctgggcatgccccccccctacgccgcccacctgagcggcgtgaagcccagatag

SEQ ID NO: 276247 - protein, 184 aa, Artificial Sequence
  derived and/or modified sequence
MFLSPGEGPATEGGGLGPGEEAPKKKHRRNRTTFTTYQLHQLERAFEASHYPDVYSREELAAKVHLPEVRVQVWFQNRRAKWRRQERLESGSGAVAAPRLPEAPALPFARPPAMSLPLEPWLGPGPPAVPGLPRLLGPGPGLQASFGPHAFAPTFADGFALEEASLRLLAKEHAQALDRAWPPA

SEQ ID NO: 276248 - protein, 230 aa, Artificial Sequence
  derived and/or modified sequence
MPAPVEGTDFPGAGRQAWGSPALSLPVAPPAVSPPSVPLPSHQVGAMFLSPGEGPATEGGGLGPGEEAPKKKHRRNRTTFTTYQLHQLERAFEASHYPDVYSREELAAKVHLPEVRVQVWFQNRRAKWRRQERLESGSGAVAAPRLPEAPALPFARPPAMSLPLEPWLGPGPPAVPGLPRLLGPGPGLQASFGPHAFAPTFADGFALEEASLRLLAKEHAQALDRAWPPA

SEQ ID NO: 276249 - protein, 204 aa, Artificial Sequence
  derived and/or modified sequence
  misc_feature (1)..(1): Xaa can be any naturally occurring amino acid
XAGAGVPWKSTEGLPWAVGAMFLSPGEGPATEGGGLGPGEEAPKKKHRRNRTTFTTYQLHQLERAFEASHYPDVYSREELAAKVHLPEVRVQVWFQNRRAKWRRQERLESGSGAVAAPRLPEAPALPFARPPAMSLPLEPWLGPGPPAVPGLPRLLGPGPGLQASFGPHAFAPTFADGFALEEASLRLLAKEHAQALDRAWPPA

SEQ ID NO: 276250 - DNA, 522 bp, Artificial Sequence
  derived and/or modified sequence
atgatggcccagttatttctgttgcaagcaaatgccgtgctacctctcagccacgagataaaggtgaagcgtcaaatacgccttcccgctcctctttaccctcccgagaggaatgactcgaggagcttccagatccctcaggatctgagagaaaaggggtgggaggagggccagcagcatttcgcaggaaaggccgcagacgccttccctgccccagtccagttagaagggctagaagcgggacagactaccctggcttcccctgaagtcggtccatggaggccaaagcggttatctggggtatgcctattgtctgctttgcttccagacccatgcaagacaaatggaacgttcctcctgcagaaacaccaccttccttccctcttagccgtcatcctgttccctgtgattatcctaacaggggcatcttttgcacatctcttcgtggctcttttcgtgagccacctattgcttaagctcccccttggagctggaatgcgcatgcagcgcgacgccaggtag

SEQ ID NO: 276251 - DNA, 693 bp, Artificial Sequence
  derived and/or modified sequence
atgcctgcccccgtcgaagggactgattttcctggggctggtaggcaagcgtggggatctcccgctctcagcctgcccgtagctcccccagccgtatctccaccaagtgtgcctttgccttcacatcaggtgggcgcaatgtttttaagtcccggtgagggacctgcaaccgagggaggcggactggggcctggcgaggaggcgcccaaaaagaaacaccgcaggaatcgcacgacctttacgacataccagctgcaccagcttgaacgggcctttgaagcatctcattacccagacgtgtatagtagagaggagcttgctgccaaggttcacctccccgaggtgagggtgcaagtttggttccaaaacagacgggccaagtggcggcgccaggaacgcctggaatcaggaagcggcgctgtcgcggctcccagattgccagaagcaccggccttgccgttcgccaggcctcctgccatgagtctgccactggaaccatggttgggcccaggacccccagctgtacccggattgccaaggctcctcggacccggaccgggcttgcaggcctcgttcggacctcacgcttttgcccctacgttcgcggatggtttcgcactggaggaggccagtctgcgtttgctagccaaagagcacgcccaggcactggacagagcatggccgcctgcttag

SEQ ID NO: 276252 - DNA, 615 bp, Artificial Sequence
  derived and/or modified sequence
tgagctggcgcaggggtgccttggaaatcaaccgagggcctcccctgggccgttggcgccatgttcctgagtccaggggaggggccagccacagaagggggcggactcggacctggggaagaggcaccaaagaagaaacaccgtcggaaccgtaccacgtttactacataccagctgcatcagctggaacgggccttcgaggcttcccattatcctgatgtttattctcgagaagaactggctgcaaaggtgcacctgcctgaggtacgcgtgcaggtgtggttccaaaatcgccgagctaagtggcgccgccaagagcgcctggagtcaggtagtggggcagtggctgcccccaggttacccgaggcacctgctcttcccttcgcccgcccacccgccatgtctctgcccctggagccgtggctcggcccgggcccccctgctgtgcccggcctcccgcggctgctgggacccgggccgggattgcaggcctcctttggaccccatgcctttgcacccacctttgccgacggatttgctctggaggaagcgtctctgcgactgctggccaaggaacatgctcaggcattagaccgcgcctggcctcctgcttag

SEQ ID NO: 276253 - DNA, 693 bp, Artificial Sequence
  derived and/or modified sequence
atgcctgcccctgtggagggcacagacttccctggagctggccggcaggcctggggcagccctgccctgagcctgcctgtggcccctcctgctgtgagcccccccagcgtgcccctgcccagccaccaggtgggcgccatgttcctgagccctggagagggccctgccacagaaggaggcggcctgggccctggagaggaggcccccaagaagaagcacagaagaaacagaaccaccttcaccacctaccagctgcaccagctggagcgggcctttgaggccagccactacccagatgtgtacagccgggaggagctggccgccaaggtgcacctgcctgaggtgcgggtgcaggtgtggttccagaacagaagagccaagtggaggcggcaggagcggctggagagcggcagcggggctgtggccgccccccggctgcctgaggccccagccctgccctttgcccggcccccagccatgagcctgcccctggagccctggctgggccctggccccccagctgtgcccggcctgccccggctgctgggccctggccctggcctgcaggccagctttggcccccacgcctttgcccccacctttgctgatggctttgccctggaggaggccagcctgcggctgctggccaaggagcacgcccaggccctggaccgggcctggcccccagcctag

SEQ ID NO: 276254 - DNA, 615 bp, Artificial Sequence
  derived and/or modified sequence
tgagctggggccggcgtgccctggaagagcacagagggcctgccctgggccgtgggcgccatgttcctgagccctggagagggccctgccacagaaggaggcggcctgggccctggagaggaggcccccaagaagaagcacagaagaaacagaaccaccttcaccacctaccagctgcaccagctggagcgggcctttgaggccagccactacccagatgtgtacagccgggaggagctggccgccaaggtgcacctgcctgaggtgcgggtgcaggtgtggttccagaacagaagagccaagtggaggcggcaggagcggctggagagcggcagcggggctgtggccgccccccggctgcctgaggccccagccctgccctttgcccggcccccagccatgagcctgcccctggagccctggctgggccctggccccccagctgtgcccggcctgccccggctgctgggccctggccctggcctgcaggccagctttggcccccacgcctttgcccccacctttgctgatggctttgccctggaggaggccagcctgcggctgctggccaaggagcacgcccaggccctggaccgggcctggcccccagcctag

SEQ ID NO: 276255 - DNA, 2127 bp, Artificial Sequence
  derived and/or modified sequence
gcgccaggcccgctggggcaggtgtcccgtggaaatcgacggaggggctgccgtgggcggtgggagccatgttcctgagcccgggcgaggggccggcaaccgagggtgggggtctggggccgggcgaggaggcccccaagaagaagcaccggaggaaccgcaccaccttcaccacctaccagctgcaccagctggagcgggcgttcgaggcctctcactacccggatgtgtacagccgtgaggagctggcagccaaggtgcacctacctgaggtgcgcgtgcaggtgtggttccagaaccgccgggccaagtggcgccgccaggagcggctggagtcaggctcgggtgccgtggcagctccgagactccccgaggccccagcgctgccgttcgcccgccccccggccatgtcgctgcccctggagccctggttgggccccggaccgccggccgtgccaggcctcccccgcctcctgggcccgggcccggggctgcaagcgtccttcgggcctcatgcctttgctcccaccttcgcagatggcttcgccctggaggaggcgtccctgcggctgctggccaaggaacatgcacaggctctggacagggcctggccgccagcctgagcctgccgccctcccgggccccctcctcggcccaacccgagaaccggggacgtgccctggtgacagccaccacgccttggcctaggccgaggtcatggagcaaccgtggtcaggccaggccaccaccactggggagcgggaccagagagacaggctgctgggttccctgcccccatcccgtctcccaccccatcgccacccgtcctgctggcagcggactggcccccagtgtcaggcaggaggtgacccaagtattctcaggccaggtgcggggacctcctcccctcctggggcctcagtctcctgtctgttaattgggcgtgggggcctccgaggttcgagggctgcgaggctgtgggtggcgggaccgctgactctgtaagatgagtgtaaatctctctgcttctcctaatccccatcagcagagctgcccactctccaggctcccagtcccctggaaataacaaatagcagcagctcccgcgagcctggtctcctctcaccgtgtgctcgccatgtgagcactcccctctccgttgtgccctggacctcgggcacagctgtcagcccattctatagagagggaaaccggggcttaggcaggaagccaggtccccaaagtcgcacggccaggagtggatggagctgcctttcagacccatcaccggtcctaccgtccggggcacagcgacaggttctggagagagggtgggtcccgggccaggtgctggtgggcctccaggtggaggcgggctgatgctgggtgtgtcgtcatcgtcagaccgttcctcacgtccccacagaccccaggccctgtgcatgtccccagtggaggcatggccagcatctgctctgtccaacccagccgcatcgcccaagagctctgagcaaggaggctgtcgcggggccgagaacccgctgggactggcaagcacggctggcccagtgcagcaggagggggccctgaggcatgggatgggacagtctgggccagcgccacctcccgggacagaagtgcggcaccagggcaggagctgcagtagctaccctccccgtctccagcctgggctccccagatcactcccagatcaccaggtcaccccatctctaggcggcacctcacacaccagtcctgtggtccaacgccccgccatcacccaatgtcaccgcacaccaggcagtggggacacggcagtaagcacaagaaagatttttttttttaaagctaaaccaggccaggtgcggtggctcatgcctgtaatcccagtgctttgggaggctgaggtgggaggattgcttgagaccagcctgggtgacacagcaagaccccatctccacaaacgtttttaaaatgtgccgggtgtactggtgcacacctgtcatcccagctacccaagaagctgaggcaagaggatcacttgagcccagaaggtcgaggctgcagggagctgtgatcacactgctgcactccagcctgtgcaacagagccagaccctgactcaat

SEQ ID NO: 276256 - DNA, 2428 bp, Artificial Sequence
  derived and/or modified sequence
ccacagcagacgcagcgccaggcccgctggggcaggtgtcccgtggaaatcgacggaggggctgccgtgggcggccgtgacagtcacagagaggggaagagaaaacagggacggtgacacacacagagagaaggaagagcagacagaggcacagcaggagacccccccaagcccgaggaggacagcctggggatgcagagcgcatgccggccccagtggagggaaccgatttccccggagccgggaggcaagcctggggctcccctgccctgtccctgccggtagcccccccagccgtctccccaccatctgtcccgctgccgtcccaccaggtgggagccatgttcctgagcccgggcgaggggccggcaaccgagggtgggggtctggggccgggcgaggaggcccccaagaagaagcaccggaggaaccgcaccaccttcaccacctaccagctgcaccagctggagcgggcgttcgaggcctctcactacccggatgtgtacagccgtgaggagctggcagccaaggtgcacctacctgaggtgcgcgtgcaggtgtggttccagaaccgccgggccaagtggcgccgccaggagcggctggagtcaggctcgggtgccgtggcagctccgagactccccgaggccccagcgctgccgttcgcccgccccccggccatgtcgctgcccctggagccctggttgggccccggaccgccggccgtgccaggcctcccccgcctcctgggcccgggcccggggctgcaagcgtccttcgggcctcatgcctttgctcccaccttcgcagatggcttcgccctggaggaggcgtccctgcggctgctggccaaggaacatgcacaggctctggacagggcctggccgccagcctgagcctgccgccctcccgggccccctcctcggcccaacccgagaaccggggacgtgccctggtgacagccaccacgccttggcctaggccgaggtcatggagcaaccgtggtcaggccaggccaccaccactggggagcgggaccagagagacaggctgctgggttccctgcccccatcccgtctcccaccccatcgccacccgtcctgctggcagcggactggcccccagtgtcaggcaggaggtgacccaagtattctcaggccaggtgcggggacctcctcccctcctggggcctcagtctcctgtctgttaattgggcgtgggggcctccgaggttcgagggctgcgaggctgtgggtggcgggaccgctgactctgtaagatgagtgtaaatctctctgcttctcctaatccccatcagcagagctgcccactctccaggctcccagtcccctggaaataacaaatagcagcagctcccgcgagcctggtctcctctcaccgtgtgctcgccatgtgagcactcccctctccgttgtgccctggacctcgggcacagctgtcagcccattctatagagagggaaaccggggcttaggcaggaagccaggtccccaaagtcgcacggccaggagtggatggagctgcctttcagacccatcaccggtcctaccgtccggggcacagcgacaggttctggagagagggtgggtcccgggccaggtgctggtgggcctccaggtggaggcgggctgatgctgggtgtgtcgtcatcgtcagaccgttcctcacgtccccacagaccccaggccctgtgcatgtccccagtggaggcatggccagcatctgctctgtccaacccagccgcatcgcccaagagctctgagcaaggaggctgtcgcggggccgagaacccgctgggactggcaagcacggctggcccagtgcagcaggagggggccctgaggcatgggatgggacagtctgggccagcgccacctcccgggacagaagtgcggcaccagggcaggagctgcagtagctaccctccccgtctccagcctgggctccccagatcactcccagatcaccaggtcaccccatctctaggcggcacctcacacaccagtcctgtggtccaacgccccgccatcacccaatgtcaccgcacaccaggcagtggggacacggcagtaagcacaagaaagatttttttttttaaagctaaaccaggccaggtgcggtggctcatgcctgtaatcccagtgctttgggaggctgaggtgggaggattgcttgagaccagcctgggtgacacagcaagaccccatctccacaaacgtttttaaaatgtgccgggtgtactggtgcacacctgtcatcccagctacccaagaagctgaggcaagaggatcacttgagcccagaaggtcgaggctgcagggagctgtgatcacactgctgcactccagcctgtgcaacagagccagaccctgactcaatacaaataaaaaacaaatctaaaacaaaa

SEQ ID NO: 276257 - DNA, 2145 bp, Artificial Sequence
  derived and/or modified sequence
cgctggggcaggtgtcccgtggaaatcgacggaggggctgccgtgggcggtgggagccatgttcctgagcccgggcgaggggccggcaaccgagggtgggggtctggggccgggcgaggaggcccccaagaagaagcaccggaggaaccgcaccaccttcaccacctaccagctgcaccagctggagcgggcgttcgaggcctctcactacccggatgtgtacagccgtgaggagctggcagccaaggtgcacctacctgaggtgcgcgtgcaggtgtggttccagaaccgccgggccaagtggcgccgccaggagcggctggagtcaggctcgggtgccgtggcagctccgagactccccgaggccccagcgctgccgttcgcccgccccccggccatgtcgctgcccctggagccctggttgggccccggaccgccggccgtgccaggcctcccccgcctcctgggcccgggcccggggctgcaagcgtccttcgggcctcatgcctttgctcccaccttcgcagatggcttcgccctggaggaggcgtccctgcggctgctggccaaggaacatgcacaggctctggacagggcctggccgccagcctgagcctgccgccctcccgggccccctcctcggcccaacccgagaaccggggacgtgccctggtgacagccaccacgccttggcctaggccgaggtcatggagcaaccgtggtcaggccaggccaccaccactggggagcgggaccagagagacaggctgctgggttccctgcccccatcccgtctcccaccccatcgccacccgtcctgctggcagcggactggcccccagtgtcaggcaggaggtgacccaagtattctcaggccaggtgcggggacctcctcccctcctggggcctcagtctcctgtctgttaattgggcgtgggggcctccgaggttcgagggctgcgaggctgtgggtggcgggaccgctgactctgtaagatgagtgtaaatctctctgcttctcctaatccccatcagcagagctgcccactctccaggctcccagtcccctggaaataacaaatagcagcagctcccgcgagcctggtctcctctcaccgtgtgctcgccatgtgagcactcccctctccgttgtgccctggacctcgggcacagctgtcagcccattctatagagagggaaaccggggcttaggcaggaagccaggtccccaaagtcgcacggccaggagtggatggagctgcctttcagacccatcaccggtcctaccgtccggggcacagcgacaggttctggagagagggtgggtcccgggccaggtgctggtgggcctccaggtggaggcgggctgatgctgggtgtgtcgtcatcgtcagaccgttcctcacgtccccacagaccccaggccctgtgcatgtccccagtggaggcatggccagcatctgctctgtccaacccagccgcatcgcccaagagctctgagcaaggaggctgtcgcggggccgagaacccgctgggactggcaagcacggctggcccagtgcagcaggagggggccctgaggcatgggatgggacagtctgggccagcgccacctcccgggacagaagtgcggcaccagggcaggagctgcagtagctaccctccccgtctccagcctgggctccccagatcactcccagatcaccaggtcaccccatctctaggcggcacctcacacaccagtcctgtggtccaacgccccgccatcacccaatgtcaccgcacaccaggcagtggggacacggcagtaagcacaagaaagatttttttttttaaagctaaaccaggccaggtgcggtggctcatgcctgtaatcccagtgctttgggaggctgaggtgggaggattgcttgagaccagcctgggtgacacagcaagaccccatctccacaaacgtttttaaaatgtgccgggtgtactggtgcacacctgtcatcccagctacccaagaagctgaggcaagaggatcacttgagcccagaaggtcgaggctgcagggagctgtgatcacactgctgcactccagcctgtgcaacagagccagaccctgactcaatacaaataaaaaacaaatctaaaacaaaa

SEQ ID NO: 276258 - DNA, 693 bp, Artificial Sequence
  derived and/or modified sequence
atgcccgcccccgtggagggcaccgacttccccggcgccggccggcaggcatgggggtcaccagctctcagcctccccgtcgctcccccagctgtgtctccccctagcgtaccactgccttcacaccaggtgggagccatgttcctatcccctggggagggtcccgccacggaaggaggcggcctgggccctggggaagaggcacctaagaagaagcatcgccggaaccgcaccaccttcaccacctatcagctgcatcaactggaacgggcgttcgaggcgtcccactatcctgacgtgtatagccgggaagagctggccgccaaggtgcatcttcccgaagttcgtgtgcaagtgtggttccagaatcgtagagctaaatggcggcgccaggagcggctggaaagcgggagtggggcggtggcagctccacgtctgccagaagcgcccgccctgcccttcgccaggcctcccgccatgtccctgcccttggaaccatggctggggccaggaccgcctgccgttcccgggctgcccaggcttcttggccccggccccggactacaggcatctttcggcccacatgccttcgcccctaccttcgcagacggcttcgccttggaagaggcatctttacggctactcgctaaagagcatgcacaggccctggatagagcatggccacccgcctag

SEQ ID NO: 276259 - DNA, 615 bp, Artificial Sequence
  derived and/or modified sequence
tgagccggcgccggcgtgccctggaagagcaccgagggcctgccctgggcagtgggagccatgtttctgagccccggagagggtcctgcgacagaggggggcggactgggcccgggcgaggaggcaccaaagaaaaagcatagacggaaccggacgactttcaccacataccagctgcatcagctcgaaagagctttcgaggctagccactacccagatgtgtattccagggaggagctggctgccaaagtccacctgcccgaggtgcgagtgcaggtgtggtttcaaaaccggcgggcgaaatggaggaggcaggagagacttgagagcggaagcggcgccgtggcagctccccgcctgcctgaagctcctgccctgccgttcgcacggccacccgcaatgtctctccccctcgagccctggctgggacctggcccacccgcggtgccgggtctgccccgcctgctgggcccggggcccggcctgcaggcgtcattcggtccacacgcctttgctcccacattcgcagatggttttgccttagaggaggcctcgctgcggctactggccaaggaacacgcccaggctcttgatagggcttggccacctgcttag

SEQ ID NO: 276260 - DNA, 693 bp, Artificial Sequence
  derived and/or modified sequence
atgccagcaccagtggaaggcaccgactttcccggagccggaagacaagcctggggttctcctgcactcagcctccctgtcgcccctccagccgtgtcaccgcctagtgtcccactgccgtctcatcaggtcggcgctatgtttttgagtcctggagaaggtcccgcaacagagggcggaggactgggacctggcgaagaggcacccaaaaaaaaacataggagaaaccgtacaactttcacgacttatcaattgcaccaattggaaagagcgttcgaagcctcacattacccagacgtctactccagggaagagttggccgctaaggtacaccttccagaagtccgtgtgcaggtgtggttccagaatcggagagcaaagtggaggagacaagaacgattagagtctggctcaggggcagttgctgctccccgtctgcctgaggctcccgcactgccattcgccagaccccctgccatgagtctcccccttgaaccttggctgggcccaggaccgccagctgtcccagggctgccaagactgttggggccaggcccaggcctgcaggcttcttttgggcctcatgcctttgcccctaccttcgcggatggcttcgcactagaggaggcctcccttaggctcctggctaaggagcacgcccaggcactggacagggcatggccaccagcctag

SEQ ID NO: 276261 - DNA, 615 bp, Artificial Sequence
  derived and/or modified sequence
taggctggagccggtgttccgtggaaatcaaccgagggcctcccttgggccgtgggagccatgttcttgtcgcctggggaaggccctgcaaccgaggggggagggttgggccctggagaggaagcccctaaaaaaaaacatagacggaatagaaccaccttcacaacataccagctgcatcagctcgagagggcattcgaggcttcgcactaccctgacgtttattcgcgggaggagttggcagctaaagtccacctccccgaagtgcgggtgcaggtctggttccagaataggcgggctaagtggaggcgccaagaaagactggaaagtgggagtggtgctgttgccgctccccgtctgcctgaggcacctgccctaccatttgcacggccacctgcgatgtctcttcctcttgagccctggctgggccctgggccaccagccgtgccgggtctgccaagactgctgggtccaggaccgggacttcaagcatcattcggcccacatgccttcgccccaacgttcgccgacgggtttgccctcgaggaggcgtccttacgcttgctggctaaagagcatgctcaggcactggacagagcatggcctcccgcttag

SEQ ID NO: 276262 - DNA, 693 bp, Artificial Sequence
  derived and/or modified sequence
atgcccgcccccgtggagggcaccgacttccccggcgccggcagacaggcctggggcagccccgccctgagcctgcccgtggccccccccgccgtgagcccccccagcgtgcccctgcccagccaccaggtgggcgccatgttcctgagccccggcgagggccccgccaccgagggcggcggcctgggccccggcgaggaggcccccaagaagaagcacagaagaaacagaaccaccttcaccacctaccagctgcaccagctggagagagccttcgaggccagccactaccccgacgtgtacagcagagaggagctggccgccaaggtgcacctgcccgaggtgagagtgcaggtgtggttccagaacagaagagccaagtggagaagacaggagagactggagagcggcagcggcgccgtggccgcccccagactgcccgaggcccccgccctgcccttcgccagaccccccgccatgagcctgcccctggagccctggctgggccccggcccccccgccgtgcccggcctgcccagactgctgggccccggccccggcctgcaggccagcttcggcccccacgccttcgcccccaccttcgccgacggcttcgccctggaggaggccagcctgagactgctggccaaggagcacgcccaggccctggacagagcctggccccccgcctag

SEQ ID NO: 276263 - DNA, 615 bp, Artificial Sequence
  derived and/or modified sequence
tgagccggcgccggcgtgccctggaagagcaccgagggcctgccctgggccgtgggcgccatgttcctgagccccggcgagggccccgccaccgagggcggcggcctgggccccggcgaggaggcccccaagaagaagcacagaagaaacagaaccaccttcaccacctaccagctgcaccagctggagagagccttcgaggccagccactaccccgacgtgtacagcagagaggagctggccgccaaggtgcacctgcccgaggtgagagtgcaggtgtggttccagaacagaagagccaagtggagaagacaggagagactggagagcggcagcggcgccgtggccgcccccagactgcccgaggcccccgccctgcccttcgccagaccccccgccatgagcctgcccctggagccctggctgggccccggcccccccgccgtgcccggcctgcccagactgctgggccccggccccggcctgcaggccagcttcggcccccacgccttcgcccccaccttcgccgacggcttcgccctggaggaggccagcctgagactgctggccaaggagcacgcccaggccctggacagagcctggccccccgcctag

SEQ ID NO: 276264 - protein, 892 aa, Artificial Sequence
  derived and/or modified sequence
MRKVKKLRLDKENTGSWRSFSLNSEGAERMATTGTPTADRGDAAATDDPAARFQVQKHSWDGLRSIIHGSRKYSGLIVNKAPHDFQFVQKTDESGPHSHRLYYLGMPYGSRENSLLYSEIPKKVRKEALLLLSWKQMLDHFQATPHHGVYSREEELLRERKRLGVFGITSYDFHSESGLFLFQASNSLFHCRDGGKNGFMVSPMKPLEIKTQCSGPRMDPKICPADPAFFSFINNSDLWVANIETGEERRLTFCHQGLSNVLDDPKSAGVATFVIQEEFDRFTGYWWCPTASWEGSEGLKTLRILYEEVDESEVEVIHVPSPALEERKTDSYRYPRTGSKNPKIALKLAEFQTDSQGKIVSTQEKELVQPFSSLFPKVEYIARAGWTRDGKYAWAMFLDRPQQWLQLVLLPPALFIPSTENEEQRLASARAVPRNVQPYVVYEEVTNVWINVHDIFYPFPQSEGEDELCFLRANECKTGFCHLYKVTAVLKSQGYDWSEPFSPGEDEFKCPIKEEIALTSGEWEVLARHGSKIWVNEETKLVYFQGTKDTPLEHHLYVVSYEAAGEIVRLTTPGFSHSCSMSQNFDMFVSHYSSVSTPPCVHVYKLSGPDDDPLHKQPRFWASMMEAASCPPDYVPPEIFHFHTRSDVRLYGMIYKPHALQPGKKHPTVLFVYGGPQVQLVNNSFKGIKYLRLNTLASLGYAVVVIDGRGSCQRGLRFEGALKNQMGQVEIEDQVEGLQFVAEKYGFIDLSRVAIHGWSYGGFLSLMGLIHKPQVFKVAIAGAPVTVWMAYDTGYTERYMDVPENNQHGYEAGSVALHVEKLPNEPNRLLILHGFLDENVHFFHTNFLVSQLIRAGKPYQLQIYPNERHSIRCPESGEHYEVTLLHFLQEYL

SEQ ID NO: 276265 - protein, 971 aa, Artificial Sequence
  derived and/or modified sequence
LSRRVPCVRRGCRPPLPPLPGSQSRAWSRDREAPLDPGRPAQSGRRPTSRSVSHACSWNGGSLDPLEGTPALLRSAERLMRKVKKLRLDKENTGSWRSFSLNSEGAERMATTGTPTADRGDAAATDDPAARFQVQKHSWDGLRSIIHGSRKYSGLIVNKAPHDFQFVQKTDESGPHSHRLYYLGMPYGSRENSLLYSEIPKKVRKEALLLLSWKQMLDHFQATPHHGVYSREEELLRERKRLGVFGITSYDFHSESGLFLFQASNSLFHCRDGGKNGFMVSPMKPLEIKTQCSGPRMDPKICPADPAFFSFINNSDLWVANIETGEERRLTFCHQGLSNVLDDPKSAGVATFVIQEEFDRFTGYWWCPTASWEGSEGLKTLRILYEEVDESEVEVIHVPSPALEERKTDSYRYPRTGSKNPKIALKLAEFQTDSQGKIVSTQEKELVQPFSSLFPKVEYIARAGWTRDGKYAWAMFLDRPQQWLQLVLLPPALFIPSTENEEQRLASARAVPRNVQPYVVYEEVTNVWINVHDIFYPFPQSEGEDELCFLRANECKTGFCHLYKVTAVLKSQGYDWSEPFSPGEDEFKCPIKEEIALTSGEWEVLARHGSKIWVNEETKLVYFQGTKDTPLEHHLYVVSYEAAGEIVRLTTPGFSHSCSMSQNFDMFVSHYSSVSTPPCVHVYKLSGPDDDPLHKQPRFWASMMEAASCPPDYVPPEIFHFHTRSDVRLYGMIYKPHALQPGKKHPTVLFVYGGPQVQLVNNSFKGIKYLRLNTLASLGYAVVVIDGRGSCQRGLRFEGALKNQMGQVEIEDQVEGLQFVAEKYGFIDLSRVAIHGWSYGGFLSLMGLIHKPQVFKVAIAGAPVTVWMAYDTGYTERYMDVPENNQHGYEAGSVALHVEKLPNEPNRLLILHGFLDENVHFFHTNFLVSQLIRAGKPYQLQIYPNERHSIRCPESGEHYEVTLLHFLQEYL

SEQ ID NO: 276266 - protein, 833 aa, Artificial Sequence
  derived and/or modified sequence
LSRRVPCVRRGCRPPLPPLPGSQSRAWSRDREAPLDPGRPAQSGRRPTSRSVSHACSWNGGSLDPLEGTPALLRSAERLMRKVKKLRLDKENTGSWRSFSLNSEGAERITSYDFHSESGLFLFQASNSLFHCRDGGKNGFMVSPMKPLEIKTQCSGPRMDPKICPADPAFFSFINNSDLWVANIETGEERRLTFCHQGLSNVLDDPKSAGVATFVIQEEFDRFTGYWWCPTASWEGSEGLKTLRILYEEVDESEVEVIHVPSPALEERKTDSYRYPRTGSKNPKIALKLAEFQTDSQGKIVSTQEKELVQPFSSLFPKVEYIARAGWTRDGKYAWAMFLDRPQQWLQLVLLPPALFIPSTENEEQRLASARAVPRNVQPYVVYEEVTNVWINVHDIFYPFPQSEGEDELCFLRANECKTGFCHLYKVTAVLKSQGYDWSEPFSPGEDEFKCPIKEEIALTSGEWEVLARHGSKIWVNEETKLVYFQGTKDTPLEHHLYVVSYEAAGEIVRLTTPGFSHSCSMSQNFDMFVSHYSSVSTPPCVHVYKLSGPDDDPLHKQPRFWASMMEAASCPPDYVPPEIFHFHTRSDVRLYGMIYKPHALQPGKKHPTVLFVYGGPQVQLVNNSFKGIKYLRLNTLASLGYAVVVIDGRGSCQRGLRFEGALKNQMGQVEIEDQVEGLQFVAEKYGFIDLSRVAIHGWSYGGFLSLMGLIHKPQVFKVAIAGAPVTVWMAYDTGYTERYMDVPENNQHGYEAGSVALHVEKLPNEPNRLLILHGFLDENVHFFHTNFLVSQLIRAGKPYQLQIYPNERHSIRCPESGEHYEVTLLHFLQEYL

SEQ ID NO: 276267 - DNA, 2916 bp, Artificial Sequence
  derived and/or modified sequence
ctgagcagaagagtgccctgcgtgagaagaggctgcagaccccccctgccccccctgcccggcagccagagcagagcctggagcagagacagagaggcccccctggaccccggcagacccgcccagagcggcagaagacccaccagcagaagcgtgagccacgcctgcagctggaacggcggcagcctggaccccctggagggcacccccgccctgctgagaagcgccgagagactgatgagaaaggtgaagaagctgagactggacaaggagaacaccggcagctggagaagcttcagcctgaacagcgagggcgccgagagaatggccaccaccggcacccccaccgccgacagaggcgacgccgccgccaccgacgaccccgccgccagattccaggtgcagaagcacagctgggacggcctgagaagcatcatccacggcagcagaaagtacagcggcctgatcgtgaacaaggccccccacgacttccagttcgtgcagaagaccgacgagagcggcccccacagccacagactgtactacctgggcatgccctacggcagcagagagaacagcctgctgtacagcgagatccccaagaaggtgagaaaggaggccctgctgctgctgagctggaagcagatgctggaccacttccaggccaccccccaccacggcgtgtacagcagagaggaggagctgctgagagagagaaagagactgggcgtgttcggcatcaccagctacgacttccacagcgagagcggcctgttcctgttccaggccagcaacagcctgttccactgcagagacggcggcaagaacggcttcatggtgagccccatgaagcccctggagatcaagacccagtgcagcggccccagaatggaccccaagatctgccccgccgaccccgccttcttcagcttcatcaacaacagcgacctgtgggtggccaacatcgagaccggcgaggagagaagactgaccttctgccaccagggcctgagcaacgtgctggacgaccccaagagcgccggcgtggccaccttcgtgatccaggaggagttcgacagattcaccggctactggtggtgccccaccgccagctgggagggcagcgagggcctgaagaccctgagaatcctgtacgaggaggtggacgagagcgaggtggaggtgatccacgtgcccagccccgccctggaggagagaaagaccgacagctacagataccccagaaccggcagcaagaaccccaagatcgccctgaagctggccgagttccagaccgacagccagggcaagatcgtgagcacccaggagaaggagctggtgcagcccttcagcagcctgttccccaaggtggagtacatcgccagagccggctggaccagagacggcaagtacgcctgggccatgttcctggacagaccccagcagtggctgcagctggtgctgctgccccccgccctgttcatccccagcaccgagaacgaggagcagagactggccagcgccagagccgtgcccagaaacgtgcagccctacgtggtgtacgaggaggtgaccaacgtgtggatcaacgtgcacgacatcttctaccccttcccccagagcgagggcgaggacgagctgtgcttcctgagagccaacgagtgcaagaccggcttctgccacctgtacaaggtgaccgccgtgctgaagagccagggctacgactggagcgagcccttcagccccggcgaggacgagttcaagtgccccatcaaggaggagatcgccctgaccagcggcgagtgggaggtgctggccagacacggcagcaagatctgggtgaacgaggagaccaagctggtgtacttccagggcaccaaggacacccccctggagcaccacctgtacgtggtgagctacgaggccgccggcgagatcgtgagactgaccacccccggcttcagccacagctgcagcatgagccagaacttcgacatgttcgtgagccactacagcagcgtgagcacccccccctgcgtgcacgtgtacaagctgagcggccccgacgacgaccccctgcacaagcagcccagattctgggccagcatgatggaggccgccagctgcccccccgactacgtgccccccgagatcttccacttccacaccagaagcgacgtgagactgtacggcatgatctacaagccccacgccctgcagcccggcaagaagcaccccaccgtgctgttcgtgtacggcggcccccaggtgcagctggtgaacaacagcttcaagggcatcaagtacctgagactgaacaccctggccagcctgggctacgccgtggtggtgatcgacggcagaggcagctgccagagaggcctgagattcgagggcgccctgaagaaccagatgggccaggtggagatcgaggaccaggtggagggcctgcagttcgtggccgagaagtacggcttcatcgacctgagcagagtggccatccacggctggagctacggcggcttcctgagcctgatgggcctgatccacaagccccaggtgttcaaggtggccatcgccggcgcccccgtgaccgtgtggatggcctacgacaccggctacaccgagagatacatggacgtgcccgagaacaaccagcacggctacgaggccggcagcgtggccctgcacgtggagaagctgcccaacgagcccaacagactgctgatcctgcacggcttcctggacgagaacgtgcacttcttccacaccaacttcctggtgagccagctgatcagagccggcaagccctaccagctgcagatctaccccaacgagagacacagcatcagatgccccgagagcggcgagcactacgaggtgaccctgctgcacttcctgcaggagtacctgtag

SEQ ID NO: 276268 - DNA, 2679 bp, Artificial Sequence
  derived and/or modified sequence
atgcgcaaagttaaaaaactcagactggacaaagaaaatacaggaagttggcggagtttttctcttaattctgaaggtgctgagaggatggccaccaccggtactcccacagctgatcgcggggatgccgccgctactgacgacccagctgccagattccaagttcaaaagcactcctgggacggcctacgcagcataatacatggtagcaggaaatattcgggcctgatcgtcaataaggcgccgcacgacttccagttcgttcagaagactgatgagtccggaccccactctcaccgcctgtattacttgggtatgccatatggctcccgagagaattcactgctgtatagcgagatcccaaagaaagtgcggaaagaagccctgctgcttctttcttggaagcaaatgcttgaccatttccaagccactcctcatcacggggtgtattcccgggaggaggagctcttacgcgagcgcaaaagattgggtgtctttggcattacatcttacgattttcatagcgagtccggtctattcctattccaggcttccaactctttgttccattgccgagacggaggaaaaaatggattcatggtctctccgatgaagccacttgagattaagacgcagtgttccggcccgcggatggacccaaaaatctgtccggctgatccggcatttttttcctttattaataattctgacctctgggtcgccaatatcgaaactggtgaagagcgcagactaacattttgccatcagggcctgtcaaatgtgttagatgatccaaaatcagcgggcgttgctactttcgtcatacaggaggagttcgatcgctttaccggttactggtggtgtcccacagcatcctgggagggcagtgaggggctaaagacccttcggattctgtacgaggaggtcgatgagtccgaagtagaagtaatccatgttccatctccagccctggaggaacgcaagaccgacagctatcgttacccacgaaccggctctaagaatccaaaaattgctctgaaactcgccgagttccaaacagattctcagggcaagatcgtgagcacccaagaaaaggaactggtgcaaccatttagctccctattccccaaggtcgaatatattgccagggctgggtggactagggacggcaaatacgcctgggcgatgttcttggacagaccgcagcagtggcttcaattggtgttgcttccgccagccctattcatcccaagtactgaaaatgaggagcagaggcttgcatccgcacgggcagtgcctagaaatgtgcagccttacgtcgtatacgaggaagtgaccaacgtgtggattaacgtccacgatatattctatccatttcctcagtctgagggagaggatgagctgtgtttcctccgagctaatgagtgcaaaaccggcttctgccacctgtataaggttactgcggtactgaaatcccaaggatacgattggtctgagccattctcacctggtgaggatgaatttaaatgccccatcaaggaagagattgcgttgacaagcggggagtgggaagtcctagccaggcacggaagcaaaatttgggtaaacgaagaaacaaagctggtgtattttcagggcactaaggatacaccactcgagcaccacctgtatgtcgtaagttacgaagctgcaggtgaaattgtgcgactaacaacaccaggattctctcattcgtgtagcatgagtcagaatttcgatatgttcgtttcacattatagcagcgttagtacacccccatgcgtgcacgtgtataaactgtcgggccctgacgatgaccctctgcacaaacagccgcgattctgggccagcatgatggaggccgccagttgtcctcctgactacgtccctccggagatattccactttcatacgcgcagtgacgtgcgtctgtatgggatgatttacaaaccccacgccctccagccgggcaagaagcaccctacagtactgttcgtgtacggcggtcctcaggtgcagctggtgaataacagcttcaagggcataaagtatctcagactgaacaccctcgcctctctgggatacgcagtggtagtgatagacggccgaggctcatgccagcggggacttagatttgaaggcgcactcaaaaaccagatgggacaagtcgagattgaagatcaggtggagggcctacagtttgtggccgagaagtatggctttatcgaccttagccgagtcgctatccatggctggagctacggtgggtttctgagtcttatgggtctgatccataagccccaggtatttaaagtagcaatagctggcgcgcccgtcacagtatggatggcttacgacaccggctacaccgaacgctacatggacgtgccagagaacaaccaacatggctacgaggctggatcggtggccctgcatgtcgagaagctgcctaatgagccaaaccgactgctaattctgcacgggttcctggacgagaacgtgcacttctttcatactaacttcctcgtgagtcagctgatccgggccggcaagccctaccaacttcagatctacccgaacgaaaggcactctattcggtgtcccgaatccggagaacactacgaagtaacactgttgcatttccttcaggagtacttgtag

SEQ ID NO: 276269 - DNA, 4295 bp, Artificial Sequence
  derived and/or modified sequence
aggccgccgcctgggtcgctcaacttccgggtcaaaggtgcctgagccggcgggtcccctgtgtccgccgcggctgtcgtcccccgctcccgccacttccggggtcgcagtcccgggcatggagccgcgaccgtgaggcgccgctggacccgggacgacctgcccagtccggccgccgccccacgtcccggtctgtgtcccacgcctgcagctggaatggaggctctctggaccctttagaaggcacccctgccctcctgaggtcagctgagcggttaatgcggaaggttaagaaactgcgcctggacaaggagaacaccggaagttggagaagcttctcgctgaattccgagggggctgagaggatggccaccaccgggaccccaacggccgaccgaggcgacgcagccgccacagatgacccggccgcccgcttccaggtgcagaagcactcgtgggacgggctccggagcatcatccacggcagccgcaagtactcgggcctcattgtcaacaaggcgccccacgacttccagtttgtgcagaagacggatgagtctgggccccactcccaccgcctctactacctgggaatgccatatggcagccgagagaactccctcctctactctgagattcccaagaaggtccggaaagaggctctgctgctcctgtcctggaagcagatgctggatcatttccaggccacgccccaccatggggtctactctcgggaggaggagctgctgagggagcggaaacgcctgggggtcttcggcatcacctcctacgacttccacagcgagagtggcctcttcctcttccaggccagcaacagcctcttccactgccgcgacggcggcaagaacggcttcatggtgtcccctatgaaaccgctggaaatcaagacccagtgctcagggccccggatggaccccaaaatctgccctgccgaccctgccttcttctccttcatcaataacagcgacctgtgggtggccaacatcgagacaggcgaggagcggcggctgaccttctgccaccaaggtttatccaatgtcctggatgaccccaagtctgcgggtgtggccaccttcgtcatacaggaagagttcgaccgcttcactgggtactggtggtgccccacagcctcctgggaaggttcagagggcctcaagacgctgcgaatcctgtatgaggaagtcgatgagtccgaggtggaggtcattcacgtcccctctcctgcgctagaagaaaggaagacggactcgtatcggtaccccaggacaggcagcaagaatcccaagattgccttgaaactggctgagttccagactgacagccagggcaagatcgtctcgacccaggagaaggagctggtgcagcccttcagctcgctgttcccgaaggtggagtacatcgccagggccgggtggacccgggatggcaaatacgcctgggccatgttcctggaccggccccagcagtggctccagctcgtcctcctccccccggccctgttcatcccgagcacagagaatgaggagcagcggctagcctctgccagagctgtccccaggaatgtccagccgtatgtggtgtacgaggaggtcaccaacgtctggatcaatgttcatgacatcttctatcccttcccccaatcagagggagaggacgagctctgctttctccgcgccaatgaatgcaagaccggcttctgccatttgtacaaagtcaccgccgttttaaaatcccagggctacgattggagtgagcccttcagccccggggaagatgaatttaagtgccccattaaggaagagattgctctgaccagcggtgaatgggaggttttggcgaggcacggctccaagatctgggtcaatgaggagaccaagctggtgtacttccagggcaccaaggacacgccgctggagcaccacctctacgtggtcagctatgaggcggccggcgagatcgtacgcctcaccacgcccggcttctcccatagctgctccatgagccagaacttcgacatgttcgtcagccactacagcagcgtgagcacgccgccctgcgtgcacgtctacaagctgagcggccccgacgacgaccccctgcacaagcagccccgcttctgggctagcatgatggaggcagccagctgccccccggattatgttcctccagagatcttccatttccacacgcgctcggatgtgcggctctacggcatgatctacaagccccacgccttgcagccagggaagaagcaccccaccgtcctctttgtatatggaggcccccaggtgcagctggtgaataactccttcaaaggcatcaagtacttgcggctcaacacactggcctccctgggctacgccgtggttgtgattgacggcaggggctcctgtcagcgagggcttcggttcgaaggggccctgaaaaaccaaatgggccaggtggagatcgaggaccaggtggagggcctgcagttcgtggccgagaagtatggcttcatcgacctgagccgagttgccatccatggctggtcctacgggggcttcctctcgctcatggggctaatccacaagccccaggtgttcaaggtggccatcgcgggtgccccggtcaccgtctggatggcctacgacacagggtacactgagcgctacatggacgtccctgagaacaaccagcacggctatgaggcgggttccgtggccctgcacgtggagaagctgcccaatgagcccaaccgcttgcttatcctccacggcttcctggacgaaaacgtgcactttttccacacaaacttcctcgtctcccaactgatccgagcagggaaaccttaccagctccagatctaccccaacgagagacacagtattcgctgccccgagtcgggcgagcactatgaagtcacgttgctgcactttctacaggaatacctctgagcctgcccaccgggagccgccacatcacagcacaagtggctgcagcctccgcggggaaccaggcgggagggactgagtggcccgcgggccccagtgaggcactttgtcccgcccagcgctggccagccccgaggagccgctgccttcaccgccccgacgccttttatccttttttaaacgctcttgggttttatgtccgctgcttcttggttgccgagacagagagatggtggtctcgggccagcccctcctctccccgccttctgggaggaggaggtcacacgctgatgggcactggagaggccagaagagactcagaggagcgggctgccttccgcctggggctccctgtgacctctcagtcccctggcccggccagccaccgtccccagcacccaagcatgcaattgcctgtcccccccggccagcctccccaacttgatgtttgtgttttgtttggggggatatttttcataattatttaaaagacaggccgggcgcggtggctcacgtctgtaatcccagcactttgggaggctgaggcgggcggatcacctgaggttgggagttcaagaccagcctggccaacatggggaaaccccgtctctactaaaaatacaaaaaattagccgggtgtggtggcgcgtgcctataatcccagctactcgggaggctgaggcaggagaatcgcttgaacccgggaggtggaggttgcggtgagccaagatcgcaccattgcactccagcctgggcaacaagagcgaaactctgtctcaaaataaataaaaaataaaagacagaaagcaaggggtgcctaaatctagacttggggtccacaccgggcagcggggttgcaacccagcacctggtaggctccatttcttcccaagcccgagcagagggtcatgcgggccccacaggagaagcggccagggcccgcggggggcaccacctgtggacagccctcctgtccccaagctttcaggcaggcactgaaacgcaccgaacttccacgctctgctggtcagtggcggctgtcccctccccagcccagccgcccagccacatgtgtctgcctgacccgtacacaccaggggttccggggttgggagctgaaccatccccacctcagggttatatttccctctccccttccctccccgccaagagctctgccaggggcgggcaaaaaaaaaagtaaaaagaaaagaaaaaaaaaaaaaagaaacaaaccacctctacatattatggaaagaaaatatttttgtcgattcttattcttttataattatgcgtggaagaagtagacacattaaacgattccagttggaaacatgt

SEQ ID NO: 276270 - DNA, 2916 bp, Artificial Sequence
  derived and/or modified sequence
ctgagccgccgggtgccatgcgtgcgacgcggctgtcgccccccccttcctcctctgccaggctcccagtcaagggcgtggtccagggacagagaagcaccgctggatcccgggagaccagcgcagagcggtcgacgtcccacatccagaagcgtttcccacgcctgctcatggaatggtggaagccttgaccctctggagggcacacccgcgctcctcaggtctgccgagcggctcatgaggaaggtcaaaaagctgaggctcgacaaagagaacaccggtagttggcgtagcttctctcttaatagcgagggtgccgaaaggatggcgaccaccggtacgccaaccgctgataggggcgacgccgccgctaccgacgaccccgctgccagatttcaagtgcagaagcattcctgggacggattgagatctatcattcatgggtccaggaagtactctggactgattgtcaataaagcgccacacgattttcagttcgtccaaaagaccgacgagagcggcccacactcacatcgtttatactacctcggcatgccatacgggtcacgtgaaaattctctcctgtattccgagatccccaaaaaggtgaggaaggaagccttgctcctgttgtcatggaaacagatgcttgaccacttccaggcaactccacaccacggagtctactctcgcgaagaagagctattgagggagcgaaaaaggcttggagtttttggcataacgtcatatgatttccacagtgagtccggccttttcctgttccaagccagtaattcactgttccactgtcgcgatggcggcaagaacgggtttatggtttctccaatgaagccgttagagataaaaacgcagtgcagcggaccacggatggaccccaagatttgtccagccgacccagccttcttttctttcatcaataactccgacctgtgggtggccaatatcgagactggagaggagcgacgtttgacattctgccatcaggggcttagtaatgtgctggacgaccctaaaagtgcaggcgtggctactttcgtcattcaagaggagtttgaccgcttcacaggatactggtggtgtcccaccgctagttgggaaggctccgagggcctgaagaccctgcggattttatatgaggaggtggatgagagtgaggttgaggtgatccacgtaccctcacccgccctcgaggagagaaagacagacagttaccggtacccacggaccggctctaaaaatccaaagatagccttgaagttggctgagttccagacagattcacagggcaaaattgtgtcaactcaagagaaagagctcgtgcagcccttcagctctctcttcccaaaagtggagtatatagccagggctgggtggacacgagacgggaagtatgcttgggctatgttcctggatagacctcagcaatggctgcagctggttctgttgccccctgccttgttcataccctcaactgaaaacgaggagcagaggctggcctccgcaagagccgttccaaggaatgtccagccctatgtggtgtatgaagaggttaccaatgtttggatcaacgttcatgacattttctatcctttcccccagagtgaaggcgaagatgagctgtgtttcctgagagctaacgagtgtaagactgggttttgccatctctataaagttacggctgtgctcaaatctcagggctacgattggtcggaaccctttagccccggagaagacgagttcaaatgtcccataaaagaagagatagcactgacaagcggcgagtgggaggtgctggcgcggcacggctcaaagatttgggtgaatgaggaaaccaaactggtatactttcagggaaccaaagatactcccctggaacaccacctctacgtggtcagctatgaagcagccggggagattgtgaggctgaccacccccggattctcccatagttgctccatgtctcagaatttcgacatgttcgtaagtcattacagttccgtgtcaacaccaccatgtgttcacgtgtacaagctgtcgggtcccgacgacgacccactgcacaagcagcctcggttctgggcctcgatgatggaagcagcgtcatgccctcctgactatgtgccgcctgaaatttttcatttccacaccagaagcgatgtgcgactgtacggaatgatctacaagccacatgcactccagccagggaaaaagcaccctacggttctgtttgtgtatggtggcccacaggttcaattggtcaataacagctttaaggggatcaaatatcttagattaaacacactagcatcccttggatacgccgtggtggtgatagacgggcgtggtagctgccaaagggggctgaggttcgagggtgccttaaagaaccagatgggtcaggtggaaatagaggatcaagtggaagggcttcagtttgtggctgagaaatatggctttatcgacttgagcagggtcgccatacatgggtggtcctatggtggttttctttccctgatgggattgattcataaaccacaggtgtttaaagtggcgatcgccggcgctcctgtgactgtatggatggcatacgatacaggttacaccgaacggtatatggatgtgcctgaaaacaaccaacacggctacgaggcagggtcagtcgcacttcacgtggagaaactgcccaacgaaccgaaccggttgttaatcttacatgggttcctggatgaaaatgtccacttttttcacactaactttcttgtttctcaactgataagagctggaaagccatatcagttacagatctaccctaacgaaagacatagcataaggtgccctgaatctggtgaacattacgaggtaaccctgctgcactttctccaggagtacttgtag

SEQ ID NO: 276271 - DNA, 2679 bp, Artificial Sequence
  derived and/or modified sequence
atgaggaaggtgaagaagctgcggctggacaaggagaacacaggctcctggaggagcttcagcctgaacagcgagggcgctgagaggatggccaccaccggcacccccacagctgacagaggagatgctgctgccacagatgatcctgctgcccgcttccaggtgcagaagcacagctgggatggcctgcggagcatcatccacggcagcaggaagtacagcggcctgattgtgaacaaggcccctcatgacttccagtttgtgcagaagacagatgagagcggcccccacagccaccggctgtactacctgggcatgccctacggcagccgggagaacagcctgctgtacagcgagatccccaagaaggtgaggaaggaggccctgctgctgctgtcctggaagcagatgctggaccacttccaggccaccccccaccacggcgtgtacagccgggaggaggagctgctgcgggagaggaagaggctgggcgtgtttggcatcaccagctatgacttccacagcgagagcggcctcttcctgttccaggccagcaacagcctcttccactgcagagatggcggcaagaatggcttcatggtgagccccatgaagcccctggagatcaagacccagtgcagcggccccaggatggaccccaagatctgcccagctgaccctgccttcttctccttcatcaacaacagcgacctgtgggtggccaacattgaaacaggagaggagcggcggctgaccttctgccaccagggcctgagcaatgtgctggatgaccccaagtctgctggggtggccacctttgtgatccaggaggagtttgaccgcttcaccggctactggtggtgccccacagcctcctgggagggcagcgagggcctgaagaccctgcgcatcctgtatgaggaggtggatgagagcgaggtggaggtgatccacgtgcccagccctgccctggaggagaggaagacagacagctaccgctaccccaggacaggcagcaagaaccccaagatcgccctgaagctggccgagttccagacagacagccagggcaagatcgtgtccacccaggagaaggagctggtgcagcccttcagcagcctcttccccaaggtggagtacatcgcccgggccggctggaccagagatggcaagtatgcctgggccatgttcctggaccggccccagcagtggctgcagctggtgctgctgcccccagccctcttcatccccagcacagaaaatgaggagcagaggctggccagcgcccgggctgtgcccagaaatgtgcagccctacgtggtgtatgaggaggtgaccaacgtgtggatcaacgtgcatgacatcttctaccccttcccccagagtgaaggagaagatgagctgtgcttcctgcgggccaatgaatgcaagacaggcttctgccacctgtacaaggtgacagctgtgctgaagagccagggctatgactggagcgagcccttcagccctggagaagatgagttcaagtgccccatcaaggaggagatcgccctgaccagcggggagtgggaggtgctggcccggcacggcagcaagatctgggtgaatgaggagaccaagctggtgtacttccagggcaccaaggacacccccctggagcaccacctgtatgtggtgtcctatgaagctgctggggagatcgtgcggctgaccaccccaggcttcagccacagctgcagcatgagccagaactttgacatgtttgtgagccactacagctctgtgtccaccccaccctgtgtgcacgtgtacaagctgagcggcccagatgatgaccccctgcacaagcagccccgcttctgggcctccatgatggaggccgccagctgccccccagactatgtgcccccagagatcttccacttccacaccaggagtgatgtgcggctgtatggcatgatctacaagccccacgccctgcagcccgggaagaagcaccccaccgtgctgtttgtgtatggaggcccccaggtgcagctggtgaacaacagcttcaagggcatcaagtacctgcggctgaacaccctggccagcctgggctatgctgtggtggtgattgatggccggggcagctgccagaggggcctgcgctttgagggcgccctgaagaaccagatgggccaggtggagattgaggaccaggtggagggcctgcagtttgtggccgagaagtatggcttcatcgacctgagccgggtggccatccacggctggagctatggaggcttcctgagcctgatgggcctcatccacaagccccaggtgttcaaggtggccatcgccggggcccctgtgacagtgtggatggcctatgacaccggctacacagagcgctacatggatgtgcctgagaacaaccagcacggctatgaggccggctctgtggccctgcacgtggagaagctgcccaatgagcccaaccggctgctgatcctgcacggcttcctggatgaaaatgtgcacttcttccacaccaacttcctggtgtcccagctgatccgggccggcaagccctaccagctgcagatctacccaaatgaaagacacagcatccgctgcccagagagcggggagcactatgaggtgaccctgctgcacttcctgcaggagtacctgtag

SEQ ID NO: 276272 - DNA, 2916 bp, Artificial Sequence
  derived and/or modified sequence
ctgagcagaagagtgccctgtgtgagaagaggctgccggccccccctgccccccctgcccggcagccagagccgggcctggagccgggaccgggaggcccccctggaccccggccggcctgcccagagcggcagaagacccaccagccgctctgtgagccacgcctgctcctggaatggaggcagcctggaccccctggagggcaccccagccctgctgcggtctgctgagcggctgatgaggaaggtgaagaagctgcggctggacaaggaaaatacaggctcctggaggagcttcagcctgaacagcgagggcgctgagaggatggccaccaccggcacccccacagctgacagaggagatgctgctgccacagatgatcctgctgcccgcttccaggtgcagaagcacagctgggatggcctgcggagcatcatccacggcagcaggaagtacagcggcctcatcgtgaacaaggcccctcatgacttccagtttgtgcagaagacagatgaaagtggcccccacagccaccggctgtactacctgggcatgccctacggcagccgggagaacagcctgctgtacagcgagatccccaagaaggtgaggaaggaggccctgctgctgctgtcctggaagcagatgctggaccacttccaggccaccccccaccacggcgtgtacagccgggaggaggagctgctgcgggagaggaagaggctgggcgtgtttggcatcaccagctatgacttccacagcgagagcggcctcttcctgttccaggccagcaacagcctcttccactgcagagatggcggcaagaatggcttcatggtgagccccatgaagcccctggagatcaagacccagtgcagcggccccaggatggaccccaagatctgcccagctgaccctgccttcttctccttcatcaacaacagcgacctgtgggtggccaacatcgagaccggggaggagcggcggctgaccttctgccaccagggcctgagcaatgtgctggatgaccccaagtctgctggggtggccaccttcgtcatccaggaggagtttgaccgcttcaccggctactggtggtgccccacagcctcctgggagggcagcgagggcctgaagaccctgcgcatcctgtatgaggaggtggatgaaagtgaggtggaggtgattcatgtgcccagccctgccctggaggagaggaagacagacagctaccgctaccccaggacaggcagcaagaaccccaagatcgccctgaagctggccgagttccagacagacagccagggcaagatcgtgtccacccaggagaaggagctggtgcagcccttcagcagcctcttccccaaggtggagtacatcgcccgggccggctggaccagagatggcaagtatgcctgggccatgttcctggaccggccccagcagtggctgcagctggtgctgctgcccccagccctcttcatccccagcacagaaaatgaggagcagaggctggccagcgcccgggctgtgcccagaaatgtgcagccctacgtggtgtatgaggaggtgaccaacgtgtggatcaacgtgcatgacatcttctaccccttcccccagagcgagggggaggatgagctgtgcttcctgcgggccaatgaatgcaagacaggcttctgccacctgtacaaggtgacagctgtgctgaagagccagggctatgactggagcgagcccttcagccctggagaagatgagttcaagtgccccatcaaggaggagatcgccctgaccagcggggagtgggaggtgctggcccggcacggcagcaagatctgggtgaatgaggagaccaagctggtgtacttccagggcaccaaggacacccccctggagcaccacctgtatgtggtgtcctatgaggccgccggggagatcgtgcggctgaccaccccaggcttcagccacagctgcagcatgagccagaactttgacatgtttgtgagccactacagctctgtgtccaccccaccctgtgtgcacgtgtacaagctgagcggcccagatgatgaccccctgcacaagcagccccgcttctgggcctccatgatggaggccgccagctgccccccagactatgtgcccccagagatcttccacttccacaccaggagtgatgtgcggctgtatggcatgatctacaagccccacgccctgcagcccgggaagaagcaccccaccgtgctgtttgtgtatggaggcccccaggtgcagctggtgaacaacagcttcaagggcatcaagtacctgcggctgaacaccctggccagcctgggctatgctgtggtggtgattgatggccggggcagctgccagaggggcctgcgctttgaaggagccctgaagaaccagatgggccaggtggagattgaggaccaggtggagggcctgcagtttgtggccgagaagtatggcttcatcgacctgagccgggtggccatccacggctggagctatggaggcttcctgagcctgatgggcctcatccacaagccccaggtgttcaaggtggccatcgccggggcccctgtgacagtgtggatggcctatgacaccggctacacagagcgctacatggatgtgcctgagaacaaccagcacggctatgaagctggctctgtggccctgcacgtggagaagctgcccaatgagcccaaccggctgctgatcctgcacggcttcctggatgaaaatgtgcacttcttccacaccaacttcctggtgtcccagctgatccgggccggcaagccctaccagctgcagatctacccaaatgaaagacacagcatccgctgcccagagagcggggagcactatgaggtgaccctgctgcacttcctgcaggagtacctgtag

SEQ ID NO: 276273 - DNA, 2679 bp, Artificial Sequence
  derived and/or modified sequence
atgcggaaggtgaagaagctgcggctggacaaggagaacaccggctcgtggcgcagttttagtctgaactcagaaggggctgagcgcatggccaccacaggaacaccgacagccgataggggggacgccgccgccaccgacgaccctgctgcgcgattccaggtgcagaagcacagctgggatgggttacgcagtataatccacggaagtagaaaatactcaggcctgattgttaacaaggctccccacgatttccaattcgtgcagaagacagacgaatctggcccacactcccaccgcctgtattatctagggatgccttatggatcccgggagaatagtttgctgtacagcgagattcctaaaaaggtgagaaaggaagcactgctcctcctctcttggaagcagatgctcgaccactttcaggctaccccccatcatggtgtgtactcacgagaagaggaactgctgcgggaacgcaagagactcggcgtatttggcattacgagctacgacttccatagtgaaagcggactgtttctctttcaggctagcaattccctctttcactgtcgggatggggggaagaatgggttcatggtgtctcccatgaagccactcgaaattaaaacccagtgcagtgggcctagaatggaccccaagatttgccctgccgaccctgcatttttcagctttattaacaactctgatttatgggtggccaatatagagactggcgaagagcggcgcctcactttttgccatcaaggactgtctaatgtgctggacgaccccaaaagcgctggagttgcgacatttgtgatccaggaggagttcgaccgcttcacgggttactggtggtgcccaaccgcttcctgggaaggtagcgagggcctcaaaaccttgcggattctgtacgaggaagtggatgagtccgaggttgaagtcatccacgtgcctagccccgctctcgaggagagaaagaccgattcctatcgttatccaaggacaggttcaaaaaaccccaaaatcgctttaaaactcgccgaattccagacggattctcagggtaagatagtgagtacgcaggaaaaagagctggtgcagccattttcaagtctgttccccaaagtggagtatatcgctcgagccggctggacgcgagacggaaagtacgcgtgggctatgttcctggacagaccacagcagtggctccagttggtgctactaccccctgctctttttattccatccaccgagaacgaggaacaaaggttggcatccgcccgagccgtgccccggaatgtgcagccttatgtggtatatgaagaggttactaatgtgtggatcaatgtccatgacatcttctacccctttccacaaagcgagggggaggatgagctatgctttctgagggctaacgagtgtaagacggggttctgtcatttatataaggtgaccgccgtcctgaagtcacagggttatgattggtctgagccattttcacccggcgaggatgagttcaagtgcccgataaaggaagagattgccctgacctcaggcgagtgggaagtgcttgcccgtcacggctcgaagatatgggtaaacgaggaaacaaaactggtctattttcagggcaccaaggatacaccactggagcaccatctgtacgtagttagctacgaggctgccggtgaaatagtcaggttgacaaccccaggcttttcccactcctgctccatgtcccagaattttgacatgttcgttagtcattactcaagcgtttcaacacctccttgtgtccatgtgtataagttgagcggaccagatgatgatccactccacaagcaacccaggttttgggcaagcatgatggaggcagcctcttgtccccctgactacgtcccgccagagatttttcattttcatacaagatctgacgtgcgcttgtacggaatgatttacaaaccacacgccctacagcctggcaagaaacaccccacggtcctgtttgtctacgggggaccacaggtgcagttggtaaataattccttcaagggcatcaagtacctccgccttaacaccttggcctcgttgggttacgcggttgtggtcatcgacggacgggggtcatgccagaggggcctgagatttgaaggcgctctcaagaatcagatggggcaagtagagatcgaggatcaggtggaggggctgcaattcgtggccgagaaatacggtttcattgatctctccagggtggccatccacggctggtcctacggagggtttcttagtctgatgggattaatccataagcctcaggtatttaaggttgccattgcgggcgcacctgtgaccgtgtggatggcgtacgacactggttacactgagaggtatatggatgtgcccgaaaataatcagcacggctacgaagccggctctgtcgccttacatgtggaaaaactgccaaatgagcccaacaggctgctcatccttcatggatttttagacgagaacgtgcatttcttccataccaacttcctggtctctcagctcatccgtgccggaaagccatatcagttgcaaatctatccaaacgagcgacactccatccgctgcccggaaagtggagaacactacgaagtgacactgctgcactttctgcaggagtatctttag

SEQ ID NO: 276274 - DNA, 2916 bp, Artificial Sequence
  derived and/or modified sequence
ctgagccggcgggtgccctgcgtgcggcggggctgccggcccccccttccccctctccccggctctcaaagtcgggcttggagccgcgatagggaggccccgctggaccccggccgacccgcgcagagcggacgcagaccaaccagccgatctgtgtcgcatgcttgcagttggaatggcggaagcctggacccactagaggggaccccagctctcttgcgctctgccgagcgtctgatgaggaaagttaaaaaattgcggctggacaaagagaatacggggtcttggcgctcatttagcctgaatagcgagggcgccgagcggatggccacaactggtacccctactgcggaccgcggcgacgctgcagcaacagatgaccccgccgcaagattccaagtccagaagcactcctgggacggtcttaggtctatcatccatgggtcacggaaatattccggtttgattgtgaataaggcccctcatgatttccagttcgttcagaagacggacgagagtggacctcactcgcaccgcctctattatctgggtatgccctacggatccagagagaactccctgctttacagtgagatccctaagaaggtgcggaaggaggccctgctcctgctctcctggaaacagatgctggaccattttcaggctactccccatcatggggtgtatagccgcgaggaagaactattacgagagcggaaaaggctaggggtattcggaattacaagctatgatttccacagtgaaagcggcttatttctcttccaggcctcaaacagtcttttccattgccgcgatggtggtaagaatggattcatggtgagcccaatgaaaccccttgagatcaaaacgcagtgctctggacctcgcatggatcctaagatctgcccagctgatcctgcctttttcagctttatcaacaattcggacttgtgggtggctaatatcgagaccggcgaagagcggaggctgacattctgtcaccaaggcttaagcaatgttctggatgaccccaagagcgctggcgtggcaacatttgtgattcaggaggaatttgacaggttcaccggctattggtggtgtccaacagcctcgtgggaaggcagcgagggactgaaaacattgagaatcctgtacgaggaagtggatgagagcgaggtggaggtgattcacgtcccttccccagctctcgaggagcggaaaaccgactcttatagatacccccggaccggttccaaaaatccaaagattgccctcaaacttgctgagttccagacagactcccagggcaagattgtctcaacccaggagaaagaactggttcaacctttcagctccctgttcccaaaggtggagtacattgccagggcaggatggacaagggacggcaagtacgcctgggcgatgttcctggatagaccccagcagtggctccagttggtgctgttacccccggcgctctttattccctccaccgaaaacgaggagcagaggcttgctagtgctcgcgccgtgcccaggaatgttcaaccctacgtagtttatgaggaggtgaccaacgtttggataaatgttcacgatattttttatcccttcccccaaagcgagggtgaggatgaactgtgttttctgagggctaacgaatgtaagactggcttttgtcatttgtataaggtgaccgccgtgctaaagtcacagggctacgactggtcagagccgtttagtccgggagaggatgagttcaagtgcccgataaaagaggaaatcgccctgaccagcggcgagtgggaggtcctggccaggcacgggtcaaaaatttgggtgaacgaggagaccaagttagtctactttcagggcaccaaagacactcctctggagcaccacctgtacgtcgtaagttacgaagccgctggggagattgtaaggctcactactccgggtttctcccatagctgttccatgtctcaaaattttgatatgtttgtatctcactattcttccgtgtctacacctccttgcgttcacgtctacaaactatccggacccgatgacgaccccctacataagcagcctcgcttctgggcaagcatgatggaggctgctagctgcccaccggattatgtgcctccagaaatattccactttcacacgcggtcagatgtaaggctctatggcatgatttataagcctcatgccctacagccgggcaagaaacatcctacagtcctgttcgtctacggaggcccccaggtgcagttggtgaataacagctttaaaggcattaagtacctgagactgaacacattagccagtctcggatacgctgtggtagtgatcgacggccgtgggtcctgccagcgcggactcagattcgagggcgcccttaagaaccagatgggccaggtggagattgaagatcaggttgaagggctgcagttcgtggcagaaaagtatggttttatcgacttgagcagggtggctatccacggttggtcatacggaggtttcctcagtctgatgggtctcatccacaagcctcaggttttcaaagttgcgatcgccggcgctcctgttaccgtgtggatggcctatgacacaggctacacagaacgctatatggatgtgccagagaataaccagcacgggtacgaggccggatccgtcgctctccacgtcgagaaactgcccaacgaaccaaatcggctgttaatccttcacggatttctagacgaaaatgtccacttctttcatacaaactttttggtatcgcagctgattagagcgggcaagccctatcaactgcagatttacccaaacgagcggcattctatccgatgtccagaaagtggcgagcactacgaggttaccttactccactttcttcaagagtatctctag

SEQ ID NO: 276275 - DNA, 2679 bp, Artificial Sequence
  derived and/or modified sequence
atgcgaaaggtgaagaaactgcgcctcgataaagaaaatactggatcctggcggtcgttttctctgaattccgagggggctgagcgcatggccacaactggcacacccaccgctgatagaggggatgcagccgctacggatgaccccgcagcaaggttccaagtgcagaagcatagctgggatggactacgttcaatcattcacggttcccgaaaatattctgggctcatcgtgaacaaggctcctcatgactttcaattcgttcagaagactgacgaaagtggaccacacagtcacaggttgtactaccttggaatgccgtatggctctcgagagaattctttactctacagtgagattcctaagaaggtgcgcaaggaggcactcctgctactatcctggaagcagatgttagatcactttcaagccacaccgcaccatggagtgtattcccgggaagaggagctgctccgcgagagaaagcgcctgggcgtgttcggcattacatcatacgattttcactctgagtcgggactgttcctcttccaggcctcgaatagcctgtttcattgtcgagacgggggaaaaaatggatttatggtaagtcccatgaaacccttggaaatcaaaacccagtgctcgggtcctcgcatggacccgaagatttgccccgcagacccagctttcttcagttttattaataactcagacctgtgggtcgctaatatagagacaggagaggagcgcaggctaaccttctgccaccaaggactgtcgaatgtcctggatgatcccaagtcagccggagtggcgactttcgtgatccaggaagagttcgatcgattcaccggatattggtggtgcccaaccgcctcatgggaaggtagtgaaggcctgaaaacactcagaatcctgtacgaggaagtggacgaaagcgaggtcgaagtcatccatgtccccagtcctgcgcttgaggagcgaaaaacagactcataccgttatcctaggactggatccaagaatcccaaaatcgcccttaaactcgctgaattccagactgattcacaaggtaagatcgtctctacgcaggaaaaagaactggtgcagcctttcagttccctattcccgaaagttgagtacatcgccagagccggatggacacgcgacggcaaatacgcatgggcgatgttcctcgaccgaccacagcagtggttacagttggtgttactgcctcctgctctgttcatcccgagcaccgagaatgaggagcagcgtctcgctagtgccagggcggtccctcgcaacgtccagccatacgtcgtgtatgaggaggtgacgaacgtttggatcaatgttcacgatatcttctatcctttcccacagtccgaaggcgaggacgagctatgctttttgcgtgcaaatgagtgtaaaaccggattttgtcacctctataaggttaccgccgtccttaaatctcagggttatgactggtcagaacccttttcccccggtgaagacgaatttaaatgtcctattaaggaggaaatcgccttaacatcaggagaatgggaggttctcgcccgacacggttccaagatatgggtcaatgaggaaacgaagttggtgtattttcagggcacaaaagacacaccactagaacaccacttgtatgtggtgagctacgaggcggcaggcgagatcgtgcgcctgacgactccaggatttagccactcctgtagcatgtcacagaactttgacatgttcgtatcccactatagtagtgtgtcaacccccccatgcgtacatgtctataagctctcgggcccagacgatgacccactccacaagcagcccagattctgggcctccatgatggaggctgcttcatgtccccctgattatgtgccgcctgaaatcttccactttcacacgaggtctgatgtcagactgtatggcatgatttacaagccacacgctctgcaaccaggaaagaaacatccgaccgtcctgttcgtctatggtggaccacaggtgcagcttgttaataacagttttaaggggataaagtacctgagactgaacacgctcgcctcattgggatatgcagtggtggtgattgatgggagaggaagttgccagcgtggcctcaggtttgagggtgctctcaagaatcagatgggccaagtcgagattgaggaccaggtggaaggcttgcagtttgtagcggagaaatacgggtttatcgatctttcccgggtggcgatccatggctggtcatatggtggctttctctcactcatgggtctcatccataaaccccaagtatttaaagtcgctatcgcgggagcccctgtgacggtttggatggcctacgatacgggatatactgagcgttacatggacgtgcccgagaataaccagcacgggtacgaagccggaagtgtagccctccatgttgaaaaactgcctaacgaacctaacaggctccttatcctgcacggtttcctggatgagaacgtacattttttccacactaactttctcgtgtcgcagcttatcagagccggaaaaccttatcaactgcaaatctacccgaacgagcgtcattctattcggtgtccggaaagcggagagcattatgaagtgacactgctgcactttctacaagaatacctctag

SEQ ID NO: 276276 - DNA, 2916 bp, Artificial Sequence
  derived and/or modified sequence
ctcagccggagagtaccctgtgtaaggaggggatgtcggcctcctctgcctcctctaccaggatctcagagtcgggcttggagcagagacagagaagcccctttagaccccggtaggccggctcagtctggacgtaggcccacttctcgcagcgtgtctcatgcttgcagctggaacgggggatcattagacccactggaaggaaccccagcccttttgaggtccgccgagcggctgatgcggaaagtgaagaaactgcgccttgataaggagaacacaggtagttggaggtcatttagtctgaatagcgaaggggcagagaggatggctaccaccgggacccccaccgctgacagaggggatgcagctgccacggacgacccggctgctcggttccaggtgcagaagcacagctgggacggacttaggtctatcatccatggcagtagaaagtatagcggactgatcgtgaacaaggccccacatgattttcaattcgtgcagaagacggacgagagcgggcctcactcccaccgactgtactacttaggcatgccctacgggtcacgcgagaatagtttgctctactcagagatacccaagaaggtgcgtaaagaagcactcctgctactgagttggaagcagatgctggaccacttccaggccacaccacaccatggcgtgtattcccgcgaggaggagctgctccgagagcgaaaacgcttaggcgtgttcggcatcacgagctatgatttccacagcgagagcggactgtttctgttccaggcctccaacagtcttttccactgtagagatggaggcaagaatgggtttatggtttcccccatgaaacctttggaaatcaaaacacagtgctccggacctagaatggacccaaagatctgcccggctgatcccgcttttttttcgttcatcaacaattccgacctgtgggttgccaatattgaaaccggggaggagaggaggctcacattctgtcaccagggcctgagtaacgtgctggatgacccaaagagcgctggagtggccacatttgtgatccaggaggagttcgacaggttcaccggttactggtggtgcccaacagcgtcttgggaggggtctgaaggactgaagacactcagaatcctgtacgaagaggtggatgaaagcgaagttgaggtcatccatgtcccgtcgcccgcacttgaggagcggaagaccgacagctacagatatccaagaacaggtagcaagaatcctaaaattgcactcaagcttgctgagttccagacagacagtcagggcaaaatcgtttcaacgcaggagaaagagctggtccagccatttagctcgctattccccaaggttgaatacattgccagggcgggatggacccgtgatggcaagtacgcttgggcaatgtttttagatcggcctcagcagtggctccagctcgtgctgctgccgccagctctgttcatcccgagtaccgagaacgaagagcagcgtcttgcctccgcacgcgctgttccccgtaacgtgcaaccatacgtggtgtatgaggaagtgacaaatgtgtggattaacgtccatgacattttctatccctttccgcagtcggagggtgaggacgagctctgcttcctgcgagccaacgagtgtaaaaccggcttctgtcacctgtacaaggtcacagccgtactcaaatctcaggggtatgattggagcgagcctttctcccccggagaagatgagtttaagtgcccgatcaaggaagagatcgctctgaccagcggagagtgggaagtgctcgcaagacacggcagcaagatctgggttaacgaagagaccaaattagtttacttccagggcaccaaggacacccccctcgaacatcacctctacgttgtttcttatgaagccgcaggtgaaattgtacgtctgacgacacctggatttagccacagttgcagcatgtcccaaaatttcgacatgttcgtctcacactattctagtgtctccacacccccttgcgtgcacgtatacaagctcagtggtcccgacgatgaccctctccataagcagcctaggttctgggcctccatgatggaggcagcatcgtgtccccctgactacgtccccccagaaatctttcacttccatacgcgaagcgacgtgcgtctgtacggcatgatatacaaacctcacgctctacagccaggcaagaaacatccaactgtgttgttcgtgtacgggggtccgcaagtgcagctggttaataatagcttcaagggaataaagtacctcaggcttaacacgcttgctagcctgggctacgctgtagtggtgatcgacggcagaggatcctgtcagcgaggcctccggttcgagggggcactgaagaaccaaatgggtcaggtggagattgaggatcaggtggagggcttgcagttcgtggctgaaaagtacgggtttattgaccttagccgggtggccattcatggatggtcctatggtgggttcctgtctctgatgggcctgattcacaaaccacaggttttcaaggtggccatcgccggagctccagtgaccgtctggatggcctatgatactgggtacacagaacggtatatggacgtccctgagaataaccaacatggatatgaggccggaagcgtcgcactgcacgtggagaagctcccaaacgaacctaacagactgctgatccttcatggctttctggacgaaaatgtgcacttttttcacacgaatttcctggtgtctcagttgattcgggctggaaaaccctaccaattgcagatatatccgaatgagagacattccattagatgccctgagtcaggcgagcactatgaggtgaccctgttgcattttttacaggagtacctgtag

SEQ ID NO: 276277 - DNA, 4267 bp, Artificial Sequence
  derived and/or modified sequence
caacttccgggtcaaaggtgcctgagccggcgggtcccctgtgtccgccgcggctgtcgtcccccgctcccgccacttccggggtcgcagtcccgggcatggagccgcgaccgtgaggcgccgctggacccgggacgacctgcccagtccggccgccgccccacgtcccggtctgtgtcccacgcctgcagctggaatggaggctctctggaccctttagaaggcacccctgccctcctgaggtcagctgagcggttaatgcggaaggttaagaaactgcgcctggacaaggagaacaccggaagttggagaagcttctcgctgaattccgagggggctgagaggatggccaccaccgggaccccaacggccgaccgaggcgacgcagccgccacagatgacccggccgcccgcttccaggtgcagaagcactcgtgggacgggctccggagcatcatccacggcagccgcaagtactcgggcctcattgtcaacaaggcgccccacgacttccagtttgtgcagaagacggatgagtctgggccccactcccaccgcctctactacctgggaatgccatatggcagccgagagaactccctcctctactctgagattcccaagaaggtccggaaagaggctctgctgctcctgtcctggaagcagatgctggatcatttccaggccacgccccaccatggggtctactctcgggaggaggagctgctgagggagcggaaacgcctgggggtcttcggcatcacctcctacgacttccacagcgagagtggcctcttcctcttccaggccagcaacagcctcttccactgccgcgacggcggcaagaacggcttcatggtgtcccctatgaaaccgctggaaatcaagacccagtgctcagggccccggatggaccccaaaatctgccctgccgaccctgccttcttctccttcatcaataacagcgacctgtgggtggccaacatcgagacaggcgaggagcggcggctgaccttctgccaccaaggtttatccaatgtcctggatgaccccaagtctgcgggtgtggccaccttcgtcatacaggaagagttcgaccgcttcactgggtactggtggtgccccacagcctcctgggaaggttcagagggcctcaagacgctgcgaatcctgtatgaggaagtcgatgagtccgaggtggaggtcattcacgtcccctctcctgcgctagaagaaaggaagacggactcgtatcggtaccccaggacaggcagcaagaatcccaagattgccttgaaactggctgagttccagactgacagccagggcaagatcgtctcgacccaggagaaggagctggtgcagcccttcagctcgctgttcccgaaggtggagtacatcgccagggccgggtggacccgggatggcaaatacgcctgggccatgttcctggaccggccccagcagtggctccagctcgtcctcctccccccggccctgttcatcccgagcacagagaatgaggagcagcggctagcctctgccagagctgtccccaggaatgtccagccgtatgtggtgtacgaggaggtcaccaacgtctggatcaatgttcatgacatcttctatcccttcccccaatcagagggagaggacgagctctgctttctccgcgccaatgaatgcaagaccggcttctgccatttgtacaaagtcaccgccgttttaaaatcccagggctacgattggagtgagcccttcagccccggggaagatgaatttaagtgccccattaaggaagagattgctctgaccagcggtgaatgggaggttttggcgaggcacggctccaagatctgggtcaatgaggagaccaagctggtgtacttccagggcaccaaggacacgccgctggagcaccacctctacgtggtcagctatgaggcggccggcgagatcgtacgcctcaccacgcccggcttctcccatagctgctccatgagccagaacttcgacatgttcgtcagccactacagcagcgtgagcacgccgccctgcgtgcacgtctacaagctgagcggccccgacgacgaccccctgcacaagcagccccgcttctgggctagcatgatggaggcagccagctgccccccggattatgttcctccagagatcttccatttccacacgcgctcggatgtgcggctctacggcatgatctacaagccccacgccttgcagccagggaagaagcaccccaccgtcctctttgtatatggaggcccccaggtgcagctggtgaataactccttcaaaggcatcaagtacttgcggctcaacacactggcctccctgggctacgccgtggttgtgattgacggcaggggctcctgtcagcgagggcttcggttcgaaggggccctgaaaaaccaaatgggccaggtggagatcgaggaccaggtggagggcctgcagttcgtggccgagaagtatggcttcatcgacctgagccgagttgccatccatggctggtcctacgggggcttcctctcgctcatggggctaatccacaagccccaggtgttcaaggtggccatcgcgggtgccccggtcaccgtctggatggcctacgacacagggtacactgagcgctacatggacgtccctgagaacaaccagcacggctatgaggcgggttccgtggccctgcacgtggagaagctgcccaatgagcccaaccgcttgcttatcctccacggcttcctggacgaaaacgtgcactttttccacacaaacttcctcgtctcccaactgatccgagcagggaaaccttaccagctccagatctaccccaacgagagacacagtattcgctgccccgagtcgggcgagcactatgaagtcacgttgctgcactttctacaggaatacctctgagcctgcccaccgggagccgccacatcacagcacaagtggctgcagcctccgcggggaaccaggcgggagggactgagtggcccgcgggccccagtgaggcactttgtcccgcccagcgctggccagccccgaggagccgctgccttcaccgccccgacgccttttatccttttttaaacgctcttgggttttatgtccgctgcttcttggttgccgagacagagagatggtggtctcgggccagcccctcctctccccgccttctgggaggaggaggtcacacgctgatgggcactggagaggccagaagagactcagaggagcgggctgccttccgcctggggctccctgtgacctctcagtcccctggcccggccagccaccgtccccagcacccaagcatgcaattgcctgtcccccccggccagcctccccaacttgatgtttgtgttttgtttggggggatatttttcataattatttaaaagacaggccgggcgcggtggctcacgtctgtaatcccagcactttgggaggctgaggcgggcggatcacctgaggttgggagttcaagaccagcctggccaacatggggaaaccccgtctctactaaaaatacaaaaaattagccgggtgtggtggcgcgtgcctataatcccagctactcgggaggctgaggcaggagaatcgcttgaacccgggaggtggaggttgcggtgagccaagatcgcaccattgcactccagcctgggcaacaagagcgaaactctgtctcaaaataaataaaaaataaaagacagaaagcaaggggtgcctaaatctagacttggggtccacaccgggcagcggggttgcaacccagcacctggtaggctccatttcttcccaagcccgagcagagggtcatgcgggccccacaggagaagcggccagggcccgcggggggcaccacctgtggacagccctcctgtccccaagctttcaggcaggcactgaaacgcaccgaacttccacgctctgctggtcagtggcggctgtcccctccccagcccagccgcccagccacatgtgtctgcctgacccgtacacaccaggggttccggggttgggagctgaaccatccccacctcagggttatatttccctctccccttccctccccgccaagagctctgccaggggcgggcaaaaaaaaaagtaaaaagaaaagaaaaaaaaaaaaaagaaacaaaccacctctacatattatggaaagaaaatatttttgtcgattcttattcttttataattatgcgtggaagaagtagacacattaaacgattccagttgg

SEQ ID NO: 276278 - DNA, 2679 bp, Artificial Sequence
  derived and/or modified sequence
atgagaaaggtgaagaagctgagactggacaaggagaacaccggcagctggagaagcttcagcctgaacagcgagggcgccgagagaatggccaccaccggcacccccaccgccgacagaggcgacgccgccgccaccgacgaccccgccgccagattccaggtgcagaagcacagctgggacggcctgagaagcatcatccacggcagcagaaagtacagcggcctgatcgtgaacaaggccccccacgacttccagttcgtgcagaagaccgacgagagcggcccccacagccacagactgtactacctgggcatgccctacggcagcagagagaacagcctgctgtacagcgagatccccaagaaggtgagaaaggaggccctgctgctgctgagctggaagcagatgctggaccacttccaggccaccccccaccacggcgtgtacagcagagaggaggagctgctgagagagagaaagagactgggcgtgttcggcatcaccagctacgacttccacagcgagagcggcctgttcctgttccaggccagcaacagcctgttccactgcagagacggcggcaagaacggcttcatggtgagccccatgaagcccctggagatcaagacccagtgcagcggccccagaatggaccccaagatctgccccgccgaccccgccttcttcagcttcatcaacaacagcgacctgtgggtggccaacatcgagaccggcgaggagagaagactgaccttctgccaccagggcctgagcaacgtgctggacgaccccaagagcgccggcgtggccaccttcgtgatccaggaggagttcgacagattcaccggctactggtggtgccccaccgccagctgggagggcagcgagggcctgaagaccctgagaatcctgtacgaggaggtggacgagagcgaggtggaggtgatccacgtgcccagccccgccctggaggagagaaagaccgacagctacagataccccagaaccggcagcaagaaccccaagatcgccctgaagctggccgagttccagaccgacagccagggcaagatcgtgagcacccaggagaaggagctggtgcagcccttcagcagcctgttccccaaggtggagtacatcgccagagccggctggaccagagacggcaagtacgcctgggccatgttcctggacagaccccagcagtggctgcagctggtgctgctgccccccgccctgttcatccccagcaccgagaacgaggagcagagactggccagcgccagagccgtgcccagaaacgtgcagccctacgtggtgtacgaggaggtgaccaacgtgtggatcaacgtgcacgacatcttctaccccttcccccagagcgagggcgaggacgagctgtgcttcctgagagccaacgagtgcaagaccggcttctgccacctgtacaaggtgaccgccgtgctgaagagccagggctacgactggagcgagcccttcagccccggcgaggacgagttcaagtgccccatcaaggaggagatcgccctgaccagcggcgagtgggaggtgctggccagacacggcagcaagatctgggtgaacgaggagaccaagctggtgtacttccagggcaccaaggacacccccctggagcaccacctgtacgtggtgagctacgaggccgccggcgagatcgtgagactgaccacccccggcttcagccacagctgcagcatgagccagaacttcgacatgttcgtgagccactacagcagcgtgagcacccccccctgcgtgcacgtgtacaagctgagcggccccgacgacgaccccctgcacaagcagcccagattctgggccagcatgatggaggccgccagctgcccccccgactacgtgccccccgagatcttccacttccacaccagaagcgacgtgagactgtacggcatgatctacaagccccacgccctgcagcccggcaagaagcaccccaccgtgctgttcgtgtacggcggcccccaggtgcagctggtgaacaacagcttcaagggcatcaagtacctgagactgaacaccctggccagcctgggctacgccgtggtggtgatcgacggcagaggcagctgccagagaggcctgagattcgagggcgccctgaagaaccagatgggccaggtggagatcgaggaccaggtggagggcctgcagttcgtggccgagaagtacggcttcatcgacctgagcagagtggccatccacggctggagctacggcggcttcctgagcctgatgggcctgatccacaagccccaggtgttcaaggtggccatcgccggcgcccccgtgaccgtgtggatggcctacgacaccggctacaccgagagatacatggacgtgcccgagaacaaccagcacggctacgaggccggcagcgtggccctgcacgtggagaagctgcccaacgagcccaacagactgctgatcctgcacggcttcctggacgagaacgtgcacttcttccacaccaacttcctggtgagccagctgatcagagccggcaagccctaccagctgcagatctaccccaacgagagacacagcatcagatgccccgagagcggcgagcactacgaggtgaccctgctgcacttcctgcaggagtacctgtag

SEQ ID NO: 276279 - protein, 408 aa, Artificial Sequence
  derived and/or modified sequence
MSEHVEPAAPGPGPNGGGGGPAPARGPRTPNLNPNPLINVRDRLFHALFFKMAVTYSRLFPPAFRRLFEFFVLLKALFVLFVLAYIHIVFSRSPINCLEHVRDKWPREGILRVEVRHNSSRAPVFLQFCDSGGRGSFPGLAVEPGSNLDMEDEEEEELTMEMFGNSSIKFELDIEPKVFKPPSSTEALNDSQEFPFPETPTKVWPQDEYIVEYSLEYGFLRLSQATRQRLSIPVMVVTLDPTRDQCFGDRFSRLLLDEFLGYDDILMSSVKGLAENEENKGFLRNVVSGEHYRFVSMWMARTSYLAAFAIMVIFTLSVSMLLRYSHHQIFVFIVDLLQMLEMNMAIAFPAAPLLTVILALVGMEAIMSEFFNDTTTAFYIILIVWLADQYDAICCHTSTSKRHWLRIP

SEQ ID NO: 276280 - protein, 120 aa, Artificial Sequence
  derived and/or modified sequence
MANPGLGLLLALGLPFLLARWGRAWGQIQTTSANENSTVLPSSTSSSSDGNLRPEAITAIIVVFSLLAALLLAVGLALLVRKLREKRQTEGTYRPSSEEQVGARVPPTPNLKLPPEERLI

SEQ ID NO: 276281 - DNA, 363 bp, Artificial Sequence
  derived and/or modified sequence
atggcaaatcccggtctcggccttctgctggccttaggactcccattcctactcgcgcgctggggcagagcatggggacagatccagacaacctccgccaacgaaaactccaccgtgttgccctctagcacctcaagctcatcagacggaaacctccggcctgaggccatcaccgccatcattgtggtgttctccctcctcgccgccttgcttctggcagttgggctggccctcctggtgcgaaaattacgagagaagaggcagacagagggcacgtaccggccttccagcgaggagcaagtaggggcacgcgttcctcccacccccaacctgaaattgccccctgaagagcgattgatctag

SEQ ID NO: 276282 - DNA, 363 bp, Artificial Sequence
  derived and/or modified sequence
atggctaatcccggactgggcctgctgctggcgttgggacttccatttctcttggcgcggtggggccgcgcgtggggtcagatacagacaacctccgcgaacgagaattctacagtactaccgagtagcacctcttccagctcggacgggaaccttcgtccggaggccatcacagctattatcgtggtgttcagcctgctcgctgcgctcctgttagccgttggcctcgccctgctggtccgcaagctgagggagaagcggcagactgaggggacatacaggccttcttccgaggaacaggttggcgctagagtcccacccacgccaaatttgaagctgcctcccgaagaacgcctgatttag

SEQ ID NO: 276283 - DNA, 363 bp, Artificial Sequence
  derived and/or modified sequence
atggccaaccctggcctgggcctgctgctggccctgggcctgcccttcctgctggcccgctggggccgggcctggggccagatccagaccaccagcgccaatgaaaacagcacagtgctgcccagcagcaccagcagcagcagtgatggcaacctgcggcctgaggccatcacagccatcatcgtggtgttcagcctgctggccgccctgctgctggccgtgggcctggccctgctggtgaggaagctgcgggagaagaggcagacagagggcacctaccggcccagcagcgaggagcaggtgggcgcccgggtgccccccacccccaacctgaagctgcccccagaggagcggctcatctag

SEQ ID NO: 276284 - DNA, 363 bp, Artificial Sequence
  derived and/or modified sequence
atggccaaccccggcctgggcctgctgctggccctgggcctgccctttttgctggccaggtggggacgcgcatgggggcagatccagaccacctccgccaatgaaaacagcacagtactgccttcatcaacgagctcgtcctccgacggaaacctgcgaccagaggctataaccgctataatcgtggtgttctctctcctggcggcactgttactggccgtaggtctggcgctgttggttagaaagctgcgtgaaaagagacagacagaagggacctaccggcctagttccgaggagcaggtaggggctagagtccctcctacaccaaatttaaagcttcctcccgaagagcggcttatctag

SEQ ID NO: 276285 - DNA, 363 bp, Artificial Sequence
  derived and/or modified sequence
atggccaaccccggcctgggcctgctgctggccctgggcctgccctttctgttggccagatgggggcgagcctggggacaaatccaaaccacctctgccaacgagaatagcaccgtcctgcccagcagcactagctcaagcagcgacgggaatttacgaccggaggccatcactgccattattgtggtttttagcctgcttgcagccctccttctcgccgtggggctggccctcctggtccgaaagctgagggaaaaacgccagaccgaaggtacgtaccggccttcttctgaagaacaggtgggtgccagagtgccgccaacacccaatctcaagcttccacctgaggaacgcctgatctag

SEQ ID NO: 276286 - DNA, 363 bp, Artificial Sequence
  derived and/or modified sequence
atggccaacccaggtctgggcctgcttttagctctaggactgccttttctgctggcgcgatgggggagagcctggggtcagatccaaaccacatcagcgaacgaaaattcaactgtgctgcctagctcaacttcaagctctagcgacgggaatctgaggccggaagcaatcacagctattattgtggtcttttcgttgcttgccgctcttcttctggcagtcgggctggccctgctggtgaggaagctacgagagaaaagacagacagagggaacctatcgtccgtcctcagaggagcaggtaggcgcaagagtccctcccacacccaatctgaaactcccacctgaggagcggctgatctag

SEQ ID NO: 276287 - DNA, 363 bp, Artificial Sequence
  derived and/or modified sequence
atggcgaatcctggcttgggactactgttggccctggggttgccttttctgctggccaggtggggcagggcctggggtcagattcagacaacaagcgccaacgaaaacagcaccgtgttgccaagctctaccagctcctccagcgatggcaacctccggccagaggctatcacagccattattgttgtatttagcttattggccgcactcctgctggctgtaggcctagccctcttagtgcgcaaactcagagagaaaagacaaaccgaaggaacataccggcctagcagtgaagaacaagtgggcgcacgcgtgcctcctaccccgaatctcaaattacctcctgaagaaaggctaatctag

SEQ ID NO: 276288 - DNA, 525 bp, Artificial Sequence
  derived and/or modified sequence
acggaccgagggttcgagggagggacacggaccaggaacctgagctaggtcaaagacgcccgggccaggtgccccgtcgcaggtgcccctggccggagatgcggtaggaggggcgagcgcgagaagccccttcctcggcgctgccaacccgccacccagcccatggcgaaccccgggctggggctgcttctggcgctgggcctgccgttcctgctggcccgctggggccgagcctgggggcaaatacagaccacttctgcaaatgagaatagcactgttttgccttcatccaccagctccagctccgatggcaacctgcgtccagaagccatcactgctatcatcgtggtcttctccctcttggctgccttgctcctggctgtggggctggcactgttggtgcggaagcttcgggagaagcggcagacggagggcacctaccggcccagtagcgaggagcaggtgggtgcccgcgtgccaccgacccccaacctcaagttgccgccggaagagcggctcatctga

SEQ ID NO: 276289 - DNA, 1078 bp, Artificial Sequence
  derived and/or modified sequence
accgacggaccgagggttcgagggagggacacggaccaggaacctgagctaggtcaaagacgcccgggccaggtgccccgtcgcaggtgcccctggccggagatgcggtaggaggggcgagcgcgagaagccccttcctcggcgctgccaacccgccacccagcccatggcgaaccccgggctggggctgcttctggcgctgggcctgccgttcctgctggcccgctggggccgagcctgggggcaaatacagaccacttctgcaaatgagaatagcactgttttgccttcatccaccagctccagctccgatggcaacctgcgtccagaagccatcactgctatcatcgtggtcttctccctcttggctgccttgctcctggctgtggggctggcactgttggtgcggaagcttcgggagaagcggcagacggagggcacctaccggcccagtagcgaggagcaggtgggtgcccgcgtgccaccgacccccaacctcaagttgccgccggaagagcggctcatctgaacgctggggcctgctgcagccaccaacactgcccaggactgcgggttgctggcttgtacaccgcagctgccaccgagacaccagcctctgatggctcaggaggacttgtggggagaggctgggggcacccatgtggtgggctctgtgcagcatgttgcctctgcttggctgtgcctgcagctcagggtgctggggctcgggacccacccccctgcttgcggaaccaacttttctctgtgtgtccagcaggccccacaaccccctctcctttctttcagttctcccatgcagccgaggcccgggcccctcaggactccaaggagacggtgcagggctgcctgcccatctaggtcccctctcctgcatctgtctcccttcattgctgtgtgaccttggggaaaggcagtgccctctctgggcagtcagatccacccagtgcttaatagcagggaagaaggtacttcaaagactctgcccctgaggtcaagagaggatggggctattcacttttatatatttatataaaattagtagtgagatgtaacaaaa

SEQ ID NO: 276290 - DNA, 363 bp, Artificial Sequence
  derived and/or modified sequence
atggccaaccccggcctgggcctgctgctggccctgggcctgcccttcctgctggccagatggggcagagcctggggccagatccagaccaccagcgccaacgagaacagcaccgtgctgcccagcagcaccagcagcagcagcgacggcaacctgagacccgaggccatcaccgccatcatcgtggtgttcagcctgctggccgccctgctgctggccgtgggcctggccctgctggtgagaaagctgagagagaagagacagaccgagggcacctacagacccagcagcgaggagcaggtgggcgccagagtgccccccacccccaacctgaagctgccccccgaggagagactgatctag

SEQ ID NO: 276291 - protein, 585 aa, Artificial Sequence
  derived and/or modified sequence
MAAAAAAVGPGAGGAGSAVPGGAGPCATVSVFPGARLLTIGDANGEIQRHAEQQALRLEVRAGPDSAGIALYSHEDVCVFKCSVSRETECSRVGKQSFIITLGCNSVLIQFATPNDFCSFYNILKTCRGHTLERSVFSERTEESSAVQYFQFYGYLSQQQNMMQDYVRTGTYQRAILQNHTDFKDKIVLDVGCGSGILSFFAAQAGARKIYAVEASTMAQHAEVLVKSNNLTDRIVVIPGKVEEVSLPEQVDIIISEPMGYMLFNERMLESYLHAKKYLKPSGNMFPTIGDVHLAPFTDEQLYMEQFTKANFWYQPSFHGVDLSALRGAAVDEYFRQPVVDTFDIRILMAKSVKYTVNFLEAKEGDLHRIEIPFKFHMLHSGLVHGLAFWFDVAFIGSIMTVWLSTAPTEPLTHWYQVRCLFQSPLFAKAGDTLSGTCLLIANKRQSYDISIVAQVDQTGSKSSNLLDLKNPFFRYTGTTPSPPPGSHYTSPSENMWNTGSTYNLSSGMAVAGMPTAYDLSSVIASGSSVGHNNLIPLGSSGAQGSGGGSTSAHYAVNSQFTMGGPAISMASPMSIPTNTMHYGS

SEQ ID NO: 276292 - DNA, 1758 bp, Artificial Sequence
  derived and/or modified sequence
atggccgccgccgccgccgccgtgggccccggcgccggcggcgccggcagcgccgtgcccggcggcgccggcccctgcgccaccgtgagcgtgttccccggcgccagactgctgaccatcggcgacgccaacggcgagatccagagacacgccgagcagcaggccctgagactggaggtgagagccggccccgacagcgccggcatcgccctgtacagccacgaggacgtgtgcgtgttcaagtgcagcgtgagcagagagaccgagtgcagcagagtgggcaagcagagcttcatcatcaccctgggctgcaacagcgtgctgatccagttcgccacccccaacgacttctgcagcttctacaacatcctgaagacctgcagaggccacaccctggagagaagcgtgttcagcgagagaaccgaggagagcagcgccgtgcagtacttccagttctacggctacctgagccagcagcagaacatgatgcaggactacgtgagaaccggcacctaccagagagccatcctgcagaaccacaccgacttcaaggacaagatcgtgctggacgtgggctgcggcagcggcatcctgagcttcttcgccgcccaggccggcgccagaaagatctacgccgtggaggccagcaccatggcccagcacgccgaggtgctggtgaagagcaacaacctgaccgacagaatcgtggtgatccccggcaaggtggaggaggtgagcctgcccgagcaggtggacatcatcatcagcgagcccatgggctacatgctgttcaacgagagaatgctggagagctacctgcacgccaagaagtacctgaagcccagcggcaacatgttccccaccatcggcgacgtgcacctggcccccttcaccgacgagcagctgtacatggagcagttcaccaaggccaacttctggtaccagcccagcttccacggcgtggacctgagcgccctgagaggcgccgccgtggacgagtacttcagacagcccgtggtggacaccttcgacatcagaatcctgatggccaagagcgtgaagtacaccgtgaacttcctggaggccaaggagggcgacctgcacagaatcgagatccccttcaagttccacatgctgcacagcggcctggtgcacggcctggccttctggttcgacgtggccttcatcggcagcatcatgaccgtgtggctgagcaccgcccccaccgagcccctgacccactggtaccaggtgagatgcctgttccagagccccctgttcgccaaggccggcgacaccctgagcggcacctgcctgctgatcgccaacaagagacagagctacgacatcagcatcgtggcccaggtggaccagaccggcagcaagagcagcaacctgctggacctgaagaaccccttcttcagatacaccggcaccacccccagccccccccccggcagccactacaccagccccagcgagaacatgtggaacaccggcagcacctacaacctgagcagcggcatggccgtggccggcatgcccaccgcctacgacctgagcagcgtgatcgccagcggcagcagcgtgggccacaacaacctgatccccctgggcagcagcggcgcccagggcagcggcggcggcagcaccagcgcccactacgccgtgaacagccagttcaccatgggcggccccgccatcagcatggccagccccatgagcatccccaccaacaccatgcactacggcagctag

SEQ ID NO: 276293 - DNA, 2899 bp, Artificial Sequence
  derived and/or modified sequence
ggcggtagcggcagcggcggcggcggcggcggcggcggcggcggcggcggcggcggcggcggcagcggcggcggcctgggcccgggcgcagcggcggcggcggcggggcctggagccggatctaagatggcagcggcggcggcggcggtggggccgggcgcgggcggcgcggggtcggcggtcccgggcggcgcggggccctgcgctaccgtgtcggtgttccccggcgcccgcctcctcaccatcggcgacgcgaacggcgagatccagcggcacgcggagcagcaggcgctgcgcctcgaggtgcgcgccggcccggactcggcgggcatcgccctctacagccatgaagatgtgtgtgtctttaagtgctcagtgtcccgagagacagagtgcagccgtgtgggcaagcagtccttcatcatcaccctgggctgcaacagcgtcctcatccagttcgccacacccaacgatttctgttccttctacaacatcctgaaaacctgccggggccacaccctggagcggtctgtgttcagcgagcggacggaggagtcttctgccgtgcagtacttccagttttatggctacctgtcccagcagcagaacatgatgcaggactacgtgcggacaggcacctaccagcgcgccatcctgcaaaaccacaccgacttcaaggacaagatcgttcttgatgttggctgtggctctgggatcctgtcgttttttgccgcccaagctggagcacggaaaatctacgcggtggaggccagcaccatggcccagcacgctgaggtcttggtgaagagtaacaacctgacggaccgcatcgtggtcatcccgggcaaggtggaggaggtgtcactccccgagcaggtggacatcatcatctcggagcccatgggctacatgctcttcaacgagcgcatgctggagagctacctccacgccaagaagtacctgaagcccagcggaaacatgtttcctaccattggtgacgtccaccttgcacccttcacggatgaacagctctacatggagcagttcaccaaggccaacttctggtaccagccatctttccatggagtggacctgtcggccctccgaggtgccgcggtggatgagtatttccggcagcctgtggtggacacatttgacatccggatcctgatggccaagtctgtcaagtacacggtgaacttcttagaagccaaagaaggagatttgcacaggatagaaatcccattcaaattccacatgctgcattcagggctggtccacggcctggctttctggtttgacgttgctttcatcggctccataatgaccgtgtggctgtccacagccccgacagagcccctgacccactggtaccaggtgcggtgcctgttccagtcaccactgttcgccaaggcaggggacacgctctcagggacatgtctgcttattgccaacaaaagacagagctacgacatcagtattgtggcccaggtggaccagaccggctccaagtccagtaacctcctggatctgaaaaaccccttctttagatacacgggcacaacgccctcacccccacccggctcccactacacatctccctcggaaaacatgtggaacacgggcagcacctacaacctcagcagcgggatggccgtggcagggatgccgaccgcctatgacttgagcagtgttattgccagtggctccagcgtgggccacaacaacctgattcctttagggtcctccggcgcccagggcagtggtggtggcagcacgagtgcccactatgcagtcaacagccagttcaccatgggcggccccgccatctccatggcgtcgcccatgtccatcccgaccaacaccatgcactacgggagctaggggcccgccccgcggactgacagcaccaggaaaccaaatgatgtccctgcccgccgcccccgccgggcggctttcccccttgtactggagaagctcgaacacccggtcacagctctctttgctatgggaactgggacacttttttacacgatgttgccgccgtccccaccctaacccccacctcccggccctgagcgtgtgtcgctgccatattttacacaaaatcatgttgtgggagccctcgtcccccctcctgcccgctctaccctgacctgggcttgtcatctgctggaacaggcgccatggggcctgccagccctgcctgccaggtcccttagcacctgtccccctgcctgtctccagtgggaaggtagcctggccaggcggggcctccccttcgacgaccaggcctcggtcacaacggacgtgacatgctgctttttttaattttatttttttatgaaaagaaccagtgtcaatccgcagaccctctgtgaagccaggccggccgggccgagccagcagcccctctccctagactcagaggcgccgcggggaggggtggccccgccgaggcttcaggggccccctccccaccaaagggttcacctcacacttgaatgtacaacccaccccactgtcgggaaggcctccgtcctcggcccctgcctcttgctgctgtcctgtccccgagcccctgcaggtccccccccgcccccccactcaagagttagagcaggtggctgcaggccttgggcccggagggaaggccactgccggccacttggggcagacacagacacctcaaggatctgtcacggaaggcgtcctttttccttgtagctaacgttaggcctgagtagctcccctccatccttgtagacgctccagtccctactactgtgacggcatttccatccctcccctgcccgggaagggaccttgcagggacctctccctccaaaaaaagaaaaaaagaaaaagaaagaaaaaataaatgaggaaacgtgttgca

SEQ ID NO: 276294 - DNA, 1758 bp, Artificial Sequence
  derived and/or modified sequence
atggctgcagctgctgccgcagtgggacccggagccggcggggccggctccgccgtccctggcggcgcaggcccatgcgcgaccgtatcggtgtttcccggtgctcgcctcctcacaataggcgatgccaacggtgagattcagaggcacgccgagcagcaagccctgcggctcgaagttagggccggacctgactcggccggcatagccttgtattctcatgaggatgtctgcgtgttcaagtgctctgttagccgcgagacggagtgctcaagggtggggaaacagtcattcatcataaccctgggctgtaatagcgtcctgattcagtttgccaccccaaatgacttttgctctttttacaacattctgaaaacctgccgcggacatacgctggagcgctctgtcttcagcgaacggaccgaggagtcctctgctgtccagtactttcagttttatggctaccttagccaacagcagaatatgatgcaggattacgtgcgcactggcacttaccaacgcgccatcctccaaaaccatactgatttcaaagataaaattgtgttggacgtgggctgtgggtcaggaatcctcagctttttcgccgcccaggccggcgctcggaagatttacgccgtagaagcatcgactatggcacagcacgctgaggtcctggtgaagtcaaacaacctaactgacagaattgtggtaattcctgggaaggttgaagaagtctcactcccagaacaagttgatatcattattagcgagcctatgggatacatgcttttcaatgaaagaatgctggagtcctatctacacgctaaaaaatatctcaaaccatccgggaacatgtttcccaccatcggggatgtgcatttggccccattcaccgacgagcagctgtacatggagcagttcacgaaagctaacttctggtaccaacctagttttcacggggtggatctgtccgcattaaggggggccgcagtggatgagtactttcgccagcccgttgtggacacctttgacataaggatcttgatggccaagagcgtgaagtataccgtgaacttcctagaggccaaggagggtgacctgcaccgcattgagattccatttaagtttcatatgctgcattccgggctggtgcacggactcgctttttggtttgatgtggcttttatcggatcaataatgacagtttggctgagtacggcccctactgaacctctgactcactggtaccaggttaggtgcctctttcagtcccccctctttgctaaagccggcgacaccctgtctgggacatgtctcctgattgctaataagcgacagtcctacgatatatcaatagtggcacaggtcgaccagaccggctctaaatcttccaacctcctcgacctgaaaaatccgtttttccggtacactggcacaacccccagtcctcctcccggaagccactatacctcacctagcgagaacatgtggaataccgggagcacatataatctgagctcaggcatggccgtagccgggatgcctaccgcctatgatttaagctccgtgatcgctagcggctcctctgtcggccataacaacctgatccccctcgggagctccggtgctcagggctcagggggaggcagtacgtcagcacattacgcagtcaacagtcagttcaccatggggggccccgctatttctatggcctctccgatgtcaatcccaaccaacacgatgcattacgggagctag

SEQ ID NO: 276295 - DNA, 1758 bp, Artificial Sequence
  derived and/or modified sequence
atggctgctgctgctgctgctgtgggccctggggccggcggggccggcagcgctgtgcctgggggcgccggcccctgtgccaccgtgtctgtgtttcctggggcccggctgctgaccatcggagatgccaacggggagatccagagacatgctgagcagcaggccctgcggctggaggtgcgggccggccctgacagcgctggcatcgccctgtacagccatgaagatgtgtgtgtgttcaagtgcagcgtgtcccgggagacagaatgttcccgggtgggcaagcagagcttcatcatcaccctgggctgcaacagcgtgctgatccagtttgccaccccaaatgacttctgcagcttctacaacatcctgaagacctgccggggccacaccctggagaggtctgtgttcagcgagaggacagaggagagcagcgctgtgcagtacttccagttctacggctacctgagccagcagcagaacatgatgcaggactatgtgaggacaggcacctaccagagggccatcctgcagaaccacacagacttcaaggacaagatcgtgctggatgtgggctgcggcagcggcatcctgtccttctttgctgcccaggccggggccaggaagatctatgctgtggaggccagcaccatggcccagcacgccgaggtgctggtgaagagcaacaacctgacagacagaattgtggtgattcctgggaaggtggaggaggtgtccctgcctgagcaggtggacatcatcatcagcgagcccatgggctacatgctgttcaatgaaagaatgctggagagctacctgcacgccaagaagtacctgaagcccagcggcaacatgttccccaccatcggagatgtgcacctggcccccttcacagatgagcagctgtacatggagcagttcaccaaggccaacttctggtaccagcccagcttccatggagtggacctgagcgccctgcggggagctgctgtggatgagtacttccggcagcctgtggtggacacctttgacatccgcatcctgatggccaagtctgtgaagtacacagtgaacttcctggaggccaaggagggggacctgcaccgcatcgagatccccttcaagttccacatgctgcacagcggcctggtgcacggcctggccttctggtttgatgtggccttcatcggcagcatcatgacagtgtggctgagcacagcccccacagagcccctgacccactggtaccaggtgcgctgcctcttccagagccccctgtttgccaaggccggggacaccctgagcggcacctgcctgctgattgccaacaagaggcagagctatgacatcagcatcgtggcccaggtggaccagacaggcagcaagagcagcaacctgctggacctgaagaaccccttcttccgctacacaggcaccacccccagccccccacctggcagccactacaccagccccagcgagaacatgtggaacacaggcagcacctacaacctgagcagcggcatggctgtggccggcatgcccacagcctatgacctgagcagcgtcatcgccagcggcagctctgtgggccacaacaacctgatccccctgggcagcagcggggcccagggcagcggcggcggcagcaccagcgcccactatgctgtgaacagccagttcaccatgggcggccctgccatctccatggccagccccatgagcatccccaccaacaccatgcactacggcagctag

SEQ ID NO: 276296 - DNA, 1758 bp, Artificial Sequence
  derived and/or modified sequence
atggccgccgccgccgccgccgtgggccccggcgccggcggcgccggaagcgccgtccctggaggagcaggcccttgcgctacagtgtctgtctttcctggggcaagactgctcactataggtgatgccaacggcgaaatccaacgacatgcggagcaacaggccctccgactggaagtgcgggcgggtcctgactctgcaggtatcgcgctatactctcatgaagatgtgtgcgtgttcaagtgctccgtgagtcgggaaacagagtgttcacgggtgggcaagcagtctttcattatcacactgggctgcaatagtgtacttatacaattcgcaactccgaacgatttctgcagcttttataatattctgaagacatgcagagggcacacattggaaaggtccgtctttagtgagaggaccgaagaaagttctgcagtacagtacttccagttttatggctatctctcacaacagcagaacatgatgcaggattatgttcgaactgggacctaccagagggccatattgcagaatcacaccgatttcaaagacaagatagtgctggacgttggctgtgggagcgggatcctgtcattcttcgcagcccaggccggggcccgcaaaatctacgctgtggaggcttcgacaatggcacagcacgccgaagtgctcgtgaagtctaataatctgactgacaggatagtagtcattccagggaaagtcgaggaggtgagcttgccagaacaagtcgacatcatcattagcgaacctatgggatatatgctgttcaacgaaaggatgctcgaatcctacttgcatgctaagaagtatctgaagccatcaggtaatatgttccctaccatcggggacgtgcatctcgcgccctttacagacgaacagttatatatggaacaattcactaaggccaatttttggtaccaacctagctttcacggagtcgacctgtcggcgctgagaggcgctgctgtagatgaatatttcaggcagcctgttgtggacacattcgatatacgaatactgatggccaagtccgtgaagtacaccgttaactttctcgaagcgaaggagggcgatctccataggatcgaaatcccatttaaattccatatgctgcactcaggcctagtccacggccttgccttttggttcgatgtggccttcatcgggtccattatgaccgtctggctctccaccgcacccaccgaacctctgactcactggtaccaggtcagatgcctgtttcagagccccctttttgctaaagccggagacacactgtccggaacatgtctcctgatcgccaataagaggcagtcttatgacataagcatagttgcacaagtggatcagacagggtctaaaagcagcaacctgttagatctcaagaaccccttttttcgctataccggaacaactccaagcccacctcccgggagtcactatacctccccctctgaaaatatgtggaacactggatcaacatacaatctctcctccggaatggctgtggccggaatgccaactgcctatgatctaagttccgtgatcgcgagcgggtcatccgtaggacacaacaacctgatacctctgggaagcagcggggcgcagggaagcggaggcggcagcacaagcgcccactacgcagttaactctcaattcaccatgggaggcccagccatcagcatggcttctcctatgtctatcccaaccaacactatgcactatggcagctag

SEQ ID NO: 276297 - DNA, 1758 bp, Artificial Sequence
  derived and/or modified sequence
atggccgctgcagcagctgccgtgggtcccggtgcagggggtgccggttcagctgtcccagggggtgctggtccctgtgctacagtgtccgtattccctggggcacgactgcttacaataggggatgctaacggagagatacagagacacgctgagcagcaggccctccgactcgaggtgcgggctggcccagattccgccggaatcgctctgtattcccacgaagatgtgtgcgtgttcaaatgcagcgtgagtcgggagactgagtgttctcgggtcgggaagcagagctttatcattaccctgggctgtaactccgttctgatacagttcgctacccctaatgatttctgcagcttctataacattttgaagacctgtcgtggacacaccctggagcgtagtgtgtttagcgagagaacggaggagtcatccgcagtgcagtatttccagttttacggatatctatctcaacagcagaatatgatgcaggattacgttcggactgggacttatcagagagccatactgcaaaatcataccgactttaaagacaagattgtgctggacgtcggatgtggaagcggcatccttagcttttttgcagcccaagccggagctcggaagatctatgctgtggaggcctccactatggcccagcacgccgaagtgttagtaaagtcgaataacctgacagacaggatagtggttattcctggcaaggtggaggaggtgagcctgccagagcaggtggacattattattagcgagcctatgggatatatgctgtttaatgagaggatgctcgagtcttacctgcacgcgaaaaagtatttaaagccctccggcaacatgtttcctactataggggacgtccacctggctcccttcactgatgaacagctgtatatggaacagtttactaaggctaacttctggtaccagcctagtttccacggtgtcgatttgagcgcacttcgtggcgctgcggtggatgaatattttcgccagcccgtggtagatacttttgatatacgaattctcatggccaagagcgtcaaatacaccgtgaactttctcgaggctaaagagggcgatttacatagaatcgagatcccatttaaattccacatgctgcactccggactggtgcacggtctggctttttggtttgatgtggcattcataggcagcataatgacggtgtggctcagcacggctccaactgagcccctgacccactggtaccaagtcagatgccttttccagagtcccctttttgccaaggctggcgatacactctcaggaacatgcctgttgattgcaaataagaggcagtcgtatgatattagcatcgtggcccaggtcgaccagactggttccaaatcctccaatcttctggacctgaagaaccccttcttccgatataccgggacaactccatccccccctcctgggtctcattacacttctccatctgaaaacatgtggaacaccgggtcaacctacaacctgtcatctggaatggcagtcgcaggcatgccaacagcttatgacctatcctcagtcattgctagcggcagctctgttggccacaacaacctgattcccctcggctcaagtggagctcaaggtagcggtggcggatctacgagcgcccattacgcggtgaactcccaattcactatggggggacctgctatcagtatggcctccccaatgtccattccaaccaacacaatgcattatggctcctag

SEQ ID NO: 276298 - protein, 527 aa, Artificial Sequence
  derived and/or modified sequence
MAQTLQMEIPNFGNSILECLNEQRLQGLYCDVSVVVKGHAFKAHRAVLAASSSYFRDLFNNSRSAVVELPAAVQPQSFQQILSFCYTGRLSMNVGDQFLLMYTAGFLQIQEIMEKGTEFFLKVSSPSCDSQGLHAEEAPSSEPQSPVAQTSGWPACSTPLPLVSRVKTEQQESDSVQCMPVAKRLWDSGQKEAGGGGNGSRKMAKFSTPDLAANRPHQPPPPQQAPVVAAAQPAVAAGAGQPAGGVAAAGGVVSGPSTSERTSPGTSSAYTSDSPGSYHNEEDEEEDGGEEGMDEQYRQICNMYTMYSMMNVGQTAEKVEALPEQVAPESRNRIRVRQDLASLPAELINQIGNRCHPKLYDEGDPSEKLELVTGTNVYITRAQLMNCHVSAGTRHKVLLRRLLASFFDRNTLANSCGTGIRSSTNDPRRKPLDSRVLHAVKYYCQNFAPNFKESEMNAIAADMCTNARRVVRKSWMPKVKVLKAEDDAYTTFISETGKIEPDMMGVEHGFETASHEGEAGPSAEALQ

SEQ ID NO: 276299 - DNA, 4556 bp, Artificial Sequence
  derived and/or modified sequence
tggccgccgcggctgccgctgctgctgaggcggaggccgcggaggccgcggaggcggaggccgaggccccggcgcagcggggcgcgccccgggcccaggcccggccccagccgccgctgcggagcccgccgggaccccccggagcgcggccacggcgcagccgctgccatggcccagacactgcagatggagatcccgaacttcggcaacagcatcctggagtgcctcaatgaacagcggctgcagggcctgtactgtgacgtgtcagtggtggtcaagggccatgccttcaaggcccaccgggccgtgcttgctgccagcagctcctacttccgggacctgttcaacaacagccgcagcgccgtggtggagctgccggcggctgtgcagccccagtctttccagcagatcctcagcttctgctacacgggccggctgagcatgaacgtgggcgaccagttcctgctcatgtacacggctggcttcctgcagatccaggagatcatggagaagggcaccgagttcttcctcaaggtgagctccccgagctgcgactcccagggcctgcatgcggaggaggccccatcgtcggagccccagagccccgtggcgcagacatcgggctggccagcctgtagcaccccgctgcccctcgtgtcgcgggtgaagacggagcagcaggagtcggactccgtgcagtgcatgcccgtggccaagcggctgtgggacagtggccagaaggaggctgggggcggcggcaatggcagccgcaagatggccaagttctccacgccggacctggctgccaaccggcctcaccagcccccgccaccccaacaggctccggtggtggcagcagcccagcccgccgtggctgcgggagcagggcagccagccggtggggtggcagcagcagggggtgtggtgagtgggcccagcacgtcggagcggaccagcccaggcacctcaagcgcctacaccagcgacagccctggctcctaccacaatgaggaggacgaggaggaggatggtggcgaggagggcatggatgagcagtaccggcagatctgcaacatgtacaccatgtacagcatgatgaacgtcggccagacagccgagaaggtggaggccctcccggagcaggtagcccccgagtcccgaaatcgcatccgggttcggcaagacctggcgtctctcccggctgaacttatcaaccagattgggaaccgctgccaccccaagctctacgacgagggcgacccctctgagaagctggagctggtgacaggcaccaacgtgtacatcacaagggcgcagctgatgaactgccacgtcagcgcaggcacgcggcacaaggtcctactgcggcggctcctggcctccttctttgaccggaacacgctggccaacagctgcggcaccggcatccgctcttctaccaacgatccccgtcggaagcccctggacagccgcgtgctccacgctgtcaagtactactgccagaacttcgcccccaacttcaaggagagcgagatgaatgccatcgcggccgacatgtgcaccaacgcccgccgcgtcgtgcgcaagagctggatgcccaaggtcaaggtgctcaaggctgaggatgacgcctacaccaccttcatcagtgaaacgggcaagatcgagccggacatgatgggtgtggagcatggcttcgagaccgccagccacgagggcgaggcgggtccctcggctgaagccctgcagtaacccgcccagcctcccgcggggccacacacttcccctcccaacacacacacacacctgccatcttggtcatgagctactgtctgtccctccccaggacccgcggtgggtgctgcatgttcccggccctctgcccctcctgtcctaccccctttccccaccgagagctgggccgggagaggaccgcagggcaggtggcgtgaggtccgtgttgccttctttaacacacactcgtgcagtgggggagttctggctccccaacctaacccctagccgtcatctccacactcaccaggcccaccaggggagggggctggcctgggggtcttgggaaggcccctccccaggccctaggccacctcgcggaagccttcagcctccgcccctcactgcagccccttgggacttgaggggggccccaggggttctcaggacccctcccaccacctcccagtgcttccacgtctccaaaagcgccttcctgtcaccctcgtctatccctgcgcctgggggctggggtaggcgaggccgtggggactacccattttatagctggggaaacaggctccgagaaattgcacaaccgacctcaggtggccggcagtggcgtgcctggtgccctttctcctcttccgcctctgttgctccctttggtcctctggggcctcagagaggcaggtcctaaaggagggggggtctcctgggggcagaccgagggtctcggaggatagaatgagaggtttccagggctggcagagtgtgtgcgtgtgtgtgtgcagaagttttgctttcaaacaaatgaagatacaagaggcagtaggacctgggttggaacccaggggagcagactggggggctgttgcccctccctccatctccccacacccaccccaccccacagcagggctcctggcccccacccccctgtacataatttttaaaacctttttttagcgaatgaaatattgaagtataagattccttttatttttcaaaccaatggggctgtgtctattgtccccctcggtccccaggggtggggggccttggaaggcagggcggtgttggggggctggggggcaggctgaatgtgtgtgtgtgggtgtgtatgtgtggagtgtgtgtgtgtgtttccatggtaggactccagtcccagctgctgcctaggctcctgtgggtcctgtgggtccccctcccctgttcaccttccccaacagggctatagtttaagggtgtcccaggccttggctggttggctgggcccagctcctgggggctgggcagggcagggcagggccgggtccacttccattgttagcagttgtttgcagaattttctcttttaccattcctctctttttgttctcgcccagagtgggtggttttttgttgttgttttagattttcatgtgaaggcagttttttttcttttttaactccccatccccctatgcagggtgtcatttcaccatccacatccacatccttgtttgtgtttctggccctcgtcctccctgcctctcatctgcctccccaacccccacctacccactgctcccaggggtctctccaggggcagggggattttaggagatggggtgggggccagcccctactggacccttgtaatctgatttggagaccatccccccgatgggaccagcagccccgccggcccactgggggtccctcttaacatctgcttgttgcgggggtcagtcatgagtgccagggtctggctggggtcttggcactgtcttcctggccggggcctgaaaccttagcccccagccggcctgagtgggggatattgacacccccagctaaagcacaagcaccttagtcacccctcctctccccccgcctcctggcctgccaccccaccccagcgtttaccccaaagcacaatgccctggtcacttggcaagcggctgggcctgacggaggccgaggggcagaccggggctccagccagacccctgaaaggaaggtgctcccccacttccaggccttagttggggtgggggggccagctcctgggcctggggtcttctcacccccacccccttgtcctgggtaggcccctgcctgcccctctctgccttttcctcgggtgtccctcctcgagcccctgtggcattggcttgggtggcagagcccacttgtttcagggaccccaggaggtgccccctggctcccaggactgtgtgtgggtccggggggtgggggggtggggagaagggtcgggcagggggtgcaggggaggaaactcctcaccaggagagccaaagacagggttgtgccttaccccaggagccacccctgtaccccccttgccctgccattcaccctccacccctacccctgggcggcctgctgctttttccttctcttcctcccctgccctgagctgcatggttcccccaccctgggcagccaggaaggaatctgaatggagaatcaccaaccaccagagaaaaaagactgtggggccctcccctgccaactccccttccctggccgcccactcaacccacacctctttcacgcaggacaggctgcccaccctgtccacgtgaagtgccaacgccctccccaccctgggccgagcccccacccctccctgggcccccaagtgagattgcacatttaactactgtaaggagaggagcggcgttggcaaatgtgaaccatgagaatatcagtgatactgatgagaataaactaaacgcctttgtaacaaaaaaaaaaaaaaaaaaaaaaaaaaaaaaaaaaaaaaaaaaaaaaaaaaaaaaaaaaaaaaaaaa

SEQ ID NO: 276300 - DNA, 1584 bp, Artificial Sequence
  derived and/or modified sequence
atggcccaaacactgcagatggagattcctaattttggcaacagcatcctggagtgcttgaacgaacaacggctacagggtttgtattgtgatgtaagtgtagttgtaaagggacatgccttcaaagctcaccgggcggtccttgccgcctcttcctcatatttcagggatctgtttaacaatagtcggagtgcggtggtggagctgccagcagccgtgcagccccagtctttccaacaaattctgtctttttgctacaccgggcgcttgtctatgaacgttggagatcagttccttctcatgtacactgctggattcctgcagatccaagaaatcatggagaaagggactgagttctttctaaaagtttcttccccctcgtgtgactcgcagggactgcatgccgaggaggcgccatcttctgagccacagagtcccgtggctcagacgtccggatggccagcttgttccacacctcttcctttggtttctcgggtaaagacagagcagcaagaaagtgatagcgtgcagtgcatgcccgttgctaaaagattgtgggacagtggtcagaaggaggccggaggcggaggaaacggcagtagaaaaatggccaaattctctacgcctgacctggccgctaaccggccccatcagcctccaccaccccagcaggcacccgtggttgccgcagcacaacctgctgtggccgctggggccggccaaccggccgggggagtggccgccgctgggggggtggtatcaggcccgtctacgtcagagagaacctccccaggaacatcgtcagcatatacaagcgattctcctggatcataccataacgaagaggacgaggaagaggatggaggtgaagagggcatggacgagcagtacaggcagatctgtaatatgtacactatgtactccatgatgaatgtaggccagaccgccgaaaaagttgaggccctgccagaacaggtggctccagaatctaggaatcgtatcagagtacgtcaggacctggcttcactgccagccgagctcatcaaccaaatcggcaatcgatgccatcctaagctttatgatgagggagatccatcagaaaagctcgaactcgtcactggcactaacgtctatataacgcgcgcgcagctgatgaattgtcacgtgtctgccgggacaaggcacaaggtactcctgcgtaggctgcttgccagttttttcgaccgtaacactctggctaacagttgtggcacggggattcgttcatcaacaaatgatcccaggaggaaacctttggactcccgtgtgttacatgccgtgaaatattactgccagaactttgcacctaactttaaggaatcagagatgaatgccattgcggcagacatgtgtactaacgctcggagggtcgtcagaaagagttggatgcccaaggtcaaagttctgaaggcagaggacgatgcttacaccacttttatatctgaaacaggaaaaatcgagcccgatatgatgggcgtggagcacgggttcgagactgctagccacgagggagaagctggccccagtgcagaggcacttcagtag

SEQ ID NO: 276301 - DNA, 1584 bp, Artificial Sequence
  derived and/or modified sequence
atggcccagaccctgcagatggagatccccaactttggaaacagcatcctggagtgcctgaatgagcagaggctgcagggcctgtactgtgatgtgtctgtggtggtgaagggccacgccttcaaggcccacagagctgtgctggccgccagcagcagctacttccgggacctcttcaacaacagccgctctgctgtggtggagctgcctgctgctgtgcagccccagagcttccagcagatcctgtccttctgctacacaggccgcctgtccatgaatgtgggggaccagttcctgctgatgtacacagctggcttcctgcagatccaggagatcatggagaagggcacagagttcttcctgaaggtgagcagccccagctgtgacagccagggcctgcatgctgaggaggcccccagcagcgagccccagagccctgtggcccagaccagcggctggccagcctgcagcacccccctgcccctggtgtcccgggtgaagacagagcagcaggagagtgacagcgtgcagtgcatgcctgtggccaagaggctgtgggacagcggccagaaggaggccggcggcggcggcaatggcagcaggaagatggccaagttcagcaccccagacctggccgccaaccggccccaccagcccccaccaccccagcaggcccctgtggtggccgccgcccagcctgctgtggccgccggggccggccagcctgctggaggagtggccgctgctggaggagtggtgtctggccccagcaccagcgagaggaccagccctggcaccagcagcgcctacaccagtgacagccctggcagctaccacaatgaggaggatgaggaggaggatggaggagaggagggcatggatgagcagtaccggcagatctgcaacatgtacaccatgtacagcatgatgaatgtgggccagacagctgagaaggtggaggccctgcctgagcaggtggcccctgagagcaggaaccgcatccgggtgcggcaggacctggccagcctgcctgctgagctgatcaaccagatcggcaaccgctgccaccccaagctgtatgatgaaggagaccccagcgagaagctggagctggtgacaggcaccaacgtgtacatcacccgggcccagctgatgaactgccacgtgtctgctggcaccaggcacaaggtgctgctgcggcggctgctggccagcttctttgacaggaacaccctggccaacagctgtggcaccggcatccgcagcagcaccaatgaccccaggaggaagcccctggacagccgggtgctgcatgctgtgaagtactactgccagaactttgcccccaacttcaaggagagcgagatgaatgccatcgctgctgacatgtgcaccaatgcccggcgggtggtgaggaagtcctggatgcccaaggtgaaggtgctgaaggcagaagatgatgcctacaccaccttcatcagcgagaccgggaagattgaaccagacatgatgggcgtggagcacggctttgaaacagccagccatgaaggagaggccggccccagcgctgaggccctgcagtag

SEQ ID NO: 276302 - DNA, 1584 bp, Artificial Sequence
  derived and/or modified sequence
atggcccagaccctgcagatggagatccccaacttcggcaacagcatcctcgagtgtctgaatgagcagcgacttcagggactttactgcgacgtctccgtggtcgtaaagggccatgcgttcaaggcacaccgggccgtgttagcagcctcttcctcttatttcagagatttattcaacaattctcgctctgctgtggtcgaactgccagccgcagttcaaccacaatccttccaacagatactgtcattttgctacactggtcgactgtccatgaatgtcggtgaccagtttctcttgatgtacacggctggcttcctccaaatccaggaaattatggagaaaggcaccgagttcttcctgaaggtgtcttctccctcatgtgactcccagggactccacgcggaagaagcccccagttctgaaccccaatccccagtggcacagacatcaggatggcctgcctgttcaactccactgccattagtatcgagggtgaaaacagaacagcaggaaagcgactccgtgcagtgcatgcccgtggcgaaaaggttatgggattcaggccagaaggaggccggtggtggcggtaacggtagtcgtaaaatggccaagttttccaccccagacctggccgccaaccgaccccatcaacccccaccccctcagcaagcccctgtcgttgccgccgcccagcctgcagtggccgccggagccggacagcccgcagggggtgtagcggccgcgggaggagtggtaagcggcccaagcacaagcgaaagaacgagccccggcacctccagcgcatacacttctgattccccaggcagctatcacaacgaagaagacgaggaggaggatgggggagaagaaggcatggatgaacagtatcggcaaatatgtaatatgtacacaatgtattccatgatgaatgtggggcaaacagctgaaaaggtggaggccttgcctgagcaggtcgccccagagtcccggaaccgcatccgtgtgcggcaggacttagctagcctgccggcagagttgattaaccagattgggaataggtgccatccaaaactgtatgatgagggtgacccctctgaaaagctcgagctcgtgactggaactaatgtgtacattacccgcgcacagttgatgaattgccacgttagcgccgggacccgccataaagtgcttctgaggcgactgttagcgtccttcttcgacagaaatacactggctaattcttgtggcaccggaattcgctcatcaactaacgatcctcgtcgaaaacccctggatagtcgagtgctgcacgctgtgaagtattattgtcagaacttcgcccctaacttcaaagaaagcgaaatgaatgccattgctgccgatatgtgcacgaatgcccggcgcgtggtgcgaaagtcttggatgccaaaggtgaaggtgctgaaggctgaggacgatgcgtacacaacattcatcagcgagaccggtaaaattgaaccagacatgatgggtgtggagcatggctttgagaccgcctcgcacgagggcgaggcaggcccatcggcggaggctctccagtag

SEQ ID NO: 276303 - DNA, 1584 bp, Artificial Sequence
  derived and/or modified sequence
atggctcaaaccctgcagatggagattcccaactttggaaacagtattctagagtgtctgaatgaacaaagattgcagggactgtattgtgatgtctcagtggtcgtcaaaggacacgccttcaaggcacatagggctgtgttggccgcatcttcttcttactttcgggacctcttcaataactctcgcagtgcggtggttgaattgcccgctgccgtacagccacaaagttttcagcagatcctgagtttctgttacacaggaagactgtccatgaatgtgggagatcaatttttactgatgtacacggcaggctttttgcagattcaggaaatcatggagaaggggaccgagttcttcctgaaagtgagttccccttcctgtgacagtcagggtttacacgcagaggaagccccaagttccgagccccagtctcctgtagcccaaacctctggctggccagcgtgctctacgcctctgccgctcgttagtcgtgtgaagactgagcagcaggaaagtgactccgttcagtgtatgccagtggctaagagactttgggatagcggccagaaggaggcaggcggaggaggcaacggtagtcggaagatggctaagttctctaccccagacctggctgccaacaggccacatcagccgcctccacctcagcaggcccctgtagtggcagctgcccagcctgcagtggcagcgggtgccggacaacctgcaggaggcgtggccgcagcaggaggagtcgtgtctggacccagcacctccgagagaactagtcccggaacctcgagtgcctatacatcagattcaccgggttcctaccacaacgaggaggatgaagaggaggatggcggagaagagggtatggatgagcaatatcgacaaatttgtaacatgtatacaatgtacagcatgatgaatgtgggacagaccgctgagaaagtggaggccctacccgagcaggtcgctcccgaatcccggaatcgcatccgcgtccggcaggacttagcaagcctgccggcagaactcatcaaccaaattggaaatcgatgccatccaaaactgtacgatgaaggagatccgagtgagaaactcgagttggttaccggcacgaacgtctatatcacaagagctcaactgatgaactgtcacgtgtcagccggaacccgccacaaagtacttctccgtcgattgctggcgagcttctttgacaggaacaccctcgccaacagctgtggaacggggatacggtcatcaaccaatgatcctcgtcgcaagcctttggactcgcgggtgctgcatgctgtgaagtactactgccagaattttgccccaaatttcaaagaatctgaaatgaacgctatcgccgctgacatgtgcacaaacgccagaagggtggtgcgaaagtcatggatgcccaaggtaaaagtccttaaggcggaggacgatgcatataccacttttatcagcgaaacaggtaagattgaaccggatatgatgggcgtggaacacgggtttgagacggctagtcacgagggggaggctgggcctagtgcggaggccctgcaatag

SEQ ID NO: 276304 - DNA, 4487 bp, Artificial Sequence
  derived and/or modified sequence
tggccgccgcggctgccgctgctgctgaggcggaggccgcggaggccgcggaggcggaggccgaggccccggcgcagcggggcgcgccccgggcccaggcccggccccagccgccgctgcggagcccgccgggaccccccggagcgcggccacggcgcagccgctgccatggcccagacactgcagatggagatcccgaacttcggcaacagcatcctggagtgcctcaatgaacagcggctgcagggcctgtactgtgacgtgtcagtggtggtcaagggccatgccttcaaggcccaccgggccgtgcttgctgccagcagctcctacttccgggacctgttcaacaacagccgcagcgccgtggtggagctgccggcggctgtgcagccccagtctttccagcagatcctcagcttctgctacacgggccggctgagcatgaacgtgggcgaccagttcctgctcatgtacacggctggcttcctgcagatccaggagatcatggagaagggcaccgagttcttcctcaaggtgagctccccgagctgcgactcccagggcctgcatgcggaggaggccccatcgtcggagccccagagccccgtggcgcagacatcgggctggccagcctgtagcaccccgctgcccctcgtgtcgcgggtgaagacggagcagcaggagtcggactccgtgcagtgcatgcccgtggccaagcggctgtgggacagtggccagaaggaggctgggggcggcggcaatggcagccgcaagatggccaagttctccacgccggacctggctgccaaccggcctcaccagcccccgccaccccaacaggctccggtggtggcagcagcccagcccgccgtggctgcgggagcagggcagccagccggtggggtggcagcagcagggggtgtggtgagtgggcccagcacgtcggagcggaccagcccaggcacctcaagcgcctacaccagcgacagccctggctcctaccacaatgaggaggacgaggaggaggatggtggcgaggagggcatggatgagcagtaccggcagatctgcaacatgtacaccatgtacagcatgatgaacgtcggccagacagccgagaaggtggaggccctcccggagcaggtagcccccgagtcccgaaatcgcatccgggttcggcaagacctggcgtctctcccggctgaacttatcaaccagattgggaaccgctgccaccccaagctctacgacgagggcgacccctctgagaagctggagctggtgacaggcaccaacgtgtacatcacaagggcgcagctgatgaactgccacgtcagcgcaggcacgcggcacaaggtcctactgcggcggctcctggcctccttctttgaccggaacacgctggccaacagctgcggcaccggcatccgctcttctaccaacgatccccgtcggaagcccctggacagccgcgtgctccacgctgtcaagtactactgccagaacttcgcccccaacttcaaggagagcgagatgaatgccatcgcggccgacatgtgcaccaacgcccgccgcgtcgtgcgcaagagctggatgcccaaggtcaaggtgctcaaggctgaggatgacgcctacaccaccttcatcagtgaaacgggcaagatcgagccggacatgatgggtgtggagcatggcttcgagaccgccagccacgagggcgaggcgggtccctcggctgaagccctgcagtaacccgcccagcctcccgcggggccacacacttcccctcccaacacacacacacacctgccatcttggtcatgagctactgtctgtccctccccaggacccgcggtgggtgctgcatgttcccggccctctgcccctcctgtcctaccccctttccccaccgagagctgggccgggagaggaccgcagggcaggtggcgtgaggtccgtgttgccttctttaacacacactcgtgcagtgggggagttctggctccccaacctaacccctagccgtcatctccacactcaccaggcccaccaggggagggggctggcctgggggtcttgggaaggcccctccccaggccctaggccacctcgcggaagccttcagcctccgcccctcactgcagccccttgggacttgaggggggccccaggggttctcaggacccctcccaccacctcccagtgcttccacgtctccaaaagcgccttcctgtcaccctcgtctatccctgcgcctgggggctggggtaggcgaggccgtggggactacccattttatagctggggaaacaggctccgagaaattgcacaaccgacctcaggtggccggcagtggcgtgcctggtgccctttctcctcttccgcctctgttgctccctttggtcctctggggcctcagagaggcaggtcctaaaggagggggggtctcctgggggcagaccgagggtctcggaggatagaatgagaggtttccagggctggcagagtgtgtgcgtgtgtgtgtgcagaagttttgctttcaaacaaatgaagatacaagaggcagtaggacctgggttggaacccaggggagcagactggggggctgttgcccctccctccatctccccacacccaccccaccccacagcagggctcctggcccccacccccctgtacataatttttaaaacctttttttagcgaatgaaatattgaagtataagattccttttatttttcaaaccaatggggctgtgtctattgtccccctcggtccccaggggtggggggccttggaaggcagggcggtgttggggggctggggggcaggctgaatgtgtgtgtgtgggtgtgtatgtgtggagtgtgtgtgtgtgtttccatggtaggactccagtcccagctgctgcctaggctcctgtgggtcctgtgggtccccctcccctgttcaccttccccaacagggctatagtttaagggtgtcccaggccttggctggttggctgggcccagctcctgggggctgggcagggcagggcagggccgggtccacttccattgttagcagttgtttgcagaattttctcttttaccattcctctctttttgttctcgcccagagtgggtggttttttgttgttgttttagattttcatgtgaaggcagttttttttcttttttaactccccatccccctatgcagggtgtcatttcaccatccacatccacatccttgtttgtgtttctggccctcgtcctccctgcctctcatctgcctccccaacccccacctacccactgctcccaggggtctctccaggggcagggggattttaggagatggggtgggggccagcccctactggacccttgtaatctgatttggagaccatccccccgatgggaccagcagccccgccggcccactgggggtccctcttaacatctgcttgttgcgggggtcagtcatgagtgccagggtctggctggggtcttggcactgtcttcctggccggggcctgaaaccttagcccccagccggcctgagtgggggatattgacacccccagctaaagcacaagcaccttagtcacccctcctctccccccgcctcctggcctgccaccccaccccagcgtttaccccaaagcacaatgccctggtcacttggcaagcggctgggcctgacggaggccgaggggcagaccggggctccagccagacccctgaaaggaaggtgctcccccacttccaggccttagttggggtgggggggccagctcctgggcctggggtcttctcacccccacccccttgtcctgggtaggcccctgcctgcccctctctgccttttcctcgggtgtccctcctcgagcccctgtggcattggcttgggtggcagagcccacttgtttcagggaccccaggaggtgccccctggctcccaggactgtgtgtgggtccggggggtgggggggtggggagaagggtcgggcagggggtgcaggggaggaaactcctcaccaggagagccaaagacagggttgtgccttaccccaggagccacccctgtaccccccttgccctgccattcaccctccacccctacccctgggcggcctgctgctttttccttctcttcctcccctgccctgagctgcatggttcccccaccctgggcagccaggaaggaatctgaatggagaatcaccaaccaccagagaaaaaagactgtggggccctcccctgccaactccccttccctggccgcccactcaacccacacctctttcacgcaggacaggctgcccaccctgtccacgtgaagtgccaacgccctccccaccctgggccgagcccccacccctccctgggcccccaagtgagattgcacatttaactactgtaaggagaggagcggcgttggcaaatgtgaaccatgagaatatcagtgatactgatgagaataaactaaacgcctttgt

SEQ ID NO: 276305 - DNA, 1584 bp, Artificial Sequence
  derived and/or modified sequence
atggcccagaccctgcagatggagatccccaacttcggcaacagcatcctggagtgcctgaacgagcagagactgcagggcctgtactgcgacgtgagcgtggtggtgaagggccacgccttcaaggcccacagagccgtgctggccgccagcagcagctacttcagagacctgttcaacaacagcagaagcgccgtggtggagctgcccgccgccgtgcagccccagagcttccagcagatcctgagcttctgctacaccggcagactgagcatgaacgtgggcgaccagttcctgctgatgtacaccgccggcttcctgcagatccaggagatcatggagaagggcaccgagttcttcctgaaggtgagcagccccagctgcgacagccagggcctgcacgccgaggaggcccccagcagcgagccccagagccccgtggcccagaccagcggctggcccgcctgcagcacccccctgcccctggtgagcagagtgaagaccgagcagcaggagagcgacagcgtgcagtgcatgcccgtggccaagagactgtgggacagcggccagaaggaggccggcggcggcggcaacggcagcagaaagatggccaagttcagcacccccgacctggccgccaacagaccccaccagcccccccccccccagcaggcccccgtggtggccgccgcccagcccgccgtggccgccggcgccggccagcccgccggcggcgtggccgccgccggcggcgtggtgagcggccccagcaccagcgagagaaccagccccggcaccagcagcgcctacaccagcgacagccccggcagctaccacaacgaggaggacgaggaggaggacggcggcgaggagggcatggacgagcagtacagacagatctgcaacatgtacaccatgtacagcatgatgaacgtgggccagaccgccgagaaggtggaggccctgcccgagcaggtggcccccgagagcagaaacagaatcagagtgagacaggacctggccagcctgcccgccgagctgatcaaccagatcggcaacagatgccaccccaagctgtacgacgagggcgaccccagcgagaagctggagctggtgaccggcaccaacgtgtacatcaccagagcccagctgatgaactgccacgtgagcgccggcaccagacacaaggtgctgctgagaagactgctggccagcttcttcgacagaaacaccctggccaacagctgcggcaccggcatcagaagcagcaccaacgaccccagaagaaagcccctggacagcagagtgctgcacgccgtgaagtactactgccagaacttcgcccccaacttcaaggagagcgagatgaacgccatcgccgccgacatgtgcaccaacgccagaagagtggtgagaaagagctggatgcccaaggtgaaggtgctgaaggccgaggacgacgcctacaccaccttcatcagcgagaccggcaagatcgagcccgacatgatgggcgtggagcacggcttcgagaccgccagccacgagggcgaggccggccccagcgccgaggccctgcagtag

SEQ ID NO: 276306 - protein, 151 aa, Artificial Sequence
  derived and/or modified sequence
MAAFRDIEEVSQGLLSLLGANRAEAQQRRLLGRHEQVVERLLETQDGAEKQLREILTMEKEVAQSLLNAKEQERQEKEVDEDTTVTIPSAVYVAQLYHQVSKIEWDYECEPGMVKGIHHGPSVAQPIHLDSTQLSRKFISDYLWSLVDTEW

SEQ ID NO: 276307 - DNA, 456 bp, Artificial Sequence
  derived and/or modified sequence
atggccgccttcagagacatcgaggaggtgagccagggcctgctgagcctgctgggcgccaacagagccgaggcccagcagagaagactgctgggcagacacgagcaggtggtggagagactgctggagacccaggacggcgccgagaagcagctgagagagatcctgaccatggagaaggaggtggcccagagcctgctgaacgccaaggagcaggagagacaggagaaggaggtggacgaggacaccaccgtgaccatccccagcgccgtgtacgtggcccagctgtaccaccaggtgagcaagatcgagtgggactacgagtgcgagcccggcatggtgaagggcatccaccacggccccagcgtggcccagcccatccacctggacagcacccagctgagcagaaagttcatcagcgactacctgtggagcctggtggacaccgagtggtag

SEQ ID NO: 276308 - DNA, 456 bp, Artificial Sequence
  derived and/or modified sequence
atggccgctttccgagacatcgaggaggtgagccaggggttacttagtctgcttggggcaaaccgggctgaagcacagcagagacggctgctcggccgacatgagcaggtggtcgaaagattgctggagactcaagacggcgccgagaaacaactgcgagaaattttaaccatggagaaagaggtggcacagtctctgttgaacgctaaagagcaggagcgtcaggagaaggaagtggatgaggatactaccgttacaattcccagcgccgtctacgtggctcagctttatcatcaggtatcaaaaatcgagtgggattatgagtgcgagcctggcatggtcaaaggaatccatcacggtcctagtgttgcccagcctatccacctggattctactcagctgagccggaaatttatctctgactacttgtggtctctggtcgataccgagtggtag

SEQ ID NO: 276309 - DNA, 456 bp, Artificial Sequence
  derived and/or modified sequence
atggccgccttccgggacatcgaggaggtgtcccagggcctgctgagcctgctgggcgccaacagagctgaggcccagcagaggcggctgctgggcagacatgagcaggtggtggagcggctgctggagacccaggatggagctgagaagcagctgcgggagatcctgaccatggagaaggaggtggcccagagcctgctgaatgccaaggagcaggagcggcaggagaaggaggtggatgaggacaccaccgtgaccatccccagcgctgtgtatgtggcccagctgtaccaccaggtgtccaagattgagtgggactatgaatgtgagcccggcatggtgaagggcatccaccacggccccagcgtggcccagcccatccacctggacagcacccagctgagcaggaagttcatcagtgactacctgtggagcctggtggacacagagtggtag

SEQ ID NO: 276310 - DNA, 456 bp, Artificial Sequence
  derived and/or modified sequence
atggccgccttccgggacatcgaggaggtgagccagggcctgctgtctctgttgggcgccaatcgtgcagaagcgcagcagagaaggttgttgggccggcacgagcaggtggtggagcggcttctcgaaactcaggatggggccgagaaacagctgcgggaaatcctcacaatggaaaaagaggttgctcaaagcttgcttaacgcaaaagagcaggagaggcaggaaaaggaggttgatgaggataccactgttacaatcccctccgcagtgtatgtggctcagctgtatcaccaagtgtctaagatcgagtgggattacgagtgcgaacctggcatggtgaagggtatccaccacggtccaagcgtcgcccagccaatccacctcgatagtacgcaacttagccgaaaattcatctccgactacctgtggtcgctcgtggatacagagtggtag

SEQ ID NO: 276311 - DNA, 456 bp, Artificial Sequence
  derived and/or modified sequence
atggcagcctttagagacatcgaagaggttagtcaaggactgttatcgctgctaggagcaaatcgtgccgaggcacagcagagacgattattgggtagacatgaacaggtggttgaaaggttgctagagacacaagacggtgcagagaagcaactgcgcgaaatccttacaatggagaaagaggttgctcagtcgctgctgaatgccaaggagcaggagagacaagagaaggaggtagacgaggacacgaccgttaccattcccagcgcggtgtatgtggcacagctgtaccaccaggtcagcaaaattgaatgggactatgagtgcgaacccggaatggtgaaaggaatccaccacggaccatcagtcgctcagcctatccaccttgactccactcagctatcccgcaagtttatatctgattatctctggagcctcgtggacacggagtggtag

SEQ ID NO: 276312 - DNA, 902 bp, Artificial Sequence
  derived and/or modified sequence
aaatttgcgcgggttggagcctggcgtagtcatggccgccttccgcgacatagaggaggtgagccaggggctgctcagcctgctgggcgccaaccgcgcggaggcgcagcagcgacggctgctggggcgccacgagcaggtggtggagcggctgctggaaacgcaagacggtgccgagaagcagctgcgagagatcctcaccatggagaaggaagtggcccagagccttctcaatgcgaaggagcaggagcgacaggagaaggaggtcgacgaggacacgacagtcacaatcccctcggccgtgtacgtggctcaactttaccaccaagttagtaaaattgagtgggattatgagtgtgagccagggatggtcaaaggcatccatcatggccccagtgtggcccagcccatccacctggacagcacccagctctccaggaaattcatcagcgactacctctggagtctggtggacaccgagtggtagccaggagcctcgtggctgcgtcttgcacccagcgggcatctgccgtggtcagatccatttcaaatgaaatgtggggacatagatctttttttttttttttttgagacagagtttcactcttgttgtccagtctggagtgcaatggcacaatctcagctcacagcaacctctgcctcctgggttcaagcgattctcctgcctcagcctccaaagtagctgggattacaggcatgcgccaccacacccagctaattttttgtatttggtagagatggagtttcaccatggtggtcaggctggtcttgaactcctgacctcaggtgatccacccgcccgccttggcctcccaaagtgctaggattccaggcgtgagccatcgtgcccagctagacgtcttcctttttttttttttttt

SEQ ID NO: 276313 - protein, 593 aa, Artificial Sequence
  derived and/or modified sequence
MATSNNPRKFSEKIALHNQKQAEETAAFEEVMKDLSLTRAARLQLQKSQYLQLGPSRGQYYGGSLPNVNQIGSGTMDLPFQTPFQSSGLDTSRTTRHHGLVDRVYRERGRLGSPHRRPLSVDKHGRQADSCPYGTMYLSPPADTSWRRTNSDSALHQSTMTPTQPESFSSGSQDVHQKRVLLLTVPGMEETTSEADKNLSKQAWDTKKTGSRPKSCEVPGINIFPSADQENTTALIPATHNTGGSLPDLTNIHFPSPLPTPLDPEEPTFPALSSSSSTGNLAANLTHLGIGGAGQGMSTPGSSPQHRPAGVSPLSLSTEARRQQASPTLSPLSPITQAVAMDALSLEQQLPYAFFTQAGSQQPPPQPQPPPPPPPASQQPPPPPPPQAPVRLPPGGPLLPSASLTRGPQPPPLAVTVPSSLPQSPPENPGQPSMGIDIASAPALQQYRTSAGSPANQSPTSPVSNQGFSPGSSPQLEQFNMMENAISSSSLYSPGSTLNYSQAAMMGLTGSHGSLPDSQQLGYASHSGIPNIILTVTGESPPSLSKELTSHRGHLPDGPPVSGHAGTLPLSRPDGASPARGRPCSVPRQRPSL

SEQ ID NO: 276314 - DNA, 1782 bp, Artificial Sequence
  derived and/or modified sequence
atggccacatccaataacccccgtaagttttcagaaaaaatagctcttcacaatcagaagcaagcagaagaaacagccgcattcgaggaggttatgaaagacctgagtctcacccgtgcagccaggctccagcttcagaagagccagtatctgcagctaggcccatctagaggccagtattatggcggctccttgcctaatgtgaaccagattggatctgggaccatggacctgcctttccaaactcctttccagagttctggactcgacactagcagaactactcgccaccatggcctggtggaccgcgtgtacagagagagaggccgcctgggttcgccacataggaggccgttaagtgtggacaaacacgggaggcaggccgatagctgtccttatggcacaatgtatctgtcgcctccagctgacacatcgtggcgccgcaccaacagtgattcagcactgcaccagagcaccatgacccccacacagccagagtctttctcgagcgggtctcaggacgttcaccaaaaacgcgtgctgctattaactgtgcccgggatggaggagacgacgagcgaagccgacaagaacttatccaaacaggcttgggacaccaagaaaaccggatctaggcctaagagctgcgaggtgccgggcatcaatatttttccaagcgccgatcaagagaataccaccgcactcattcccgctacccacaatactgggggcagcctgcccgaccttacgaacatacacttcccatccccattaccaacaccactcgaccccgaggagcctacattcccggccctctccagtagctcttcaacaggcaacctggccgctaacctgacacatctgggcatcgggggtgcgggtcagggcatgagcactccgggttcaagcccccagcacaggcctgccggcgtttcccccttgtccctgtcaacggaagctcgacgtcagcaagctagtccgactctgagtccactttccccaataacacaggccgttgccatggacgccctgtcactcgaacaacagctgccatacgctttcttcactcaggctgggagccagcagccaccaccacagccacagccccctccccctccgcctccagccagccaacagcctcctccaccacccccaccccaggcaccagtacggctaccacctggaggtcctttgctgccgtctgcgtcgctgacgcgcggaccacagccaccacccctcgctgtcactgtcccatcgtctctccctcagagcccccctgaaaacccaggacagccctcaatgggcattgacattgcgtcggcacctgcgctgcagcaatataggaccagtgccggaagccctgcaaaccaaagccctactagcccagtatctaaccaagggttttccccaggatccagtccacagctggagcagttcaacatgatggaaaacgctattagctcaagctcgctatactctcctggctccacccttaactactcccaggctgcgatgatggggttaacaggctctcatggctctcttccagattcccagcagctcggctacgccagccatagtggaataccgaatattatcctgacagttaccggagaatccccaccatccctatccaaagagctaacgtcccacagagggcacttacccgatgggccccctgtgtccgggcacgctggaacactgcctctaagccggccagacggcgcctccccagcccgcggtaggccgtgctcagtccccaggcagcggccctctctgtag

SEQ ID NO: 276315 - DNA, 1782 bp, Artificial Sequence
  derived and/or modified sequence
atggccaccagcaacaaccccaggaagttcagcgagaagatcgccctgcacaaccagaagcaggccgaggagacagctgcctttgaggaggtgatgaaggacctgagcctgacccgggccgcccggctgcagctgcagaagagccagtacctgcagctgggccccagccggggccagtactatggaggcagcctgcccaacgtgaaccagatcggcagcggcaccatggacctgcccttccagacccccttccagagcagcggcctggacaccagcaggaccaccaggcaccacggcctggtggacagagtgtaccgggagcggggccgcctgggcagcccccaccggcggcccctgtctgtggacaagcacggccggcaggccgacagctgcccctacggcaccatgtacctgagccccccagctgacacctcctggaggaggaccaacagcgacagcgccctgcaccagagcaccatgacccccacccagcctgagagcttcagcagcggcagccaggatgtgcaccagaagagggtgctgctgctgactgtgcccggcatggaggagaccaccagcgaggccgacaagaacctgagcaagcaggcctgggacaccaagaagacaggcagccggcccaagagctgtgaggtgcccggcatcaacatcttccccagcgctgaccaggagaacaccacagccctgatcccagccacccacaacacaggaggcagcctgcctgacctgaccaacatccacttccccagccccctgcccacccccctggaccctgaggagcccaccttccctgccctgagcagcagcagcagcacaggcaacctggccgccaacctgacccacctgggcatcggcggggccggccagggcatgagcaccccaggcagcagcccccagcacaggcctgctggggtgagccccctgagcctgagcacagaggcccggcggcagcaggccagccccaccctgagccccctgagccccatcacccaggccgtggccatggatgccctgagcctggagcagcagctgccctatgccttcttcacccaggccggcagccagcagcccccaccccagccccagcccccacctcctcctcctccagccagccagcagcccccacctcctcctccaccccaggcccctgtgcggctgcccccaggcggccccctgctgcccagcgccagcctgacccggggcccccagcccccacccctggccgtgacagtgcccagcagcctgccccagagccccccagaaaatcctggccagcccagcatgggcatcgacatcgccagcgccccagccctgcagcagtaccgcaccagcgctggcagccctgccaaccagagccccaccagccctgtgagcaaccagggcttcagccctggcagcagcccccagctggagcagttcaacatgatggagaatgccatcagcagcagcagcctgtacagccctggcagcaccctgaactacagccaggccgccatgatgggcctgaccggcagccacggcagcctgcctgacagccagcagctgggctacgccagccacagcggcatccccaacatcatcctgactgtgactggagagagcccccccagcctgagcaaggagctgaccagccaccggggccacctgcctgatggcccccctgtgtctggccatgctggcaccctgcccctgagcaggccagatggagccagccctgcccggggccggccctgcagcgtgccccggcagaggcccagcctgtag

SEQ ID NO: 276316 - DNA, 1782 bp, Artificial Sequence
  derived and/or modified sequence
atggccaccagcaacaacccccggaagttcagcgagaagatcgccctacacaatcagaagcaggcagaagagactgccgcattcgaggaggtcatgaaggatcttagcctgacacgggcagctagattgcagctccagaaaagtcagtatctccaactgggtccctccagggggcaatattatggtggaagccttcctaacgtgaatcagatcggcagcggcacgatggatctacctttccagaccccatttcagtcgagtggccttgacacctccagaactacccgacatcacgggctcgttgatagagtatatagagaaaggggtcgtttgggaagtcctcacaggcggcccctgtcagtcgataagcacgggagacaagcagacagctgcccgtacgggaccatgtatctgtctcccccggccgacacctcttggagaaggactaatagcgattctgctctgcatcaatccacaatgacgcctactcagccagaatcctttagctctggctcacaggatgtgcaccagaagcgggtgttgctccttactgttccaggtatggaggaaaccacaagtgaagctgataaaaacttgtctaagcaggcctgggataccaagaaaaccggaagccggccaaagtcatgcgaagtccctggcatcaatattttcccatccgccgatcaggagaatactactgccctgattcccgcaacacacaacactggcggtagcttgcccgacctgactaacattcactttccgtctcccttacctacccctctggacccagaggaacctacctttcccgctctgtcctcaagctcaagcaccggcaacctggccgctaacctgacgcatctgggcatcggaggcgccggccagggaatgagtactcccggatctagtccacagcacaggcctgccggagtttctcctttgagcttaagcacagaagctaggagacaacaggcttctcccacattgtccccgctgagccccatcactcaggcagtcgccatggatgccctttcattggagcagcagctgccttacgctttctttacacaggcaggttcccagcagcctcctccgcagcctcagccgccacccccccctccaccggctagccagcagccgccaccaccgccaccccctcaagcccccgtgagacttccacccggaggacctttgctgccttcagcttctcttacacgcggaccccagccacctcccctggcggtgacagtgccctccagtctgccccaaagtcctccagaaaatcccgggcaaccttccatgggcatagacattgctagtgcccccgccctgcagcagtatcgaacaagcgccggatccccagcaaaccagtctccgactagtcccgtatccaatcagggattcagcccagggtcatctccccagctggaacagtttaacatgatggagaacgccatatccagcagctctctttacagccctggaagcacgctgaactatagtcaggccgctatgatgggtcttacaggctctcatggttccttaccggattcccaacaactcggctatgcctctcactcggggattccaaatatcatcctgaccgtcacaggggagtccccacctagtctgtccaaggaactgacaagccacagaggccatctcccagatggtcctccggtctcaggtcatgccggaacactcccgcttagtcggccagacggcgcctcccccgccagaggccggccctgttcagtgcctcgacaacgcccaagcctatag

SEQ ID NO: 276317 - DNA, 1782 bp, Artificial Sequence
  derived and/or modified sequence
atggctactagtaacaaccctaggaagtttagcgaaaaaatcgcactgcacaaccaaaaacaggctgaagaaactgcagcgtttgaggaggtgatgaaagacctgtccttgacgcgagctgcgagactgcagcttcagaaatcacaatacctccagctgggaccctccagaggtcaatactacggcggatccctcccaaacgtcaatcagatcgggtccgggactatggatctgccattccagacaccgtttcaatctagcggtttagacacttcccggaccaccagacatcacggcttggtcgaccgcgtgtaccgggagcgaggtcgattgggttctcctcaccggcgtccgctgagcgttgataaacacggcaggcaggctgattcctgcccatatggaacaatgtacctgagcccgccagctgatacttcctggaggagaacaaatagcgattcagccctgcatcagtcaaccatgactccaacgcagccagaaagcttcagttccggctctcaggacgtacaccaaaagcgagtgctgttgctgaccgtccccggaatggaggagactacgagcgaagccgataagaacctgagtaagcaggcatgggacacaaagaaaactggcagccggccaaagagttgcgaggtacccggtatcaacatcttcccatctgcggatcaagagaataccactgcattgatccctgcgacacataataccggtggcagtctaccagacctgactaacattcatttcccttcccctttgcctacccccctcgatcccgaggaacctaccttccccgctctgtctagctcaagttcaactggaaacttagcagctaatctcacccacctgggcataggaggcgctggccaagggatgtctacacccggttcttcaccgcagcacaggcccgctggggtaagtcctctttccttgagcaccgaagctcggcgacagcaggcgtctcccacactctcaccattgagccccattacacaggctgttgcaatggacgctctgagtctcgagcagcagcttccatatgctttttttacccaggcgggttcgcagcagccccctcctcagccacaacccccaccgcctcccccacccgcttctcaacagcctccccctccaccacccccacaggctcccgtgcgcctgcctcccggaggacccctgctgccatctgcctcccttacccgcggaccacagcccccaccccttgccgtgacggtgccatctagcctccctcaaagtcccccagagaatcctggccaaccatctatggggatcgatatcgcatccgcccctgccctgcagcaatatcggaccagcgccggatctccagcgaaccagtctcccaccagcccggtgtctaaccagggattcagccctgggagctctccccagttagaacagttcaacatgatggagaatgcgataagctcttcctcattatatagccctggcagcacgctcaattactcacaggcagccatgatgggtttgaccggatcgcacggctctctcccagatagccagcagcttggttatgccagccacagtggcattcctaacattattctcaccgtcaccggtgagagtcccccatctctctccaaagagcttacctcacacaggggacatctgcctgacggcccacctgtctccggacacgctggcaccctacctctgtcgcgacctgacggcgcaagccctgcaaggggccgaccatgcagcgtgcccaggcagaggcctagtttatag

SEQ ID NO: 276318 - DNA, 1870 bp, Artificial Sequence
  derived and/or modified sequence
ccagccggcgcttgcgcggtggcacgggcgagtgggggggcgaggaggtggaggaggaggaggaggaggaggaggtggcggcgagaagatggcgacttcgaacaatccgcggaaattcagcgagaagatcgcgctgcacaatcagaagcaggcggaggagacggcggccttcgaggaggtcatgaaggacctgagcctgacgcgggccgcgcggctccagctccagaaatcccagtacctgcaactgggccccagccgaggccagtactatggcgggtccctgcccaacgtgaaccagatcgggagtggcaccatggacctgcccttccagacccccttccaatcctcgggcctggacaccagccggaccacccggcaccatgggctggtggacagggtgtaccgggagcgtggccggctcggctccccacaccgccggcccctgtcagtggacaaacacggacggcaggccgacagctgcccctatggcaccatgtacctctcaccacccgcggacaccagctggagaaggaccaattctgactccgccctgcaccagagcacaatgacgcccacgcagccagaatcctttagcagtgggtcccaggacgtgcaccagaaaagagtcttactgttaacagtcccaggaatggaagagaccacatcagaggcagacaaaaacctttccaagcaagcatgggacaccaagaagacggggtccaggcccaagtcctgtgaggtccccggaatcaacatcttcccgtctgccgaccaggaaaacactacagccctgatccccgccacccacaacacaggggggtccctgcccgacctgaccaacatccacttcccctccccgctcccgaccccgctggaccccgaggagcccaccttccctgcactgagcagctccagcagcaccggcaacctcgcggccaacctgacgcacctgggcatcggtggcgccggccagggaatgagcacacctggctcctctccacagcaccgcccagctggcgtcagccccctgtccctgagcacagaggcaaggcgtcagcaggcatcgcccaccctgtccccgctgtcacccatcactcaggctgtagccatggacgccctgtctctggagcagcagctgccctacgccttcttcacccaggcgggctcccagcagccaccgccgcagccccagcccccgccgcctcctccacccgcgtcccagcagccaccacccccgccacccccacaggcgcccgtccgcctgccccctggtggccccctgttgcccagcgccagcctgactcgtgggccacagccgcccccgcttgcagtcacggtaccgtcctctctcccccagtcccccccagagaaccctggccagccatcgatggggatcgacatcgcctcggcgccggctctgcagcagtaccgcactagcgccggctccccggccaaccagtctcccacctcgccagtctccaatcaaggcttctccccagggagctccccgcaactggagcagttcaacatgatggagaacgccatcagctccagcagcctgtacagcccgggctccacactcaactactcgcaggcggccatgatgggcctcacgggcagccacgggagcctgccggactcgcagcaactgggatacgccagccacagtggcatccccaacatcatcctcacagtgacaggagagtccccccccagcctctctaaagaactgaccagccaccgaggacaccttccggatggaccgcctgtgagcgggcacgccggcaccctgccgctcagccgtcccgacggcgcctccccagcccggggacggccgtgctccgtccctcgccaacggccgagcttgtga

SEQ ID NO: 276319 - DNA, 1782 bp, Artificial Sequence
  derived and/or modified sequence
atggccaccagcaacaaccccagaaagttcagcgagaagatcgccctgcacaaccagaagcaggccgaggagaccgccgccttcgaggaggtgatgaaggacctgagcctgaccagagccgccagactgcagctgcagaagagccagtacctgcagctgggccccagcagaggccagtactacggcggcagcctgcccaacgtgaaccagatcggcagcggcaccatggacctgcccttccagacccccttccagagcagcggcctggacaccagcagaaccaccagacaccacggcctggtggacagagtgtacagagagagaggcagactgggcagcccccacagaagacccctgagcgtggacaagcacggcagacaggccgacagctgcccctacggcaccatgtacctgagcccccccgccgacaccagctggagaagaaccaacagcgacagcgccctgcaccagagcaccatgacccccacccagcccgagagcttcagcagcggcagccaggacgtgcaccagaagagagtgctgctgctgaccgtgcccggcatggaggagaccaccagcgaggccgacaagaacctgagcaagcaggcctgggacaccaagaagaccggcagcagacccaagagctgcgaggtgcccggcatcaacatcttccccagcgccgaccaggagaacaccaccgccctgatccccgccacccacaacaccggcggcagcctgcccgacctgaccaacatccacttccccagccccctgcccacccccctggaccccgaggagcccaccttccccgccctgagcagcagcagcagcaccggcaacctggccgccaacctgacccacctgggcatcggcggcgccggccagggcatgagcacccccggcagcagcccccagcacagacccgccggcgtgagccccctgagcctgagcaccgaggccagaagacagcaggccagccccaccctgagccccctgagccccatcacccaggccgtggccatggacgccctgagcctggagcagcagctgccctacgccttcttcacccaggccggcagccagcagccccccccccagccccagcccccccccccccccccccccgccagccagcagccccccccccccccccccccccaggcccccgtgagactgccccccggcggccccctgctgcccagcgccagcctgaccagaggcccccagcccccccccctggccgtgaccgtgcccagcagcctgccccagagcccccccgagaaccccggccagcccagcatgggcatcgacatcgccagcgcccccgccctgcagcagtacagaaccagcgccggcagccccgccaaccagagccccaccagccccgtgagcaaccagggcttcagccccggcagcagcccccagctggagcagttcaacatgatggagaacgccatcagcagcagcagcctgtacagccccggcagcaccctgaactacagccaggccgccatgatgggcctgaccggcagccacggcagcctgcccgacagccagcagctgggctacgccagccacagcggcatccccaacatcatcctgaccgtgaccggcgagagcccccccagcctgagcaaggagctgaccagccacagaggccacctgcccgacggcccccccgtgagcggccacgccggcaccctgcccctgagcagacccgacggcgccagccccgccagaggcagaccctgcagcgtgcccagacagagacccagcctgtag

SEQ ID NO: 276320 - DNA, 5432 bp, Artificial Sequence
  derived and/or modified sequence
cacacaggaaggagccgagtgggactttcctctcgctgcctcccggctctgcccgcccttcgaaagtccagggtccctgcccgctaggcaagttgcactcatggcacctccaagtgaagagacgcccctgatccctcagcgttcatgcagcctcttgtccacggaggctggtgccctgcatgtgctgctgcccgctcggggccccgggcccccccagcgcctatctttctcctttggggaccacttggctgaggacctgtgcgtgcaggctgccaaggccagcggcatcctgcctgtgtaccactccctctttgctctggccacggaggacctgtcctgctggttccccccgagccacatcttctccgtggaggatgccagcacccaagtcctgctgtacaggattcgcttttacttccccaattggtttgggctggagaagtgccaccgcttcgggctacgcaaggatttggccagtgctatccttgacctgccagtcctggagcacctctttgcccagcaccgcagtgacctggtgagtgggcgcctccccgtgggcctcagtctcaaggagcagggtgagtgtctcagcctggccgtgttggacctggcccggatggcgcgagagcaggcccagcggccgggagagctgctgaagactgtcagctacaaggcctgcctacccccaagcctgcgcgacctgatccagggcctgagcttcgtgacgcggaggcgtattcggaggacggtgcgcagagccctgcgccgcgtggccgcctgccaggcagaccggcactcgctcatggccaagtacatcatggacctggagcggctggatccagccggggccgccgagaccttccacgtgggcctccctggggcccttggtggccacgacgggctggggctgctccgcgtggctggtgacggcggcatcgcctggacccagggagaacaggaggtcctccagcccttctgcgactttccagaaatcgtagacattagcatcaagcaggccccgcgcgttggcccggccggagagcaccgcctggtcactgttaccaggacagacaaccagattttagaggccgagttcccagggctgcccgaggctctgtcgttcgtggcgctcgtggacggctacttccggctgaccacggactcccagcacttcttctgcaaggaggtggcaccgccgaggctgctggaggaagtggccgagcagtgccacggccccatcactctggactttgccatcaacaagctcaagactgggggctcacgtcctggctcctatgttctccgccgcagcccccaggactttgacagcttcctcctcactgtctgtgtccagaacccccttggtcctgattataagggctgcctcatccggcgcagccccacaggaaccttccttctggttggcctcagccgaccccacagcagtcttcgagagctcctggcaacctgctgggatggggggctgcacgtagatggggtggcagtgaccctcacttcctgctgtatccccagacccaaagaaaagtccaacctgatcgtggtccagagaggtcacagcccacccacatcatccttggttcagccccaatcccaataccagctgagtcagatgacatttcacaagatccctgctgacagcctggagtggcatgagaacctgggccatgggtccttcaccaagatttaccggggctgtcgccatgaggtggtggatggggaggcccgaaagacagaggtgctgctgaaggtcatggatgccaagcacaagaactgcatggagtcattcctggaagcagcgagcttgatgagccaagtgtcgtaccggcatctcgtgctgctccacggcgtgtgcatggctggagacagcaccatggtgcaggaatttgtacacctgggggccatagacatgtatctgcgaaaacgtggccacctggtgccagccagctggaagctgcaggtggtcaaacagctggcctacgccctcaactatctggaggacaaaggcctgccccatggcaatgtctctgcccggaaggtgctcctggctcgggagggggctgatgggagcccgcccttcatcaagctgagtgaccctggggtcagccccgctgtgttaagcctggagatgctcaccgacaggatcccctgggtggcccccgagtgtctccgggaggcgcagacacttagcttggaagctgacaagtggggcttcggcgccacggtctgggaagtgtttagtggcgtcaccatgcccatcagtgccctggatcctgctaagaaactccaattttatgaggaccggcagcagctgccggcccccaagtggacagagctggccctgctgattcaacagtgcatggcctatgagccggtccagaggccctccttccgagccgtcattcgtgacctcaatagcctcatctcttcagactatgagctcctctcagaccccacacctggtgccctggcacctcgtgatgggctgtggaatggtgcccagctctatgcctgccaagaccccacgatcttcgaggagagacacctcaagtacatctcacagctgggcaagggcaactttggcagcgtggagctgtgccgctatgacccgctaggcgacaatacaggtgccctggtggccgtgaaacagctgcagcacagcgggccagaccagcagagggactttcagcgggagattcagatcctcaaagcactgcacagtgatttcattgtcaagtatcgtggtgtcagctatggcccgggccgccagagcctgcggctggtcatggagtacctgcccagcggctgcttgcgcgacttcctgcagcggcaccgcgcgcgcctcgatgccagccgcctccttctctattcctcgcagatctgcaagggcatggagtacctgggctcccgccgctgcgtgcaccgcgacctggccgcccgaaacatcctcgtggagagcgaggcacacgtcaagatcgctgacttcggcctagctaagctgctgccgcttgacaaagactactacgtggtccgcgagccaggccagagccccattttctggtatgcccccgaatccctctcggacaacatcttctctcgccagtcagacgtctggagcttcggggtcgtcctgtacgagctcttcacctactgcgacaaaagctgcagcccctcggccgagttcctgcggatgatgggatgtgagcgggatgtccccgccctctgccgcctcttggaactgctggaggagggccagaggctgccggcgcctcctgcctgccctgctgaggttcacgagctcatgaagctgtgctgggcccctagcccacaggaccggccatcattcagcgccctgggcccccagctggacatgctgtggagcggaagccgggggtgtgagactcatgccttcactgctcacccagagggcaaacaccactccctgtccttttcatagctcctgcccgcagacctctggattaggtctctgttgactggctgtgtgaccttaggcccggagctgcccctctctgggcctcagaggccttatgagggtcctctacttcaggaacacccccatgacattgcatttgggggggctcccgtggcctgtagaatagcctgtggcctttgcaatttgttaaggttcaagacagatgggcatatgtgtcagtggggctctctgagtcctggcccaaagaagcaaggaaccaaatttaagactctcgcatcttcccaaccccttaagccctggccccctgagtttccttttctgtctctctctttttattttttttatttttatttttatttttgagacagagcctcgctctgttacccagggtggagtgcagtggtgcgatctcggctcagtgcaacctctgcttcccaggttcaagcgattctcctgcctcagcctcccgagtagctgggattacaggtgtgcaccaccacacccggctaattttttttatttttaatagagatgaggtttcaccatgatggccaggctgatctcgaactcctaacctcaagtgatcctcccacctcagcctcccaaagtgttggaataataggcatgagccactgcacccaggcttttttttttttaaatttattattattatttttaagagacaggatcttgctacgttgcccaggctggtcttgaactcctgggctacagtgatcctcctgccttatcctcctaaatagctgggactacagcacctagttttgagtttcctgtcttatttccaatggggacattcatgtagctttttttttttttttttttttgagacggagtctcgctctgtcgcccaggctggagtacagtggcgcaatctaggctcactgcaagctccgcctcctgggttcacaccattctctcgcctcagcctcccaagtagctgggactacaggcgcccgccaccacacccggctaattttttgtatttttagtagagacggggtttcaccttgttagccaggatggtttccatctcctgacctcgtgatctgcccgtctcggcctcccaaagtgctgggattacaggcatgagccactgcgcccggccctcatgtagctttaaatgtatgatctgacttctgctccccgatctctgtttctctggaggaagccaaggacaagagcagttgctgtggctgggactctgccttttaggggagcccgtgtatctctttgggatcctgaaagggggcaggaaaggctggggtcccagtccaccctaatggtatctgagtgtcctagggcttcagttttcccacctgtccaatgggaccctttctgtcctcaccctacaaggggcacaaagggatgacaccaaacctggcaggaacttttcacgcaatcaagggaaggaaaggcattcctggcagagggaacagcatgccaagcgtgagaaggctcagagtaaggaggttaagagcccaagtattggagcctacagttttgccccttccatgcagtgtgacagtgggcaagttcctttccctctctgggtctcagttctgtcccctgcaaaatggtcagagcttaccccttggctgtgcagggtcaactttctgactggtgagagggattctcatgcaggttaagcttctgctgctcctcctcacctgcaaagcttttctgccacttttgcctccttggaaaactcttatccatctctcaaaactccagctaccacatccttgcagccttccctcatatacccccactactactgtagccctgtccttccctccagccccactctggccctggggctggggaagtgtctgtgtccagctgtctcccctgacctcagggttccttgggggctgggctgaggcctcagtacagagggggctctggaaatgtttgttgactgaataaaggaattcagtgg

SEQ ID NO: 276321 - DNA, 3996 bp, Artificial Sequence
  derived and/or modified sequence
ttctctctgtgccccaggcaagttgcactcatggcacctccaagtgaagagacgcccctgatccctcagcgttcatgcagcctcttgtccacggaggctggtgccctgcatgtgctgctgcccgctcggggccccgggcccccccagcgcctatctttctcctttggggaccacttggctgaggacctgtgcgtgcaggctgccaaggccagcggcatcctgcctgtgtaccactccctctttgctctggccacggaggacctgtcctgctggttccccccgagccacatcttctccgtggaggatgccagcacccaagtcctgctgtacaggattcgcttttacttccccaattggtttgggctggagaagtgccaccgcttcgggctacgcaaggatttggccagtgctatccttgacctgccagtcctggagcacctctttgcccagcaccgcagtgacctggtgagtgggcgcctccccgtgggcctcagtctcaaggagcagggtgagtgtctcagcctggccgtgttggacctggcccggatggcgcgagagcaggcccagcggccgggagagctgctgaagactgtcagctacaaggcctgcctacccccaagcctgcgcgacctgatccagggcctgagcttcgtgacgcggaggcgtattcggaggacggtgcgcagagccctgcgccgcgtggccgcctgccaggcagaccggcactcgctcatggccaagtacatcatggacctggagcggctggatccagccggggccgccgagaccttccacgtgggcctccctggggcccttggtggccacgacgggctggggctgctccgcgtggctggtgacggcggcatcgcctggacccagggagaacaggaggtcctccagcccttctgcgactttccagaaatcgtagacattagcatcaagcaggccccgcgcgttggcccggccggagagcaccgcctggtcactgttaccaggacagacaaccagattttagaggccgagttcccagggctgcccgaggctctgtcgttcgtggcgctcgtggacggctacttccggctgaccacggactcccagcacttcttctgcaaggaggtggcaccgccgaggctgctggaggaagtggccgagcagtgccacggccccatcactctggactttgccatcaacaagctcaagactgggggctcacgtcctggctcctatgttctccgccgcagcccccaggactttgacagcttcctcctcactgtctgtgtccagaacccccttggtcctgattataagggctgcctcatccggcgcagccccacaggaaccttccttctggttggcctcagccgaccccacagcagtcttcgagagctcctggcaacctgctgggatggggggctgcacgtagatggggtggcagtgaccctcacttcctgctgtatccccagacccaaagaaaagtccaacctgatcgtggtccagagaggtcacagcccacccacatcatccttggttcagccccaatcccaataccagctgagtcagatgacatttcacaagatccctgctgacagcctggagtggcatgagaacctgggccatgggtccttcaccaagatttaccggggctgtcgccatgaggtggtggatggggaggcccgaaagacagaggtgctgctgaaggtcatggatgccaagcacaagaactgcatggagtcattcctggaagcagcgagcttgatgagccaagtgtcgtaccggcatctcgtgctgctccacggcgtgtgcatggctggagacagcaccatggtgcaggaatttgtacacctgggggccatagacatgtatctgcgaaaacgtggccacctggtgccagccagctggaagctgcaggtggtcaaacagctggcctacgccctcaactatctggaggacaaaggcctgccccatggcaatgtctctgcccggaaggtgctcctggctcgggagggggctgatgggagcccgcccttcatcaagctgagtgaccctggggtcagccccgctgtgttaagcctggagatgctcaccgacaggatcccctgggtggcccccgagtgtctccgggaggcgcagacacttagcttggaagctgacaagtggggcttcggcgccacggtctgggaagtgtttagtggcgtcaccatgcccatcagtgccctggatcctgctaagaaactccaattttatgaggaccggcagcagctgccggcccccaagtggacagagctggccctgctgattcaacagtgcatggcctatgagccggtccagaggccctccttccgagccgtcattcgtgacctcaatagcctcatctcttcagactatgagctcctctcagaccccacacctggtgccctggcacctcgtgatgggctgtggaatggtgcccagctctatgcctgccaagaccccacgatcttcgaggagagacacctcaagtacatctcacagctgggcaagggcaactttggcagcgtggagctgtgccgctatgacccgctaggcgacaatacaggtgccctggtggccgtgaaacagctgcagcacagcgggccagaccagcagagggactttcagcgggagattcagatcctcaaagcactgcacagtgatttcattgtcaagtatcgtggtgtcagctatggcccgggccgccagagcctgcggctggtcatggagtacctgcccagcggctgcttgcgcgacttcctgcagcggcaccgcgcgcgcctcgatgccagccgcctccttctctattcctcgcagatctgcaagggcatggagtacctgggctcccgccgctgcgtgcaccgcgacctggccgcccgaaacatcctcgtggagagcgaggcacacgtcaagatcgctgacttcggcctagctaagctgctgccgcttgacaaagactactacgtggtccgcgagccaggccagagccccattttctggtatgcccccgaatccctctcggacaacatcttctctcgccagtcagacgtctggagcttcggggtcgtcctgtacgagctcttcacctactgcgacaaaagctgcagcccctcggccgagttcctgcggatgatgggatgtgagcgggatgtccccgccctctgccgcctcttggaactgctggaggagggccagaggctgccggcgcctcctgcctgccctgctgaggttcacgagctcatgaagctgtgctgggcccctagcccacaggaccggccatcattcagcgccctgggcccccagctggacatgctgtggagcggaagccgggggtgtgagactcatgccttcactgctcacccagagggcaaacaccactccctgtccttttcatagctcctgcccgcagacctctggattaggtctctgttgactggctgtgtgaccttaggcccggagctgcccctctctgggcctcagaggccttatgagggtcctctacttcaggaacacccccatgacattgcatttgggggggctcccgtggcctgtagaatagcctgtggcctttgcaatttgttaaggttcaagacagatgggcatatgtgtcagtggggctctctgagtcctggcccaaagaagcaaggaaccaaatttaagactctcgcatcttcccaaccccttaagccctggccccctgagtttccttttctgtctctctctttttattttttttatttttatttttatttttgagacagagcctcgctctgttacccagggtggagtgcagtggtgcgatctcggctcagtgcaacctctgcttcccaggttcaagcgattctcctgcctcagcctcccgagtagctgggattacaggtgtgcaccaccacacccggctaattttttttatttttaatagagatgaggtttcaccatgatggccaggctgatctcgaactcctaacctcaagtgatcctcccacc

SEQ ID NO: 276322 - DNA, 3612 bp, Artificial Sequence
  derived and/or modified sequence
cgagtgggactttcctctcgctgcctcccggctctgcccgcccttcgaaagtccagggtccctgcccgctaggcaagttgcactcatggcacctccaagtgaagagacgcccctgatccctcagcgttcatgcagcctcttgtccacggaggctggtgccctgcatgtgctgctgcccgctcggggccccgggcccccccagcgcctatctttctcctttggggaccacttggctgaggacctgtgcgtgcaggctgccaaggccagcggcatcctgcctgtgtaccactccctctttgctctggccacggaggacctgtcctgctggttccccccgagccacatcttctccgtggaggatgccagcacccaagtcctgctgtacaggattcgcttttacttccccaattggtttgggctggagaagtgccaccgcttcgggctacgcaaggatttggccagtgctatccttgacctgccagtcctggagcacctctttgcccagcaccgcagtgacctggtgagtgggcgcctccccgtgggcctcagtctcaaggagcagggtgagtgtctcagcctggccgtgttggacctggcccggatggcgcgagagcaggcccagcggccgggagagctgctgaagactgtcagctacaaggcctgcctacccccaagcctgcgcgacctgatccagggcctgagcttcgtgacgcggaggcgtattcggaggacggtgcgcagagccctgcgccgcgtggccgcctgccaggcagaccggcactcgctcatggccaagtacatcatggacctggagcggctggatccagccggggccgccgagaccttccacgtgggcctccctggggcccttggtggccacgacgggctggggctgctccgcgtggctggtgacggcggcatcgcctggacccagggagaacaggaggtcctccagcccttctgcgactttccagaaatcgtagacattagcatcaagcaggccccgcgcgttggcccggccggagagcaccgcctggtcactgttaccaggacagacaaccagattttagaggccgagttcccagggctgcccgaggctctgtcgttcgtggcgctcgtggacggctacttccggctgaccacggactcccagcacttcttctgcaaggaggtggcaccgccgaggctgctggaggaagtggccgagcagtgccacggccccatcactctggactttgccatcaacaagctcaagactgggggctcacgtcctggctcctatgttctccgccgcagcccccaggactttgacagcttcctcctcactgtctgtgtccagaacccccttggtcctgattataagggctgcctcatccggcgcagccccacaggaaccttccttctggttggcctcagccgaccccacagcagtcttcgagagctcctggcaacctgctgggatggggggctgcacgtagatggggtggcagtgaccctcacttcctgctgtatccccagacccaaagaaaagtccaacctgatcgtggtccagagaggtcacagcccacccacatcatccttggttcagccccaatcccaataccagctgagtcagatgacatttcacaagatccctgctgacagcctggagtggcatgagaacctgggccatgggtccttcaccaagatttaccggggctgtcgccatgaggtggtggatggggaggcccgaaagacagaggtgctgctgaaggtcatggatgccaagcacaagaactgcatggagtcattcctggaagcagcgagcttgatgagccaagtgtcgtaccggcatctcgtgctgctccacggcgtgtgcatggctggagacagcaccatggtgcaggaatttgtacacctgggggccatagacatgtatctgcgaaaacgtggccacctggtgccagccagctggaagctgcaggtggtcaaacagctggcctacgccctcaactatctggaggacaaaggcctgccccatggcaatgtctctgcccggaaggtgctcctggctcgggagggggctgatgggagcccgcccttcatcaagctgagtgaccctggggtcagccccgctgtgttaagcctggagatgctcaccgacaggatcccctgggtggcccccgagtgtctccgggaggcgcagacacttagcttggaagctgacaagtggggcttcggcgccacggtctgggaagtgtttagtggcgtcaccatgcccatcagtgccctggatcctgctaagaaactccaattttatgaggaccggcagcagctgccggcccccaagtggacagagctggccctgctgattcaacagtgcatggcctatgagccggtccagaggccctccttccgagccgtcattcgtgacctcaatagcctcatctcttcagactatgagctcctctcagaccccacacctggtgccctggcacctcgtgatgggctgtggaatggtgcccagctctatgcctgccaagaccccacgatcttcgaggagagacacctcaagtacatctcacagctgggcaagggcaactttggcagcgtggagctgtgccgctatgacccgctaggcgacaatacaggtgccctggtggccgtgaaacagctgcagcacagcgggccagaccagcagagggactttcagcgggagattcagatcctcaaagcactgcacagtgatttcattgtcaagtatcgtggtgtcagctatggcccgggccgccagagcctgcggctggtcatggagtacctgcccagcggctgcttgcgcgacttcctgcagcggcaccgcgcgcgcctcgatgccagccgcctccttctctattcctcgcagatctgcaagggcatggagtacctgggctcccgccgctgcgtgcaccgcgacctggccgcccgaaacatcctcgtggagagcgaggcacacgtcaagatcgctgacttcggcctagctaagctgctgccgcttgacaaagactactacgtggtccgcgagccaggccagagccccattttctggtatgcccccgaatccctctcggacaacatcttctctcgccagtcagacgtctggagcttcggggtcgtcctgtacgagctcttcacctactgcgacaaaagctgcagcccctcggccgagttcctgcggatgatgggatgtgagcgggatgtccccgccctctgccgcctcttggaactgctggaggagggccagaggctgccggcgcctcctgcctgccctgctgaggtgagcgccgcagggctagcctcagtttcccagtctgtagattgggccggggtctcgggcaagccagctggcgcctgagtctctgtactgagaagaaaggctagagtgtgaggccgatgaggatcctggcccccacttggctactctctcactgtgtggcaagtcagagcactttcagagcctcagtttacccttttccaaaatgagaatagtaatgccttatagggtgagggaagattagactcctgaacacctgtgcctatgagggctcagctcaaagccgagcacacagtcgatgctccataaatggtggtgacgtt

SEQ ID NO: 276323 - protein, 560 aa, Artificial Sequence
  derived and/or modified sequence
AGPRAACSEPNPCTQVVMNSHSYNGSVGRPLGSGPGALGRDPPDPEAGHPPQPPHSPGLQVVVAKSEPARPSPGSPRGQPQDQDDDEDDEEDEAGRQRASGKPSNVGHRLGHRRALFEKRKRLSDYALIFGMFGIVVMVTETELSWGVYTKESLYSFALKCLISLSTAILLGLVVLYHAREIQLFMVDNGADDWRIAMTCERVFLISLELAVCAIHPVPGHYRFTWTARLAFTYAPSVAEADVDVLLSIPMFLRLYLLGRVMLLHSKIFTDASSRSIGALNKITFNTRFVMKTLMTICPGTVLLVFSISSWIIAAWTVRVCERYHDKQEVTSNFLGAMWLISITFLSIGYGDMVPHTYCGKGVCLLTGIMGAGCTALVVAVVARKLELTKAEKHVHNFMMDTQLTKRVKNAAANVLRETWLIYKHTRLVKKPDQARVRKHQRKFLQAIHHGRMLRSVKIEQGKLNDQANTLTDLAKTQTVMYDLVSELHAQHEELEARLATLESRLDALGASLQALPGLIAQAIRPPPPPLPPRPGPGPQDQAARSSPCRWTPVAPSDCG

SEQ ID NO: 276324 - protein, 409 aa, Artificial Sequence [sequence omitted]

SEQ ID NO: 276325 - DNA, 2657 bp, Artificial Sequence
  derived and/or modified sequence
ggtggtctgagctggagccacgctttctgttggagggggcagctgaaggagaacagcaagacatatccggcggccctacggactcggagagctggagggaccccggagatctcaaagggacaggaaaggcagcagcagccaccctctctcccagtcaagtggtcaccagcaggactgaaggggacagcccctttgcagtggctcggcgaggagacccctgcaccctagggtcagtgcaggagcccagccgctgagccatgccgggccccgggcggcctgcagcgagcccaacccctgcacccaggtagtcatgaacagccacagctacaatggcagcgtggggcggccgctgggcagcgggccgggcgccctgggacgagaccctccggaccctgaggccggccaccccccacaacccccgcacagcccgggcctccaggtggtagtggccaagagtgagccagcccggccctcacccggcagcccccgggggcagccccaggaccaggacgatgacgaggatgatgaggaagatgaggccggcaggcagagagcctcggggaaaccctcaaatgtgggccaccgcctgggccaccggcgggcgctcttcgagaagcggaagcgcctcagcgactatgccctcattttcggcatgtttggcatcgtcgtcatggtgacggagaccgagctgtcctggggggtgtacaccaaggagtctctgtactcattcgcactcaaatgcctcatcagcctctccacggccatcctgctgggtctcgttgtcctctaccatgcccgggagatccagctgttcatggtggacaacggggctgatgactggcgcatcgccatgacctgcgagcgcgtgttcctcatctcgctagagctggcagtgtgcgccattcacccggtgcccggccactaccgcttcacgtggacggcgcggctggccttcacgtacgcgccctcggtggccgaggccgacgtggacgtgctgctgtccatccccatgttcctgcgcctctacctgctgggccgggtgatgctactgcacagcaaaatcttcacggacgcctcgagccgcagcatcggggccctcaacaagatcaccttcaacacgcgcttcgtcatgaagacactcatgaccatctgccccggcaccgtgctgctggtcttcagcatctcctcctggatcatcgcagcctggaccgtgcgcgtctgcgagaggtaccacgacaagcaggaagtgaccagcaacttcctgggggccatgtggctgatttccatcaccttcctctccattggctacggcgacatggtgccccacacctactgcgggaagggtgtgtgcctgctcactggcatcatgggagctggctgtaccgcgctcgtggtggctgtggtggctcggaagctggagctcaccaaggctgagaagcacgtgcacaacttcatgatggacactcagctcaccaagcgggtaaaaaacgccgctgctaacgttctcagggagacgtggctcatctacaaacataccaggctggtgaagaagccagaccaagcccgggttcggaaacaccagcgtaagttcctccaagccatccatcatggcaggatgctccggagtgtgaagatcgagcaagggaagctgaacgaccaggctaacacgcttaccgacctagccaagacccagaccgtcatgtacgaccttgtatcggagctgcacgctcagcacgaggagctggaggcccgcctggccaccctggaaagccgcttggatgcgctgggtgcctctctacaggccctgcctggcctcatcgcccaagccatacgcccacccccgcctcccctgcctcccaggcccggccccggcccccaagaccaggcagcccggagctccccctgccggtggacgcccgtggccccctcggactgcgggtgacggccctgcccgccaccagacccctaaatcttggccatcgtgtggccgccacctccgggaagccttgtacagtggcgcctcttggagttcaagaagccaacgctgagtcaggctgagtggactgaggcctgccccgcccagactgcccaggcagagggcagggctggaccatgggtgagggcaggggagcccggagcttcctctggtcacctggtcccccgactctccccaggcccccggtgggcatggagcagcccggggaggggtccgtgctggttctgaataaagcaggacccgcctagtggctgcctgtgtgcatggctggaaggcactggtgatgtcccaggaggtagacctccagccctgggtaccaagatgaatgtgggaatcagaaaaacctgttcccatcaccggcctagcctagaatcctagcctagaagccctctctccctctgggctggagctcagtgagggacaactctctagggacacctgtaccagccccacctggcgctgagatccctcagacagcatggcccagccctggccagaagcatcgctccccttcaaccaaccgcgttgatggacacccactgtgtgccaggccccagcggggcccatgggggaggtgacctgggtgaggaaggtcatttgggtttttgtgagatttgtattgagcacctgctgtctacagagaatgtgatgatgtcaatta

SEQ ID NO: 276326 - DNA, 1683 bp, Artificial Sequence
  derived and/or modified sequence
gccggccccagagccgcctgcagcgagcccaacccctgcacccaggtggtgatgaacagccacagctacaacggcagcgtgggcagacccctgggcagcggccccggcgccctgggcagagacccccccgaccccgaggccggccaccccccccagcccccccacagccccggcctgcaggtggtggtggccaagagcgagcccgccagacccagccccggcagccccagaggccagccccaggaccaggacgacgacgaggacgacgaggaggacgaggccggcagacagagagccagcggcaagcccagcaacgtgggccacagactgggccacagaagagccctgttcgagaagagaaagagactgagcgactacgccctgatcttcggcatgttcggcatcgtggtgatggtgaccgagaccgagctgagctggggcgtgtacaccaaggagagcctgtacagcttcgccctgaagtgcctgatcagcctgagcaccgccatcctgctgggcctggtggtgctgtaccacgccagagagatccagctgttcatggtggacaacggcgccgacgactggagaatcgccatgacctgcgagagagtgttcctgatcagcctggagctggccgtgtgcgccatccaccccgtgcccggccactacagattcacctggaccgccagactggccttcacctacgcccccagcgtggccgaggccgacgtggacgtgctgctgagcatccccatgttcctgagactgtacctgctgggcagagtgatgctgctgcacagcaagatcttcaccgacgccagcagcagaagcatcggcgccctgaacaagatcaccttcaacaccagattcgtgatgaagaccctgatgaccatctgccccggcaccgtgctgctggtgttcagcatcagcagctggatcatcgccgcctggaccgtgagagtgtgcgagagataccacgacaagcaggaggtgaccagcaacttcctgggcgccatgtggctgatcagcatcaccttcctgagcatcggctacggcgacatggtgccccacacctactgcggcaagggcgtgtgcctgctgaccggcatcatgggcgccggctgcaccgccctggtggtggccgtggtggccagaaagctggagctgaccaaggccgagaagcacgtgcacaacttcatgatggacacccagctgaccaagagagtgaagaacgccgccgccaacgtgctgagagagacctggctgatctacaagcacaccagactggtgaagaagcccgaccaggccagagtgagaaagcaccagagaaagttcctgcaggccatccaccacggcagaatgctgagaagcgtgaagatcgagcagggcaagctgaacgaccaggccaacaccctgaccgacctggccaagacccagaccgtgatgtacgacctggtgagcgagctgcacgcccagcacgaggagctggaggccagactggccaccctggagagcagactggacgccctgggcgccagcctgcaggccctgcccggcctgatcgcccaggccatcagacccccccccccccccctgccccccagacccggccccggcccccaggaccaggccgccagaagcagcccctgcagatggacccccgtggcccccagcgactgcggctag

SEQ ID NO: 276327 - DNA, 1683 bp, Artificial Sequence
  derived and/or modified sequence
gctggcccaagagccgcttgttccgaaccaaacccctgtacccaggtggtgatgaattcacactcctacaatggatccgtcgggcgccctcttgggtccggccctggggcacttggtagggacccaccggacccggaagccgggcatccaccgcagcccccacacagccctggtctgcaagtggttgtggccaagagtgaacccgcacgaccgtcccccggcagccctcgggggcaacctcaggatcaggatgatgatgaggatgatgaggaggacgaggccggaagacagagggcgagtggtaagccgtcaaacgtcggtcacaggttaggccataggcgggccttgttcgagaagaggaaacgattaagcgattatgctctgatattcggcatgtttgggatcgtggtgatggtgacagaaacggagctgagctggggggtgtataccaaagaatcattgtactcttttgcgcttaagtgtctgatctctctgtctaccgcaattttattgggcttagtcgtactatatcacgcccgagaaatccagctatttatggtcgataatggagccgacgactggagaattgcgatgacttgcgagcgcgtgttcttgataagccttgagttggccgtctgtgcaatccaccccgtgcctggacattatcggttcacttggactgctagacttgcgtttacttacgccccaagtgtggcagaggccgacgtggatgttttactcagtattcctatgtttctgaggctctatctcttagggcgggtgatgctcctgcactcgaagatatttactgacgcttctagccgttccatcggtgctctgaacaaaattaccttcaatacacgtttcgtgatgaagacactgatgaccatatgtccagggacggtgcttctggtcttcagcatctcaagttggattatcgccgcgtggaccgtccgagtgtgcgaaagataccatgacaagcaagaggttacttccaattttctgggcgctatgtggttgatctccatcacctttttgtctataggatacggcgatatggtcccccatacttattgcggcaagggcgtgtgcttgctcacagggataatgggcgccggatgcaccgctctggtcgtggctgtggtggcgagaaaactggagttgactaaggcggaaaagcacgtgcataacttcatgatggacactcagctgacaaaaagggtcaagaacgctgctgctaatgtgctgagagaaacgtggttgatatataagcatactagactggtgaaaaaacccgatcaggcccgcgttcgcaagcaccagaggaaatttctacaggccatccaccatgggcggatgttaagatctgttaagatagagcagggcaaattaaacgatcaggcaaataccctcaccgatctggccaaaactcagacggtcatgtatgatttagtctcagagcttcatgcccagcatgaggaactcgaagcccgcctcgccacacttgagagccgcttagatgccctaggagcttcattacaagccctccccgggctcatcgctcaggccatccgtccccctccccctcctctgccccccagacctggaccaggtccgcaagaccaggctgctcggtccagcccctgccgctggacaccggtagccccctcagactgcgggtag

SEQ ID NO: 276328 - DNA, 1683 bp, Artificial Sequence
  derived and/or modified sequence
gctggccccagggctgcctgcagcgagcccaacccctgcacccaggtggtgatgaacagccacagctacaacggctctgtgggccggcccctgggcagcggccctggggccctgggccgggaccccccagaccctgaggccggccaccccccccagcccccccacagccctggcctgcaggtggtggtggccaagtctgagcccgcccggcccagccctggcagcccccggggccagccccaggaccaggatgatgatgaagatgatgaagaagatgaggccggccggcagagggccagcggcaagcccagcaatgtgggccaccggctgggccacagaagagccctgtttgagaagaggaagaggctgagtgactatgccctgatcttcggcatgtttggaattgtggtgatggtgacagaaacagagctgtcctggggcgtgtacaccaaggagagcctgtacagctttgccctgaagtgcctgatcagcctgagcacagccatcctgctgggcctggtggtgctgtaccacgcccgggagatccagctgttcatggtggacaatggagcagatgactggagaattgccatgacctgtgagagggtcttcctgatcagcctggagctggccgtgtgtgccatccaccctgtgcccggccactaccgcttcacctggacagcccggctggccttcacctacgcccccagcgtggccgaggctgatgtggatgtgctgctgagcatccccatgttcctgcggctgtacctgctgggccgggtgatgctgctgcacagcaagatcttcacagatgccagcagccgcagcattggagccctgaacaagatcaccttcaacaccaggtttgtgatgaagaccctgatgaccatctgccccggcaccgtgctgctggtgttcagcatcagctcctggatcatcgccgcctggacagtgcgggtgtgtgagcgctaccatgacaagcaggaggtgaccagcaacttcctgggcgccatgtggctgatcagcatcaccttcctgagcatcggctacggggacatggtgccccacacctactgtgggaaaggagtgtgcctgctgaccggcatcatgggcgccggctgcacagccctggtggtggccgtggtggccaggaagctggagctgaccaaggccgagaagcacgtgcacaacttcatgatggacacccagctgaccaagagggtgaagaatgctgctgccaacgtgctgcgggagacctggctgatctacaagcacacccggctggtgaagaagccagaccaggcccgggtgaggaagcaccagaggaagttcctgcaggccatccaccacggccgcatgctgcggtctgtgaagattgagcagggcaagctgaatgaccaggccaacaccctgacagacctggccaagacccagacagtgatgtatgacctggtgtctgagctgcacgcccagcacgaggagctggaggcccggctggccaccctggagagccggctggatgccctgggcgccagcctgcaggccctgcccggcctcatcgcccaggccatccggcccccacctccacccctgccccccaggcctggccctggcccccaggaccaggccgcccggagcagcccctgccgctggacccctgtggcccccagcgactgtggctag

SEQ ID NO: 276329 - DNA, 1683 bp, Artificial Sequence
  derived and/or modified sequence
gccggcccccgggccgcctgcagcgagcccaacccctgcacccaggtggtaatgaactctcactcttacaacggttctgtggggaggcctctgggatctggtcccggagccttggggcgcgacccaccagaccccgaagcaggccaccccccacagcccccccatagcccagggctccaagtcgtggtggcaaaaagcgagccggcccgaccgagcccagggtcgcccaggggacaaccacaggaccaggatgacgatgaagacgacgaagaagatgaagctgggcggcagagagcctctggaaagccatccaatgttggccaccgcctgggacacaggcgcgccctgttcgagaaacggaaaaggctttctgattacgcactgatcttcggcatgtttggcatagtcgttatggtcacggagactgagctttcctggggcgtctatactaaagaatctctgtattcctttgcactgaagtgtctgatttctctgtcaacagctatcctcctggggctcgtggtactctaccacgccagggagatccagctgttcatggtagacaacggcgccgatgactggaggattgcgatgacctgcgaacgggtgttcctgattagcctggagttagcggtgtgtgctatccacccagtccccggtcactacagattcacatggaccgccagactggcctttacttacgcgcctagcgttgcggaggctgacgtggacgttcttctgagtatcccaatgttcctccggctatacctgctcggtagggtcatgctgctccattccaaaatctttaccgatgcgagctcacgcagtataggagctttaaacaagattacctttaatactcgatttgtgatgaagaccctcatgaccatctgtcccggcacagttctgctcgtgttctctataagtagttggattatcgccgcatggaccgtgcgcgtttgcgagcgttaccacgataaacaggaagttacttccaactttctcggggccatgtggctcatcagtatcacattcttgtcaataggttacggcgacatggttccgcatacctactgtggcaagggcgtgtgccttctgactggcatcatgggcgctggctgcactgctctggtggtagccgtagtggcacgcaagctggagcttacgaaggcggaaaagcacgttcataactttatgatggatacccagctgacaaaacgagtgaagaacgccgccgcgaacgtgttgcgggagacctggttgatctataagcatactcggctggtaaagaagcccgaccaggccagagtaagaaagcaccagcgcaagtttctgcaagctatccatcacggccgaatgcttcgcagtgtaaaaattgagcaagggaagctgaacgaccaagccaacaccctcacagacttggccaaaacacagaccgtgatgtatgatctcgttagcgagctgcacgcccagcatgaggagttagaggcccgcctagcgactctagaatccagactggacgcacttggcgcctctctccaggccttgccagggttaattgcccaagcaatccgcccgccaccacctccgttgcctccacggcctgggcctggacctcaggaccaggccgcacgttcgagcccttgccgatggactccagtcgctcccagcgactgtggttag

SEQ ID NO: 276330 - DNA, 1683 bp, Artificial Sequence
  derived and/or modified sequence
gcgggacccagagctgcatgctcagagcctaacccctgtactcaggttgttatgaattcgcatagctataacggctccgtgggacgccctctcggctcaggtcctggtgcccttggcagggatccaccagatcctgaggctggccacccacctcaacctcctcactcgcccggactgcaggtggtggtagctaaatctgaacccgctcgcccttcccccggtagcccccgaggccaaccacaagatcaggatgacgatgaggacgatgaggaagacgaggctgggagacagagagcctctgggaaacctagcaacgtcggacacagactcggccatcggcgagctctctttgagaagagaaaaaggctatcagattacgcattgatttttggcatgttcggaattgtggtgatggtaacagagactgagctcagttggggtgtatacaccaaggaaagcctgtattccttcgccctgaaatgccttatcagtctctcaactgccattctgttggggctggttgttctttatcacgcccgagagatccaactatttatggtcgacaatggggctgacgattggagaatagcaatgacatgcgagcgtgtgttcttgatcagcctcgaactggccgtgtgcgctatacatcctgtgccagggcactatcgtttcacttggaccgcacgactggctttcacctacgccccatccgtagctgaagccgacgtcgacgttctcctgtccattcctatgtttctgcgcctgtacctccttggaagggtgatgctgctgcactctaagatttttactgatgcatcatccagatcaatcggtgccctcaataaaattaccttcaacactaggttcgtgatgaagaccctgatgaccatctgccctggaactgttctgctggtgttctccattagctcttggattatcgccgcttggactgtccgtgtttgcgagaggtaccacgataagcaggaggtgactagtaacttcttgggagccatgtggctgatctctattacattcctgagtattggatacggcgacatggtgccccacacatactgtggtaagggtgtctgcctgcttactggcatcatgggtgccggatgtacggccctggtggtagctgtcgtggccaggaagctcgaactcaccaaagccgagaaacacgtacataatttcatgatggatacccagctgacaaagcgcgtcaagaacgctgccgctaatgtccttcgcgagacctggctgatttacaagcacacacgcttggtcaagaaacctgaccaggccagggttcgaaaacatcagcgcaagttcctacaggccatccaccacggcaggatgctacgcagtgtgaaaatcgagcagggaaagctcaacgaccaagcgaacacactgactgaccttgctaaaactcagaccgtaatgtatgatctggtcagcgagctgcatgcccagcatgaagaactggaggcaagattggccacccttgagtcccggctagatgctctgggcgcttctttacaggcactgcccggtctgattgcgcaggcaattcgccctccccctccaccgttgcccccaaggcctggcccaggaccacaggatcaggcggctcggtcttccccatgtcgctggacgcccgtggccccttccgactgtgggtag

SEQ ID NO: 276331 - DNA, 1575 bp, Artificial Sequence
  derived and/or modified sequence
cttcgcgctcgggcagggcgcagggactccggctgcggcggccgactccggccgatctcaaagggacaggaaaggcagcagcagccaccctctctcccagtcaagtggtcaccagcaggactgaaggggacagcccctttgcagtggctcggcgaggagacccctgcaccctagggtcagtgcaggagcccagccgctgagccatgccgggccccgggcggcctgcagcgagcccaacccctgcacccaggtagtcatgaacagccacagctacaatggcagcgtggggcggccgctgggcagcgggccgggcgccctgggacgagaccctccggaccctgaggccggccaccccccacaacccccgcacagcccgggcctccaggtggtagtggccaagagtgagccagcccggccctcacccggcagcccccgggggcagccccaggaccaggacgatgacgaggatgatgaggaagatgaggccggcaggcagagagcctcggggaaaccctcaaatgtgggccaccgcctgggccaccggcgggcgctcttcgagaagcggaagcgcctcagcgactatgccctcattttcggcatgtttggcatcgtcgtcatggtgacggagaccgagctgtcctggggggtgtacaccaaggagtctctgtactcattcgcactcaaatgcctcatcagcctctccacggccatcctgctgggtctcgttgtcctctaccatgcccgggagatccagctgttcatggtggacaacggggctgatgactggcgcatcgccatgacctgcgagcgcgtgttcctcatctcgctagagctggcagtgtgcgccattcacccggtgcccggccactaccgcttcacgtggacggcgcggctggccttcacgtacgcgccctcggtggccgaggccgacgtggacgtgctgctgtccatccccatgttcctgcgcctctacctgctgggccgggtgatgctactgcacagcaaaatcttcacggacgcctcgagccgcagcatcggggccctcaacaagatcaccttcaacacgcgcttcgtcatgaagacactcatgaccatctgccccggcaccgtgctgctggtcttcagcatctcctcctggatcatcgcagcctggaccgtgcgcgtctgcgagaggtaccacgacaagcaggaagtgaccagcaacttcctgggggccatgtggctgatttccatcaccttcctctccattggctacggcgacatggtgccccacacctactgcgggaagggtgtgtgcctgctcactggcatcatgggagctggctgtaccgcgctcgtggtggctgtggtggctcggaagctggagctcaccaaggctgagaagcacgtgcacaacttcatgatggacactcagctcaccaagcgggtaaaaaacgccgctgctaacgttctcagggagacgtggctcatctgtaaaatggggtgacagtctatttaaccagaactccctaaaaagggccaggcaactggtaggtgctcaataaatgctccttcccgcctgagggatcacactgg

SEQ ID NO: 276332 - protein, 20 aa, Artificial Sequence
  derived and/or modified sequence
GSSVHVLYSTPACYLWELNK

SEQ ID NO: 276333 - protein, 460 aa, Artificial Sequence
  derived and/or modified sequence
MLPACRLQDEFHPFIEALLPHVRAFSYTWFNLQARKRKYFKKHEKRMSKDEERAVKDELLGEKPEIKQKWASRLLAKLRKDIRPEFREDFVLTITGKKPPCCVLSNPDQKGKIRRIDCLRQADKVWRLDLVMVILFKGIPLESTDGERLYKSPQCSNPGLCVQPHHIGVTIKELDLYLAYFVHTPESGQSDSSNQQGDADIKPLPNGHLSFQDCFVTSGVWNVTELVRVSQTPVATASGPNFSLADLESPSYYNINQVTLGRRSITSPPSTSTTKRPKSIDDSEMESPVDDVFYPGTGRSPAAGSSQSSGWPNDVDAGSPRATASALHFPSTSIIQQSSPYFTHPTIRYHHHHGQDSLKEFVQFVCSDGSGQATGQPNGSGQGKVPGSFLLPPPPPVARPVPLPMPDSKSTSTAPDGAALTPPSPSFATTGASSANRFVSIGPRDGNFLNIPQQSQSWFL

SEQ ID NO: 276334 - DNA, 1383 bp, Artificial Sequence
  derived and/or modified sequence
atgctccctgcatgtcgccttcaagacgaatttcacccgtttatcgaggccctcctgccccatgtgagagctttttcctacacttggttcaatttgcaggcccggaaacgtaagtatttcaagaaacacgagaaaaggatgtcaaaggacgaggaacgcgccgtcaaggacgaattactcggggagaaaccggaaatcaagcaaaaatgggcaagcaggctgttggccaaattgcgtaaagatatccgtcctgaatttcgcgaagacttcgtgcttaccattacagggaagaagcccccgtgctgcgtgctgtctaacccagaccaaaaaggcaagattcggagaatcgattgtctgagacaggccgataaggtgtggcgcttggatcttgtcatggtgattttatttaagggtatccctcttgaatccaccgacggtgagaggttgtacaagtcaccccagtgttctaatccaggcctgtgcgttcagcctcaccatattggcgtgactattaaagaattagacttatatttggcctatttcgttcatacgcctgaatcagggcagagtgactcctctaatcagcaaggggacgccgatataaagcccctaccgaacggccacctgtcattccaagattgctttgtgacctcaggggtgtggaatgttacggagctggtgagagtgtcccagactcctgtggccacagcaagtggtccaaattttagcctcgccgacctggaaagtcctagctactacaatatcaaccaagtgacacttggcagaaggtcaattaccagtccaccaagcacctcaacaaccaagaggccaaagtcaatcgatgattcagaaatggagtcgccagtcgacgatgtgttttaccccgggactgggagaagccccgcagccggttcttctcagagcagcggctggcctaacgacgtggacgccggctctcctagggccacagctagcgcattgcactttcctagtacgtccataattcagcagtcttccccttattttactcatcctacgattcgctatcaccatcaccatggtcaggattcgctgaaagaatttgtccaattcgtgtgttcagatggcagtggacaggccaccggtcaacccaacggtagtggacaaggcaaggtcccaggctcttttcttttacccccgcctccgcctgtggcgaggccagtgcctctgccaatgcctgacagtaaatcaacaagtacagcccccgatggcgcggcccttacgcctccatcaccttccttcgccaccaccggagccagctccgctaaccgattcgtgtccatcggcccccgcgacggcaactttctgaatatccctcagcagagccagtcatggtttctctag

SEQ ID NO: 276335 - DNA, 1383 bp, Artificial Sequence
  derived and/or modified sequence
atgctgcctgcctgccgcctgcaggatgagttccaccccttcatcgaggccctgctgccccacgtgcgggccttctcctacacctggttcaacctgcaggccaggaagaggaagtacttcaagaagcatgagaagaggatgagcaaggatgaggagagagctgtgaaggatgagctgctgggggagaagccagagatcaagcagaagtgggccagccggctgctggccaagctgaggaaggacatccggcctgagttccgggaggactttgtgctgaccatcaccgggaagaagccaccctgctgcgtgctgagcaacccagaccagaagggcaagatcagaagaattgactgcctgcggcaggccgacaaggtgtggaggctggacctggtgatggtgatcctcttcaagggcatccccctggagagcacagatggagagcggctgtacaagagcccccagtgcagcaaccctggcctgtgtgtgcagccccaccacatcggcgtgaccatcaaggagctggacctgtacctggcctactttgtgcacaccccagagagcggccagagcgacagcagcaaccagcagggagatgctgacatcaagcccctgcccaacggccacctgtccttccaggactgctttgtgaccagcggcgtgtggaatgtgacagagctggtgcgggtgtcccagacccctgtggccacagccagcggccccaacttcagcctggccgacctggagagccccagctactacaacatcaaccaggtgaccctgggccgccgcagcatcaccagcccccccagcaccagcaccaccaagaggcccaagagcattgatgattctgagatggagagccctgtggatgatgtgttctacccaggcaccggccgcagccctgctgctggcagcagccagagcagcggctggcccaatgatgtggatgctggcagcccccgggccacagccagcgccctgcacttccccagcaccagcatcatccagcagagcagcccctacttcacccaccccaccatccgctaccaccaccaccacggccaggacagcctgaaggagtttgtgcagtttgtgtgcagtgatggcagcggccaggccaccggccagcccaacggcagcggccagggcaaggtgcccggcagcttcctgctgcccccacctcctcctgtggcccggcctgtgcccctgcccatgccagacagcaagagcaccagcacagccccagatggagctgccctgaccccacccagccccagctttgccaccaccggggccagcagcgccaacagatttgtgtccatcggccccagagatggcaacttcctgaacatcccccagcagagccagagctggttcctgtag

SEQ ID NO: 276336 - DNA, 1383 bp, Artificial Sequence
  derived and/or modified sequence
atgctgcccgcctgccggctgcaggacgagttccaccccttcatcgaggcacttctgcctcatgtgcgggccttctcgtatacttggttcaacctgcaggcccggaaacgcaaatactttaagaagcacgaaaaacgaatgtccaaggacgaggagcgcgcagtcaaagacgagttactgggtgaaaaaccagaaataaagcaaaagtgggccagtcgcctcttagctaagctcaggaaggacatcaggcccgagttccgcgaagatttcgttttgaccattactggaaagaagccgccatgttgtgttttaagtaatcccgatcagaaaggcaagattaggaggatcgactgcctgagacaggctgacaaggtatggagactcgacttggtgatggtcatactttttaagggaataccactggagtctaccgacggggaacgcctctacaagagtcctcagtgcagcaatccagggctgtgcgttcagccacaccacatcggggtgaccattaaagagcttgacttatatctggcatatttcgtccacacacctgagtccggccaatccgattcgagcaatcagcagggggatgctgacattaaacccctcccaaatggccatctctcctttcaagactgtttcgtgacctcaggcgtgtggaatgtgacagaattggttagggtatcacagacccctgtcgctactgcatcggggccgaactttagcctagcagatctggagtccccaagttactataatatcaaccaggtgactctgggacgtcggtctatcacatcaccaccaagcacttccaccaccaagcgtccaaaaagtatcgacgacagcgaaatggaatctccagtcgacgacgtattctaccccgggactggccgaagtcctgctgccggctcctctcaaagcagcggatggccaaatgacgtggacgcaggatcacctcgagccaccgctagcgccctacacttcccaagcacttcaatcatccagcaaagtagtccctactttactcatcccacaatccggtatcatcatcaccatgggcaggacagcttgaaagagtttgtgcaattcgtgtgttccgacggttccggtcaggccacaggtcaaccaaacggctccggacagggtaaggtgcctggcagcttccttctgcccccacccccacctgtggccaggcctgtgccgctgccgatgcccgactccaagtccacgtcaacggcccctgatggagcagccctcacgccccccagcccttctttcgccaccaccggcgccagcagcgcaaatcggtttgtatctattggtcctagagatggcaacttcttgaacattccacagcaatctcagtcctggtttctctag

SEQ ID NO: 276337 - DNA, 5530 bp, Artificial Sequence
  derived and/or modified sequence
atgctcccggcttgccgcctgcaggatgagttccacccgttcatcgaggcactgctgcctcacgtccgcgctttctcctacacctggttcaacctgcaggcgcggaagcgcaagtacttcaagaagcatgaaaagcggatgtcgaaggacgaggagcgggcggtgaaggacgagctgctgggcgagaagcccgagatcaagcagaagtgggcatcccggctgctggccaagctgcgcaaggacatccggcccgagttccgcgaggacttcgtgctgaccatcacgggcaagaagcccccctgctgcgtgctctccaaccccgaccagaagggcaagatccggcggattgactgcctgcgccaggctgacaaggtgtggcggctggacctggtcatggtgattttgtttaaggggatccccctggaaagtactgatggggagcggctctacaagtcgcctcagtgctcgaaccccggcctgtgcgtccagccacatcacattggagtcacaatcaaagaactggatctttatctggcttactttgtccacactccggaatccggacaatcagatagttcaaaccagcaaggagatgcggacatcaaaccactgcccaacgggcacttaagtttccaggactgttttgtgacttccggggtctggaatgtgacggagctggtgagagtatcacagactcctgttgcaacagcatcagggcccaacttctccctggcggacctggagagtcccagctactacaacatcaaccaggtgaccctggggcggcggtccatcacctcccctccttccaccagcaccaccaagcgccccaagtccatcgatgacagtgagatggagagccctgttgatgacgtgttctatcccgggacaggccgttccccagcagctggcagcagccagtccagcgggtggcccaacgatgtggatgcagggagcccccgggccacagcatcagccctgcacttcccctccacgtccatcatccagcagtcgagcccgtatttcacgcacccgaccatccgctaccaccaccaccacgggcaggactcactgaaggagtttgtgcagtttgtgtgctcggatggctcgggccaggccaccggacagcccaacggtagcggccagggcaaagtcccggggtcatttttgctaccgccgccgcctccagtggccagacctgtgccccttcctatgcctgattccaaatccaccagcactgccccagacggcgccgccttgactcctccatcaccttcattcgcaacgacaggcgcctcctctgccaaccggtttgtcagcatcggaccccgggacggcaactttctgaacatcccacagcagtctcagtcctggttcctctgataagatcgacaaaagaaacaacaaaatgagaagaagaggttcctcgaaaggggggagaagaaattttgagaatggaaaaatcccccagcccagcccagccccaccgaaaagcaaaaattacacgtcgtcagccactcagcccttctctcctccagcccggggacccccgcgggccccagaagcagcccagttctcagagagcccttggaaggggtctcggtggagctgtgcaccagcagccaagcagaaagaaacacgcgacatggactctgtcaagtagaggacagaaagcaagaaaggatgcagaactgccttcctccccctgaccccgccccggccttctggggaaggaacaaagtccccaaacaaagcaaccagcacaattctgaaggggcctggcctccaccctcaccccttcctaggggaaccccaccctccacacagccggagctgccctagggagcctggagggccagcttgtaaagatgatggggtttagatccctcaggctctcccctccagactccgcccttccctccctccctccctccctccctctctgccaaggctccagcttcttcccccagctgctcccgaccaggagggggagagcagcctccacttaccccaccccacccttgggctaaaagcccccaggcgggcagggggtgacccctggagctagttgcgtgtcccagaatggagggtgttctgacaccccaccctgagccgcaagagcagtcctggggccctggacccctctgtacagtccgtaggaaaaagtcggaatgctctcgacggcctcgtcccagcctgggacaggccccctttcccctctctctgcaggccaggagggcctccttcctgccacgagggaggggagtcgggccccaggtcgcccccgcccccagccctgcatgcaggtgccctcgctccgccccatcagttcctgcccctgcccctcatgcagactgccctgctggggccgggccggagggtggagcagaaaggggaccccggagccgagcgaggaggaccaggcagccgccgctgccgcgctaagccaccacctgcgcttaggtaggcgtcctgctcgccgactttcagttccttgggagggtgttgggtgtcgtccttttcaaaagtgttttggagctttctgtgccccccgactttcccccgcctccccgccccccacgtggccacttttctctggattttagctgtaatgtctttactctttatttaggggtggggcattcattgtttgggtcttttgctgttggaatgggaactcctcctccatttgagcaacttgggaacaatttggtaacacaccacaggaagtagctctcccccccagccccctcctccctcaagggagggttggggggcctgtccagagggtcttcagaagcccccctgggagggaggggaggatgagcacgcccagctcccctccagggtgtgacttggcccctctggcttgtctttctgtgccttactcctcctcctgcgtctcccgttcctggccccttcttgagtccttgtgcctctctctttctctctctttcttaattgtatgaaaacacaaagcacaggtcaggatcctctgagagaaaatcaacattgcaccacgtaggggtgggctatgggctgtatttattgtgaatctagtttgtgaggctgtggccccgagctggcggagggagggaagaggagggagtgacgggaggggaggaggtcagcgacctggggccgtagcggcaggcgaacggtgcctgctacccagctggaagccacaaggtggctggctccaggggcggcttttgttggaagttgagtgaagccctccccctgtcctcagcgtgcagccctagaggaccccagggctgaggggcagtggatcctgcgggagtctcccggggcgtggggagtaaggccccgggggtggggggccgggtgggccgggcgtgacgcgcggtcaaagtgcaatgatttttcagttcggttggctaaacagggtcagagctgagagcgaagcagaaggggctccctgtccggcccacgtgccctttccctcgacgacagtcgagggctcgggctctgtgggactgtgggagctagggtctgcggggcgcctgcccgggcgaggtcggaagctgcaggccagctgggcccgggccggagcgtgcccggcggggctgcccgggcgggcagggggtgggggctgctcctttcccaagtggtgttgtgaggggcaatgagggcaacaggagatgtggggacgtgttaggagagaaaaaaaaaaaaacaaaaatatatatgggggaaattaacttttttttttcattgaaccaagtgcaatgcatcagagagttttcctatctttgtatgttaagagattaagaaaaaaaaattctatttttgttgtaatgtcctcgcggctctggggacgctaaaagaaccgggcctgccccgccctgcgcggggataacgaaagctgagtgtttttcccttttttttgttcgtttttagtttttttttttttaagtcgttttcctgcgttgacgaggatgatctggggtttttatttgtttcgtcgttcgttctgtttcggtgggagggctgaaggaaacgttcacattttagagtttaaaaaaaacacctcgacatttaaaaaatcaaccaacacaagatcaaaaaggaaaaggacgagagaaaaattatttttaagataattaaacataaaaccctggtgcttcttacattataaagtacgttttaaagaacccacaaactattatacataagtttatgaatcaattaaatatcctgcacttgttaggaatacgcatatcccttctttgttgagtttaacggaacgggacagcggcgtgcccccggcggctggactgctccggccgcgggtctccccgggcgcccctccctggggcccagcacccctcctcgccccatccccgtccgggtacgggggcgcggcaggggtccccggcccctcccccgcagaggtcaatgccaacgaacaaacgtcccctccctccctccctctccgccccgagcgcccttctttgagccagacgccaacttgaccctcaccagcattatcaggagcgcgctcagcaagttggtagtttcctcccccctttcccggcgcccctcccgcccccattcaacatctctcatcctatccccgaccccctccggggaacaccgggaaggctcgacgctccaggacaggaccagccacgcagacaggtcgatttgcccaggcccgcgcccgcacgcacgcacgcacacggccccgcacacagccccgccccaccccgcaaccagccctgtcgactgccttatacacccgcccccgcgctggccggccgacctagtgccttgttctcacccccgtgctggcggagcggacgccgcgctctgggtcccagaggggccgggtggctcagacgacccaccactcccccaccctgaccgtgctgaacagacccccccacacgagagaaaataaaggagcaataaagtcacgagaactttcgtcccccaatcgagagcccgaggggcaccccagccccgcctctgctcccccccaccccacccaccctcggggcgcccccctccccccgcaagccagcctgggccagccccgcttcggcccctcccgggagatccgtgcgcccgaccagcaccagcatcgcggaccgcaaaggccgcccgtcccgtcaaacaagtttcttcttaggctaagaaacgcagtatatacgagtatctctatatatagtactaatggatttggtgtgcttcccccttagcgtccccctccctctgctcctcctccttcagcctggtctccccctcttctctgccctccacccccgtctctgcactgagatacataagaaacaagggtagtttactgtctgttttgttttctgggttttcagtgtcctagcggaatgcaagtaggcagccagcccgtctgttccctctccgccccgccccgccccgcccccgtcactgcgcttctgttataccatctttgcctgactctctccggcttctccattgaatggctaatgtgtatgtgaaataaagaaataaagaaaaacaaacgcga

SEQ ID NO: 276338 - DNA, 1383 bp, Artificial Sequence
  derived and/or modified sequence
atgctgccggcttgccggctccaagatgaattccaccctttcatcgaagcacttcttccccatgtccgggcattctcttacacatggttcaacctacaagcccgtaaacggaagtacttcaaaaaacatgaaaaacgtatgtcgaaggacgaggaacgcgctgtaaaggacgaacttttaggcgaaaagccagaaatcaaacaaaaatgggcaagccgactgctggcgaagctgaggaaggatatcaggccggagttcagagaggatttcgtgctaaccattactggcaaaaagccaccatgctgtgtactgagcaatcctgatcaaaaaggcaagatcagaagaatcgactgcttgagacaggccgacaaagtctggaggctggatctggtcatggttattcttttcaagggcatacctcttgaatctacagatggagaacggttatataagtcccctcagtgctcaaacccgggactgtgcgtccaaccgcaccacattggggtgacgataaaagagctggatctctatctagcgtactttgtgcatacccccgagtcgggtcaatctgattcgagtaaccaacaaggagacgcagacattaagccattacctaacggccacctgagctttcaggactgcttcgtgactagcggtgtatggaacgtgacagaactggtgcgggtatctcagacccctgtagctaccgcgagcgggccaaatttctcgctggcagatctggagtccccttcatattataacattaaccaagtgactctgggtaggagaagcatcacctctccgccaagtaccagcaccaccaaaaggccaaagagtattgatgactccgagatggaatcccctgtggacgatgtgttctaccccggaacggggagaagccctgcagcgggttcgtcccagagctccggttggcctaacgacgttgacgccggaagcccccgagcgacagcatccgctctgcacttcccaagcacttctattattcagcaatcaagtccatactttacccaccctaccattcgctaccatcaccatcatggccaggattcactcaaagagtttgtccagttcgtttgctcagacgggtctgggcaggcaactggacagccaaacggaagtggacaggggaaggtgccaggcagtttcctactgccacctccccctcccgtggcaagacctgtgcccctgccaatgccggattccaagagtactagtactgccccagacggtgccgctcttacacctccctcgccgtccttcgctactactggggcttcttccgccaatcggttcgtgtcaatcggcccacgcgacggtaatttcctgaatattcctcagcagtcacagtcttggtttctgtag

SEQ ID NO: 276339 - DNA, 1383 bp, Artificial Sequence
  derived and/or modified sequence
atgctgcccgcctgcagactgcaggacgagttccaccccttcatcgaggccctgctgccccacgtgagagccttcagctacacctggttcaacctgcaggccagaaagagaaagtacttcaagaagcacgagaagagaatgagcaaggacgaggagagagccgtgaaggacgagctgctgggcgagaagcccgagatcaagcagaagtgggccagcagactgctggccaagctgagaaaggacatcagacccgagttcagagaggacttcgtgctgaccatcaccggcaagaagcccccctgctgcgtgctgagcaaccccgaccagaagggcaagatcagaagaatcgactgcctgagacaggccgacaaggtgtggagactggacctggtgatggtgatcctgttcaagggcatccccctggagagcaccgacggcgagagactgtacaagagcccccagtgcagcaaccccggcctgtgcgtgcagccccaccacatcggcgtgaccatcaaggagctggacctgtacctggcctacttcgtgcacacccccgagagcggccagagcgacagcagcaaccagcagggcgacgccgacatcaagcccctgcccaacggccacctgagcttccaggactgcttcgtgaccagcggcgtgtggaacgtgaccgagctggtgagagtgagccagacccccgtggccaccgccagcggccccaacttcagcctggccgacctggagagccccagctactacaacatcaaccaggtgaccctgggcagaagaagcatcaccagcccccccagcaccagcaccaccaagagacccaagagcatcgacgacagcgagatggagagccccgtggacgacgtgttctaccccggcaccggcagaagccccgccgccggcagcagccagagcagcggctggcccaacgacgtggacgccggcagccccagagccaccgccagcgccctgcacttccccagcaccagcatcatccagcagagcagcccctacttcacccaccccaccatcagataccaccaccaccacggccaggacagcctgaaggagttcgtgcagttcgtgtgcagcgacggcagcggccaggccaccggccagcccaacggcagcggccagggcaaggtgcccggcagcttcctgctgcccccccccccccccgtggccagacccgtgcccctgcccatgcccgacagcaagagcaccagcaccgcccccgacggcgccgccctgaccccccccagccccagcttcgccaccaccggcgccagcagcgccaacagattcgtgagcatcggccccagagacggcaacttcctgaacatcccccagcagagccagagctggttcctgtag

SEQ ID NO: 276340 - protein, 502 aa, Artificial Sequence
  derived and/or modified sequence
MYSPYCLTQDEFHPFIEALLPHVRAFSYTWFNLQARKRKYFKKHEKRMSKDEERAVKDELLGEKPEIKQKWASRLLAKLRKDIRPEFREDFVLTITGKKPPCCVLSNPDQKGKIRRIDCLRQADKVWRLDLVMVILFKGIPLESTDGERLYKSPQCSNPGLCVQPHHIGVTIKELDLYLAYFVHTPESGQSDSSNQQGDADIKPLPNGHLSFQDCFVTSGVWNVTELVRVSQTPVATASGPNFSLADLESPSYYNINQVTLGRRSITSPPSTSTTKRPKSIDDSEMESPVDDVFYPGTGRSPAAGSSQSSGWPNDVDAGPASLKKSGKLDFCSALSSQGSSPRMAFTHHPLPVLAGVRPGSPRATASALHFPSTSIIQQSSPYFTHPTIRYHHHHGQDSLKEFVQFVCSDGSGQATGQPNGSGQGKVPGSFLLPPPPPVARPVPLPMPDSKSTSTAPDGAALTPPSPSFATTGASSANRFVSIGPRDGNFLNIPQQSQSWFL

SEQ ID NO: 276341 - DNA, 1509 bp, Artificial Sequence
  derived and/or modified sequence
atgtattctccttattgtctaacccaggatgagtttcacccatttatcgaagccctcttgcctcacgtgcgcgctttttcgtacacctggttcaacctacaagcccggaagcgcaagtacttcaaaaaacatgagaaacgtatgtctaaagatgaggagcgggcggtgaaggatgaactcctcggagagaagcccgagattaagcagaagtgggctagtcggctcctggccaagttgaggaaggacatccgccccgagttcagagaagactttgtgttgacgattactggaaaaaagccaccatgttgcgtactgtcaaaccctgaccagaagggtaaaattagacgcattgattgcctgcggcaggccgacaaggtgtggcgcttggatctcgtgatggtgattcttttcaagggcatccctctggagtctacagatggggagagactatacaagtccccccagtgttcaaatccggggctctgtgtgcagcctcaccacataggcgtcacaatcaaggagctggatctgtacctggcttatttcgtgcacactcccgaatccgggcaatctgactccagtaatcaacagggggatgccgacatcaagccgctgcccaacggccacttgagctttcaggactgttttgtgacatctggagtgtggaatgtgacagagctcgtcagagtgagccaaacccccgtggccactgcatccggcccaaacttttctttggccgaccttgaaagtccgagttattataacatcaatcaggtcacactgggtaggaggtcaattactagtccgccaagcacctccactactaagcggcccaaaagtatcgacgattctgaaatggagagccctgtcgatgatgtgttctatcccggaactgggcggagcccagccgcaggttccagccagagttccggctggccaaacgatgtggatgcaggaccggcctcccttaagaaaagcgggaagctggacttttgctctgcattgtcctctcaggggtcctctccacgtatggctttcacccaccaccctctccctgtactcgctggcgtgcggccaggctcaccacgtgctactgcaagcgccctgcacttcccctccacatcaataattcagcagtcatcgccctatttcacccaccctaccatccgttatcaccaccatcacgggcaggactctttgaaagagttcgtgcagttcgtgtgctcagacggctctggccaggctaccggacagccaaatggctctgggcaggggaaagtaccagggagcttcctgctcccacctcctccgccagtggctaggccagtgcctctgccaatgccggacagtaagagtacctcaaccgcccctgatggcgctgccctgactccaccttcaccgtccttcgctactaccggcgctagcagtgccaacagattcgtgagtattggtccccgagatggtaacttcctcaacatcccccagcagtcccagagttggttcctgtag

SEQ ID NO: 276342 - DNA, 1509 bp, Artificial Sequence
  derived and/or modified sequence
atgtacagcccctactgcctgacccaggatgagttccaccccttcatcgaggccctgctgccccacgtgcgggccttctcctacacctggttcaacctgcaggccaggaagaggaagtacttcaagaagcatgagaagaggatgagcaaggatgaggagagagctgtgaaggatgagctgctgggggagaagccagagatcaagcagaagtgggccagccggctgctggccaagctgaggaaggacatccggcctgagttcagagaagattttgtgctgaccatcaccgggaagaagccaccctgctgcgtgctgagcaacccagaccagaagggcaagatcagaagaattgactgcctgcggcaggccgacaaggtgtggaggctggacctggtgatggtgatcctcttcaagggcatccccctggagagcacagatggagagcggctgtacaagagcccccagtgcagcaaccctggcctgtgtgtgcagccccaccacatcggcgtgaccatcaaggagctggacctgtacctggcctactttgtgcacaccccagagagcggccagagcgacagcagcaaccagcagggagatgctgacatcaagcccctgcccaacggccacctgtccttccaggactgctttgtgaccagcggcgtgtggaatgtgacagagctggtgcgggtgtcccagacccctgtggccacagccagcggccccaacttcagcctggccgacctggagagccccagctactacaacatcaaccaggtgaccctgggcagaagaagcatcaccagcccccccagcaccagcaccaccaagaggcccaagagcattgatgacagcgagatggagagccctgtggatgatgtgttctacccaggcaccggccgcagccctgctgctggcagcagccagagcagcggctggcccaatgatgtggatgctggccctgccagcctgaagaagagcggcaagctggacttctgcagcgccctgagcagccagggcagcagccccaggatggccttcacccaccaccccctgcctgtgctggccggcgtgcggcccggcagcccccgggccacagccagcgccctgcacttccccagcaccagcatcatccagcagagcagcccctacttcacccaccccaccatccgctaccaccaccaccacggccaggacagcctgaaggagtttgtgcagtttgtgtgcagtgatggcagcggccaggccaccggccagcccaacggcagcggccagggcaaggtgcccggcagcttcctgctgcccccacctcctcctgtggcccggcctgtgcccctgcccatgccagacagcaagagcaccagcacagccccagatggagctgccctgaccccacccagccccagctttgccaccaccggggccagcagcgccaacagatttgtgtccatcggccccagagatggcaacttcctgaacatcccccagcagagccagagctggttcctgtag

SEQ ID NO: 276343 - DNA, 1509 bp, Artificial Sequence
  derived and/or modified sequence
atgtacagcccctactgcctgacccaggacgagttccaccccttcatcgaggctctccttccgcacgtgcgggcatttagctatacctggttcaacctgcaggctcggaagcgaaagtacttcaagaagcatgagaaaagaatgagcaaggacgaggagcgtgccgttaaagacgagctactaggggaaaagcctgagatcaagcagaagtgggcctcccgccttctggctaagctccggaaggacataagaccggagtttcgggaggacttcgtgctgacaataaccggcaagaagcccccgtgttgcgtgctcagcaatcctgaccagaaaggaaagattagaaggatcgactgtctacggcaagccgacaaggtttggaggctggacctggtgatggttatcctttttaagggcatccccttggaatccacagacggggagcggctgtacaagagcccacaatgttccaaccctggcctctgcgtgcagccccaccatattggcgtcaccatcaaggagttggacctctatttggcttactttgtgcatacaccggagtctgggcaaagcgattcctccaatcaacaaggcgatgccgatatcaagccgctgccaaatgggcacttatccttccaagattgtttcgtgactagcggtgtgtggaatgtgaccgagttagtaagggtctcacagactccagtagctaccgcttctggccctaacttttccctggccgatctggagtcgcctagctactataacatcaatcaggtgactctcggtcgtcgatcaataacatcccccccttccacctccacgacaaaacggcccaagagtattgatgacagtgagatggagagtccagtggacgatgtgttttaccccgggaccgggcgctcccccgcagccgggtcatcacagtcatcgggatggcctaatgatgtcgacgctggccctgccagtctcaaaaagtcaggtaagctggatttctgtagtgccctctcctcccagggcagctcgccaagaatggccttcacgcaccatcctctgcctgtgctggcgggtgttcgcccaggtagccctagagcaaccgccagtgcgcttcatttccccagtaccagtataattcaacagtcaagtccatactttactcatcccaccatccgatatcatcaccaccatgggcaggactcgctcaaggagttcgtgcagttcgtgtgtagtgacgggtcggggcaggctacgggacagccgaatgggtctggacagggtaaagtgccgggtagtttcctattacccccaccccctccagttgcacgacctgtcccgctgcctatgccagactcgaaaagtacttcaaccgctccggacggcgccgctctgacgcccccaagcccgtcatttgcaaccactggggccagcagtgccaacaggtttgtttccatcgggccacgcgacggaaattttctaaacatcccgcagcagtcacaatcgtggttcctgtag

SEQ ID NO: 276344 - DNA, 5724 bp, Artificial Sequence
  derived and/or modified sequence
gcggccgccgcctgccgggcctcccctcgccgcggccggccgccgcgctcccgcccgggcgcccagctatgtactccccgtactgcctcacccaggatgagttccacccgttcatcgaggcactgctgcctcacgtccgcgctttctcctacacctggttcaacctgcaggcgcggaagcgcaagtacttcaagaagcatgaaaagcggatgtcgaaggacgaggagcgggcggtgaaggacgagctgctgggcgagaagcccgagatcaagcagaagtgggcatcccggctgctggccaagctgcgcaaggacatccggcccgagttccgcgaggacttcgtgctgaccatcacgggcaagaagcccccctgctgcgtgctctccaaccccgaccagaagggcaagatccggcggattgactgcctgcgccaggctgacaaggtgtggcggctggacctggtcatggtgattttgtttaaggggatccccctggaaagtactgatggggagcggctctacaagtcgcctcagtgctcgaaccccggcctgtgcgtccagccacatcacattggagtcacaatcaaagaactggatctttatctggcttactttgtccacactccggaatccggacaatcagatagttcaaaccagcaaggagatgcggacatcaaaccactgcccaacgggcacttaagtttccaggactgttttgtgacttccggggtctggaatgtgacggagctggtgagagtatcacagactcctgttgcaacagcatcagggcccaacttctccctggcggacctggagagtcccagctactacaacatcaaccaggtgaccctggggcggcggtccatcacctcccctccttccaccagcaccaccaagcgccccaagtccatcgatgacagtgagatggagagccctgttgatgacgtgttctatcccgggacaggccgttccccagcagctggcagcagccagtccagcgggtggcccaacgatgtggatgcaggcccggcttctctaaagaagtcaggaaagctggacttctgcagtgccctctcctctcagggcagctccccgcgcatggctttcacccaccacccgctgcctgtgcttgctggagtcagaccagggagcccccgggccacagcatcagccctgcacttcccctccacgtccatcatccagcagtcgagcccgtatttcacgcacccgaccatccgctaccaccaccaccacgggcaggactcactgaaggagtttgtgcagtttgtgtgctcggatggctcgggccaggccaccggacagcccaacggtagcggccagggcaaagtcccggggtcatttttgctaccgccgccgcctccagtggccagacctgtgccccttcctatgcctgattccaaatccaccagcactgccccagacggcgccgccttgactcctccatcaccttcattcgcaacgacaggcgcctcctctgccaaccggtttgtcagcatcggaccccgggacggcaactttctgaacatcccacagcagtctcagtcctggttcctctgataagatcgacaaaagaaacaacaaaatgagaagaagaggttcctcgaaaggggggagaagaaattttgagaatggaaaaatcccccagcccagcccagccccaccgaaaagcaaaaattacacgtcgtcagccactcagcccttctctcctccagcccggggacccccgcgggccccagaagcagcccagttctcagagagcccttggaaggggtctcggtggagctgtgcaccagcagccaagcagaaagaaacacgcgacatggactctgtcaagtagaggacagaaagcaagaaaggatgcagaactgccttcctccccctgaccccgccccggccttctggggaaggaacaaagtccccaaacaaagcaaccagcacaattctgaaggggcctggcctccaccctcaccccttcctaggggaaccccaccctccacacagccggagctgccctagggagcctggagggccagcttgtaaagatgatggggtttagatccctcaggctctcccctccagactccgcccttccctccctccctccctccctccctctctgccaaggctccagcttcttcccccagctgctcccgaccaggagggggagagcagcctccacttaccccaccccacccttgggctaaaagcccccaggcgggcagggggtgacccctggagctagttgcgtgtcccagaatggagggtgttctgacaccccaccctgagccgcaagagcagtcctggggccctggacccctctgtacagtccgtaggaaaaagtcggaatgctctcgacggcctcgtcccagcctgggacaggccccctttcccctctctctgcaggccaggagggcctccttcctgccacgagggaggggagtcgggccccaggtcgcccccgcccccagccctgcatgcaggtgccctcgctccgccccatcagttcctgcccctgcccctcatgcagactgccctgctggggccgggccggagggtggagcagaaaggggaccccggagccgagcgaggaggaccaggcagccgccgctgccgcgctaagccaccacctgcgcttaggtaggcgtcctgctcgccgactttcagttccttgggagggtgttgggtgtcgtccttttcaaaagtgttttggagctttctgtgccccccgactttcccccgcctccccgccccccacgtggccacttttctctggattttagctgtaatgtctttactctttatttaggggtggggcattcattgtttgggtcttttgctgttggaatgggaactcctcctccatttgagcaacttgggaacaatttggtaacacaccacaggaagtagctctcccccccagccccctcctccctcaagggagggttggggggcctgtccagagggtcttcagaagcccccctgggagggaggggaggatgagcacgcccagctcccctccagggtgtgacttggcccctctggcttgtctttctgtgccttactcctcctcctgcgtctcccgttcctggccccttcttgagtccttgtgcctctctctttctctctctttcttaattgtatgaaaacacaaagcacaggtcaggatcctctgagagaaaatcaacattgcaccacgtaggggtgggctatgggctgtatttattgtgaatctagtttgtgaggctgtggccccgagctggcggagggagggaagaggagggagtgacgggaggggaggaggtcagcgacctggggccgtagcggcaggcgaacggtgcctgctacccagctggaagccacaaggtggctggctccaggggcggcttttgttggaagttgagtgaagccctccccctgtcctcagcgtgcagccctagaggaccccagggctgaggggcagtggatcctgcgggagtctcccggggcgtggggagtaaggccccgggggtggggggccgggtgggccgggcgtgacgcgcggtcaaagtgcaatgatttttcagttcggttggctaaacagggtcagagctgagagcgaagcagaaggggctccctgtccggcccacgtgccctttccctcgacgacagtcgagggctcgggctctgtgggactgtgggagctagggtctgcggggcgcctgcccgggcgaggtcggaagctgcaggccagctgggcccgggccggagcgtgcccggcggggctgcccgggcgggcagggggtgggggctgctcctttcccaagtggtgttgtgaggggcaatgagggcaacaggagatgtggggacgtgttaggagagaaaaaaaaaaaaacaaaaatatatatgggggaaattaacttttttttttcattgaaccaagtgcaatgcatcagagagttttcctatctttgtatgttaagagattaagaaaaaaaaattctatttttgttgtaatgtcctcgcggctctggggacgctaaaagaaccgggcctgccccgccctgcgcggggataacgaaagctgagtgtttttcccttttttttgttcgtttttagtttttttttttttaagtcgttttcctgcgttgacgaggatgatctggggtttttatttgtttcgtcgttcgttctgtttcggtgggagggctgaaggaaacgttcacattttagagtttaaaaaaaacacctcgacatttaaaaaatcaaccaacacaagatcaaaaaggaaaaggacgagagaaaaattatttttaagataattaaacataaaaccctggtgcttcttacattataaagtacgttttaaagaacccacaaactattatacataagtttatgaatcaattaaatatcctgcacttgttaggaatacgcatatcccttctttgttgagtttaacggaacgggacagcggcgtgcccccggcggctggactgctccggccgcgggtctccccgggcgcccctccctggggcccagcacccctcctcgccccatccccgtccgggtacgggggcgcggcaggggtccccggcccctcccccgcagaggtcaatgccaacgaacaaacgtcccctccctccctccctctccgccccgagcgcccttctttgagccagacgccaacttgaccctcaccagcattatcaggagcgcgctcagcaagttggtagtttcctcccccctttcccggcgcccctcccgcccccattcaacatctctcatcctatccccgaccccctccggggaacaccgggaaggctcgacgctccaggacaggaccagccacgcagacaggtcgatttgcccaggcccgcgcccgcacgcacgcacgcacacggccccgcacacagccccgccccaccccgcaaccagccctgtcgactgccttatacacccgcccccgcgctggccggccgacctagtgccttgttctcacccccgtgctggcggagcggacgccgcgctctgggtcccagaggggccgggtggctcagacgacccaccactcccccaccctgaccgtgctgaacagacccccccacacgagagaaaataaaggagcaataaagtcacgagaactttcgtcccccaatcgagagcccgaggggcaccccagccccgcctctgctcccccccaccccacccaccctcggggcgcccccctccccccgcaagccagcctgggccagccccgcttcggcccctcccgggagatccgtgcgcccgaccagcaccagcatcgcggaccgcaaaggccgcccgtcccgtcaaacaagtttcttcttaggctaagaaacgcagtatatacgagtatctctatatatagtactaatggatttggtgtgcttcccccttagcgtccccctccctctgctcctcctccttcagcctggtctccccctcttctctgccctccacccccgtctctgcactgagatacataagaaacaagggtagtttactgtctgttttgttttctgggttttcagtgtcctagcggaatgcaagtaggcagccagcccgtctgttccctctccgccccgccccgccccgcccccgtcactgcgcttctgttataccatctttgcctgactctctccggcttctccattgaatggctaatgtgtatgtgaaataaagaaataaagaaaaacaaacgcga

SEQ ID NO: 276345 - DNA, 1509 bp, Artificial Sequence
  derived and/or modified sequence
atgtacagcccgtactgcctcacccaagatgaattccatccgtttattgaggccttgcttccacatgtgcgggcattctcttacacgtggtttaatctgcaggcaaggaagcgcaagtactttaaaaaacatgagaaaaggatgtctaaggatgaggagagagcagtgaaggatgagcttctaggcgaaaaacctgaaatcaaacagaaatgggcaagcaggctgctcgcgaaactgagaaaggacatacggcctgagttccgggaagactttgtgctgacaatcaccggaaaaaaaccgccttgttgcgttctaagtaatcctgaccagaagggcaagatccgacgtatcgattgtttgagacaggccgataaggtgtggagactcgatctggtcatggtgatcctgtttaagggaataccactggagagtactgacggggagcgtctgtacaaaagtccgcaatgctcaaaccccggtctctgtgtgcagcctcaccacatcggcgtgaccattaaagaactcgacctgtatctggcatactttgtgcacacccccgagagcggtcagagtgactcctcgaaccagcagggggatgcagatatcaaaccgttacctaacgggcacctttcgtttcaagattgcttcgtcacgagtggcgtgtggaatgttacggaactggtccgtgtgagtcagacccctgtagcgacggcttcaggtcccaatttcagcctggccgacttagaatcacccagctactacaacatcaatcaggtgactctggggaggcgaagcattacaagccccccatctaccagtaccacaaagagacccaagtcgatagatgattccgagatggaatctcccgtggatgatgtgttctatcccggtacaggacgctcccccgctgctgggagcagtcagagctccggctggcccaacgatgtggacgccggacccgcatcgttaaaaaagagcgggaagttggatttttgcagtgccctgagcagccaaggctcttctccacggatggcctttactcaccaccctctaccagtgctggccggagtgagacccggttctcccagggctactgccagcgccctgcacttcccgtccacttccatcattcagcagagctctccctatttcacccatccaacaatcagatatcaccatcatcacggacaggattctctcaaagagtttgtgcagttcgtttgctccgatggcagtgggcaggcaacaggtcagcctaatggctccgggcagggaaaagtcccaggaagcttccttctgccaccaccgcctcctgtagcccgacctgtgcctttgcccatgcctgacagcaaatctacctcaactgcgcctgacggtgcagcactcacccccccatctccctcattcgcaacaaccggcgcaagctcagcaaatagatttgtgtcgataggacccagagatgggaacttcttaaatattccccagcaatcccaaagttggtttctttag

SEQ ID NO: 276346 - DNA, 1509 bp, Artificial Sequence
  derived and/or modified sequence
atgtacagcccctactgcctgacccaggacgagttccaccccttcatcgaggccctgctgccccacgtgagagccttcagctacacctggttcaacctgcaggccagaaagagaaagtacttcaagaagcacgagaagagaatgagcaaggacgaggagagagccgtgaaggacgagctgctgggcgagaagcccgagatcaagcagaagtgggccagcagactgctggccaagctgagaaaggacatcagacccgagttcagagaggacttcgtgctgaccatcaccggcaagaagcccccctgctgcgtgctgagcaaccccgaccagaagggcaagatcagaagaatcgactgcctgagacaggccgacaaggtgtggagactggacctggtgatggtgatcctgttcaagggcatccccctggagagcaccgacggcgagagactgtacaagagcccccagtgcagcaaccccggcctgtgcgtgcagccccaccacatcggcgtgaccatcaaggagctggacctgtacctggcctacttcgtgcacacccccgagagcggccagagcgacagcagcaaccagcagggcgacgccgacatcaagcccctgcccaacggccacctgagcttccaggactgcttcgtgaccagcggcgtgtggaacgtgaccgagctggtgagagtgagccagacccccgtggccaccgccagcggccccaacttcagcctggccgacctggagagccccagctactacaacatcaaccaggtgaccctgggcagaagaagcatcaccagcccccccagcaccagcaccaccaagagacccaagagcatcgacgacagcgagatggagagccccgtggacgacgtgttctaccccggcaccggcagaagccccgccgccggcagcagccagagcagcggctggcccaacgacgtggacgccggccccgccagcctgaagaagagcggcaagctggacttctgcagcgccctgagcagccagggcagcagccccagaatggccttcacccaccaccccctgcccgtgctggccggcgtgagacccggcagccccagagccaccgccagcgccctgcacttccccagcaccagcatcatccagcagagcagcccctacttcacccaccccaccatcagataccaccaccaccacggccaggacagcctgaaggagttcgtgcagttcgtgtgcagcgacggcagcggccaggccaccggccagcccaacggcagcggccagggcaaggtgcccggcagcttcctgctgcccccccccccccccgtggccagacccgtgcccctgcccatgcccgacagcaagagcaccagcaccgcccccgacggcgccgccctgaccccccccagccccagcttcgccaccaccggcgccagcagcgccaacagattcgtgagcatcggccccagagacggcaacttcctgaacatcccccagcagagccagagctggttcctgtag

SEQ ID NO: 276347 - DNA, 633 bp, Artificial Sequence
  derived and/or modified sequence
atgtccaaggacgaggaacgcgctgtaaaggatgagcttctgggcgagaagccagagatcaaacaaaaatgggctagccggctgctggctaagctaagaaaagacatcagaccggaattcagagaggacttcgttctgactatcactggtaagaaacccccgtgctgtgtgttaagcaacccagaccaaaagggcaagatccggagaatcgattgcttgcggcaggccgacaaggtctggcgcttggacttagtcatggtgatcctcttcaagggtatcccattagaatcaaccgacggggaaaggctttataaaagcccacagtgctcaaacccaggcctgtgcgtccaacctcatcacatcggagtgacaatcaaggaactggatttatacctggcctactttgttcacacccctgagagcggtcaatccgactcttctaaccagcagggtgacgccgacattaaacccctaccgaacggacacttatcattccaagactgcttcgtgacttcaggcgtgtggaatgtgacagaactggtctaccacagacttctgttacaacaacatcaaggccccactagcccctggaggacttggagagtgccagccaccacgaccagtaccagatag

SEQ ID NO: 276348 - DNA, 633 bp, Artificial Sequence
  derived and/or modified sequence
atgagcaaggatgaggagagagctgtgaaggatgagctgctgggggagaagccagagatcaagcagaagtgggccagccggctgctggccaagctgaggaaggacatccggcctgagttccgggaggactttgtgctgaccatcaccgggaagaagccaccctgctgcgtgctgagcaacccagaccagaagggcaagatcagaagaattgactgcctgcggcaggccgacaaggtgtggaggctggacctggtgatggtgatcctcttcaagggcatccccctggagagcacagatggagagcggctgtacaagagcccccagtgcagcaaccctggcctgtgtgtgcagccccaccacatcggcgtgaccatcaaggagctggacctgtacctggcctactttgtgcacaccccagagagcggccagagcgacagcagcaaccagcagggagatgctgacatcaagcccctgcccaacggccacctgtccttccaggactgctttgtgaccagcggcgtgtggaatgtgacagagctggtgtaccaccggctgctgctgcagcagcaccagggccccaccagcccctggaggacctggagggtgcctgccaccaccaccagcaccaggtag

SEQ ID NO: 276349 - DNA, 633 bp, Artificial Sequence
  derived and/or modified sequence
atgagcaaggacgaggagcgggccgtgaaggacgagctgctgggcgagaaaccagagattaagcagaagtgggcaagcaggctgctggccaaactgcggaaggacattagaccagaatttcgggaagattttgtcctgacgattacgggaaagaaaccgccttgttgcgtgctctctaatccggaccagaagggcaaaataaggaggatagattgtttgcgccaggcagataaagtgtggcgtcttgatctggtgatggtgattctgtttaaggggatcccactggaatctacagacggagagaggctgtataaatcccctcagtgttccaatccagggttatgcgtgcaaccgcaccacatcggtgtcacgattaaggagctggacctctacctcgcctatttcgtacatacccccgaatcggggcagagcgatagttccaatcagcagggagatgccgatatcaagcctttacccaatggacatttaagctttcaggactgtttcgtgacgtctggagtctggaacgtcaccgagctcgtatatcaccggctcctgctccaacaacatcaaggacctactagtccatggagaacctggcgagtgcctgccaccaccactagcactaggtag

SEQ ID NO: 276350 - DNA, 633 bp, Artificial Sequence
  derived and/or modified sequence
atgtcgaaggacgaggaacgggctgtgaaggatgagcttctcggcgagaaacccgagatcaagcaaaaatgggcaagcaggttgctggcaaagttgcggaaggacatacggccagaatttagggaggattttgtgttgactatcactggaaagaagccgccatgctgcgtcttatctaatccagatcagaagggcaagatccgacgcattgattgcctgcggcaggcagataaggtctggagactcgacctcgtaatggtcatcctgttcaaagggattcccctggagagcacggacggggaaaggctgtacaagtctccacagtgtagtaatccgggtctttgtgttcagccccaccacatcggagtgactatcaaagagctcgacctctacctggcttatttcgtgcacaccccagaatcgggccaatcagactcctctaaccaacagggcgacgcagacattaaacccctacctaatggtcatctatccttccaggactgtttcgtgacctctggagtgtggaatgtgacggagttagtctatcacaggcttttgcttcagcagcatcagggacccactagcccctggagaacctggagggtgcctgctactaccacgagcaccaggtag

SEQ ID NO: 276351 - DNA, 633 bp, Artificial Sequence
  derived and/or modified sequence
atgagcaaggacgaggagagagccgtgaaggacgagctgctgggcgagaagcccgagatcaagcagaagtgggccagcagactgctggccaagctgagaaaggacatcagacccgagttcagagaggacttcgtgctgaccatcaccggcaagaagcccccctgctgcgtgctgagcaaccccgaccagaagggcaagatcagaagaatcgactgcctgagacaggccgacaaggtgtggagactggacctggtgatggtgatcctgttcaagggcatccccctggagagcaccgacggcgagagactgtacaagagcccccagtgcagcaaccccggcctgtgcgtgcagccccaccacatcggcgtgaccatcaaggagctggacctgtacctggcctacttcgtgcacacccccgagagcggccagagcgacagcagcaaccagcagggcgacgccgacatcaagcccctgcccaacggccacctgagcttccaggactgcttcgtgaccagcggcgtgtggaacgtgaccgagctggtgtaccacagactgctgctgcagcagcaccagggccccaccagcccctggagaacctggagagtgcccgccaccaccaccagcaccagatag

SEQ ID NO: 276352 - protein, 1288 aa, Artificial Sequence
  derived and/or modified sequence
AAMGPGARGRRRRRRPMSPPPPPPPVRALPLLLLLAGPGAAAPPCLDGSPCANGGRCTQLPSREAACLCPPGWVGERCQLEDPCHSGPCAGRGVCQSSVVAGTARFSCRCPRGFRGPDCSLPDPCLSSPCAHGARCSVGPDGRFLCSCPPGYQGRSCRSDVDECRVGEPCRHGGTCLNTPGSFRCQCPAGYTGPLCENPAVPCAPSPCRNGGTCRQSGDLTYDCACLPGFEGQNCEVNVDDCPGHRCLNGGTCVDGVNTYNCQCPPEWTGQFCTEDVDECQLQPNACHNGGTCFNTLGGHSCVCVNGWTGESCSQNIDDCATAVCFHGATCHDRVASFYCACPMGKTGLLCHLDDACVSNPCHEDAICDTNPVNGRAICTCPPGFTGGACDQDVDECSIGANPCEHLGRCVNTQGSFLCQCGRGYTGPRCETDVNECLSGPCRNQATCLDRIGQFTCICMAGFTGTYCEVDIDECQSSPCVNGGVCKDRVNGFSCTCPSGFSGSTCQLDVDECASTPCRNGAKCVDQPDGYECRCAEGFEGTLCDRNVDDCSPDPCHHGRCVDGIASFSCACAPGYTGTRCESQVDECRSQPCRHGGKCLDLVDKYLCRCPSGTTGVNCEVNIDDCASNPCTFGVCRDGINRYDCVCQPGFTGPLCNVEINECASSPCGEGGSCVDGENGFRCLCPPGSLPPLCLPPSHPCAHEPCSHGICYDAPGGFRCVCEPGWSGPRCSQSLARDACESQPCRAGGTCSSDGMGFHCTCPPGVQGRQCELLSPCTPNPCEHGGRCESAPGQLPVCSCPQGWQDPCLNGGSCQDGVGSFSCSCLPGFAGPRCARDVDECLSNPCGPGTCTDHVASFTCTCPPGYGGFHCEQDLPDCSPSSCFNGGTCVDGVNSFSCLCRPGYTGAHCQHEADPCLSRPCLHGGVCSAAHPGFRCTCLESFTGPQCQTLVDWCSRQPCQNGGRCVQTGAYCLCPPGWSGRLCDIRSLPCREAAAQIGVRLEQLCQAGGQCVDEDSSHYCVCPEGRTGSHCEQEVDPCLAQPCQHGGTCRGYMGGYMCECLPGYNGDNCEDDVDECASQPCQHGGSCIDLVARYLCSCPPGTLGVLCEINEDDCGPGPPLDSGPRCLHNGTCVDLVGGFRCTCPPGYTGLRCEADINECRSGACHAAHTRDCLQDPGGGFRCLCHAGFSGPRCQTVLSPCESQPCQHGGQCRPSPGPGGGLTFTCHCAQPFWGPRCERVARSCRELQCPVGVPCQQTPRGPRCACPPGLSGPSCRSFPGSPPGASNAS

SEQ ID NO: 276353 - DNA, 402 bp, Artificial Sequence
  derived and/or modified sequence
atgggctggcccctgagcctgagccccagcggcttcagagaggtggagtggggcatcctgttcgtgtggcagtggctgctgagcagctggcacctgagccccttccccgtgcccaccagccccagcaccccctgcctgcccttcctgtgccaccccctgcccgtgctgcacggcaactgcaccggcctgagcgtgttcgcctgcatgtgcgcccccgtgtacacctgcatcgagagatacatctgcggcggcagaggcgagagaggcggcggcggcgtgaagctgagagcctgcagccaggacaccgcccactggagcctgagcagcgcccccagcgtgctggtgagactgagagaggagggcggcagagccctggtgaagcccgactgccccagcctgtag

SEQ ID NO: 276354 - DNA, 402 bp, Artificial Sequence
  derived and/or modified sequence
atgggctggccgctgagtctgtctccatccggcttcagagaggttgagtggggcatactgttcgtttggcaatggctactatcgtcttggcatctcagtccattccccgtgccaaccagcccatctactccctgtctcccctttctctgtcatccacttcccgtgctccacggcaactgtaccggtctgtccgtgtttgcctgtatgtgtgctccggtgtatacatgtatagagaggtacatctgcggagggagaggagagagggggggcggcggggtgaagttgcgggcatgttcccaggacaccgcccactggtctctcagcagcgccccttctgtgctggtgcggctgcgcgaggaaggtggaagagcactcgtgaagcctgactgtccctctctgtag

SEQ ID NO: 276355 - DNA, 402 bp, Artificial Sequence
  derived and/or modified sequence
atgggctggcccctgagcctgagccccagcggcttccgggaggtggagtggggcatcctgtttgtgtggcagtggctgctgagctcctggcacctgagccccttccctgtgcccaccagccccagcaccccctgcctgcccttcctgtgccaccccctgcctgtgctgcacggcaactgcaccggcctgtctgtgtttgcctgcatgtgtgcccctgtgtacacctgcatcgagcgctacatctgtggcggccgcggggagcggggcggcggcggcgtgaagctgcgggcctgcagccaggacacagcccactggagcctgagcagcgcccccagcgtgctggtgcggctgcgggaggagggcggccgggccctggtgaagccagactgccccagcctgtag

SEQ ID NO: 276356 - DNA, 402 bp, Artificial Sequence
  derived and/or modified sequence
atgggctggcccctgagcctgagccccagcggcttccgggaggtggaatggggtattctgttcgtatggcagtggctcctatcctcctggcacttgtctccattcccggtgcccacttcaccctcaaccccctgcctgcctttcttgtgccacccccttcctgtactccacgggaattgtactgggctgtcagtgtttgcctgcatgtgtgcaccagtatacacatgcatcgagcgctatatttgcggtggtcggggcgagagaggaggggggggggtcaagttacgtgcgtgctcacaggataccgctcactggtctctttcgtccgcccccagtgttctggtgcgcctcagagaggagggtggccgggccctcgttaagcccgactgtccttctttgtag

SEQ ID NO: 276357 - DNA, 402 bp, Artificial Sequence
  derived and/or modified sequence
atgggatggcccctgtctctgtcacccagcgggttcagggaagtggagtggggcattctgttcgtgtggcagtggctgctgagtagctggcatttgagtccctttcccgtccccaccagcccgtctactccgtgtttaccttttctctgccatcctctgcccgtcttgcacggcaactgcaccgggctcagtgtgttcgcctgcatgtgcgcacccgtctatacgtgcatagaacgctacatatgcgggggacggggagaacgaggaggcggaggagtgaaactgagggcctgtagccaggacaccgcacattggagcctgagctctgcgccttccgtgctcgtgcgcttgagagaagagggaggacgtgcactagtgaagccagattgtccaagcctatag

SEQ ID NO: 276358 - DNA, 345 bp, Artificial Sequence
  derived and/or modified sequence
ggcatctccaagctcaaaatggtgaatcaatgttttggactgggcgacgggacgtgccttctcagcatacaactggagggcccaaaacacgtcgcgttcgggtggccagagtgccctgaggctcccctacctacgctccctccaccccccttgaaagaacccttaacagtatccccacgagggtcccacttgatgagtgcaatgccaggcgtctcaccttcgcggtgcgtgggaagcttccccagttgtctcatgcttacttgcggccacagggggtgtccccacataggagccttctcaagcagcagctgtcctctttgccataatggcatgatggcctggtag

SEQ ID NO: 276359 - DNA, 3867 bp, Artificial Sequence
  derived and/or modified sequence
gcggccatgggccccggtgcccgagggaggcgacggcggaggcgcccaatgagccctccaccgccacccccacccgtgcgagctctgccccttctcctgctcctcgcggggccaggcgcagctgctcctccttgcctcgatggcagcccttgcgcaaacggagggagatgcactcaattgccaagtagagaggccgcatgcctgtgccctccagggtgggtgggcgagcgttgccagttagaggacccctgccactcaggaccctgcgcggggaggggagtgtgccaaagttccgtggttgccggaacggctcgtttctcgtgtcggtgcccgcgaggttttagagggccagactgttccttgccggacccgtgtctgtcttctccgtgtgcccatggagcgaggtgcagcgtcgggcccgatggtcgcttcttatgttcctgcccacctggctaccagggacgatcctgtcgcagtgatgtggatgagtgcagagtgggcgagccctgcaggcacgggggcacatgtttgaacacacccgggagcttcagatgccagtgccctgccgggtacaccggccctttatgcgaaaaccctgctgtgccctgcgccccctctccctgccgcaatgggggcacgtgccgccagagtggggacctcacatacgactgcgcctgcttaccagggtttgagggccaaaattgtgaagttaatgtggacgactgccccggccatagatgtctcaacggcggcacttgtgttgatggcgtgaatacttataattgccagtgtcctccagaatggacgggccagttctgcactgaagacgtggacgagtgccagttgcagcccaacgcttgtcataacggggggacatgctttaacaccctcggtgggcactcgtgcgtatgcgtgaatggctggacaggcgaatcatgctcccagaacattgacgattgcgccaccgccgtctgctttcacggtgctacttgtcacgaccgggttgcgtcattttactgcgcgtgccccatgggcaaaacaggtctgctgtgccacctggatgatgcatgcgtcagcaacccatgccatgaagacgctatttgcgacacgaatccggttaatgggcgcgctatttgcacatgcccccctggcttcaccggcggtgcatgtgaccaggacgtcgatgaatgttcgattggtgccaatccttgcgagcacttgggaagatgtgtcaacacccaagggtccttcttgtgtcagtgcggccgcggatacactggtccccgatgtgaaaccgacgtgaatgagtgcctatcagggccttgtcggaatcaagccacatgcctcgacaggatcggtcagtttacctgcatctgcatggccgggttcacagggacgtattgcgaggtggacatcgatgagtgtcagagctctccttgtgtcaacggcggcgtctgtaaggacagggtcaatggcttctcttgtacatgtccttcagggttttcagggtccacatgtcagctggatgtagacgaatgtgcatctacaccctgccggaacggcgccaagtgtgtggaccagccagatgggtatgaatgcagatgcgccgaaggttttgaagggacattgtgtgacagaaatgtggatgactgctcccctgatccctgccaccatggaaggtgcgtagacggcatcgcctctttcagctgtgcctgcgctcctggatataccggaaccagatgcgaatcccaggtagacgaatgccgttctcaaccatgccgccatgggggcaagtgcctcgacctcgtcgacaaatacctgtgtcgatgtcccagcggaaccacgggtgtgaattgcgaggtcaatattgacgactgtgctagtaatccctgcacttttggagtatgcagggacggcatcaatagatacgactgtgtctgccagcctggctttactgggccactctgcaacgttgagatcaacgagtgcgcatcttcaccctgtggcgagggtgggtcatgtgtggacggcgagaacggttttcggtgcttatgtccgcctggctcgctgccccctctgtgcttgccccctagtcatccgtgcgcgcatgagccttgttctcacggaatctgctacgacgctcctggaggctttcggtgcgtgtgtgagccaggctggtcaggaccccggtgttcacaaagtctcgcacgggatgcttgtgaaagccagccctgcagagccggtgggacatgtagtagcgatggaatgggttttcactgcacttgcccacccggcgtccagggacgccagtgtgagctgctgtcaccctgcactcctaacccatgtgaacatggaggccggtgcgagagtgccccaggccaactgcccgtgtgctcttgccctcagggctggcaggacccttgtctgaatggcggatcctgccaggatggggtgggctctttctcctgtagctgcctgcccggatttgcagggccacgatgcgctagggacgtcgatgagtgtctatctaatccctgcggccccgggacatgtactgaccacgtggcctcatttacctgtacctgcccaccaggatacggcggattccattgtgaacaggatctgccggactgctccccttcatcttgcttcaacggcggaacatgtgtggacggggttaacagttttagttgtctgtgccggcctggctacactggggctcactgtcaacacgaggctgacccgtgcctgagccgcccctgcctacacgggggtgtctgtagcgccgctcaccctgggttccggtgcacatgtttggaaagctttacagggccccaatgccagactctggttgattggtgttcccgccagccgtgccagaatggcggccggtgtgtccagaccggggcctactgcctctgtccccccggttggtccggccggctgtgcgacattagatctttgccttgtagggaagccgcggcacagattggtgtaagactagaacaactttgccaggcgggaggacagtgcgtggatgaggacagttcgcactactgcgtgtgtccagagggtaggactgggtcccattgcgaacaagaagtcgacccatgcctcgctcaaccttgtcagcatggtgggacctgccgcggctacatgggaggctatatgtgcgaatgccttccgggttacaacggcgacaattgcgaagatgacgtggatgagtgcgcatctcagccctgccagcatgggggaagctgcattgatctggtcgcgcgctacttgtgttcttgtccccctggcaccttgggggtcctctgcgagattaatgaagacgattgcggcccggggcccccattggacagcggcccacggtgtctgcataacggcacatgcgttgatcttgtgggcgggtttcgatgtacatgtccgcctggctacactggtctccggtgcgaggctgacatcaatgagtgtagatcaggagcatgtcacgctgcccatactagggattgcttgcaggatcctgggggcggcttccgctgtctttgtcacgctgggttctccgggccgagatgccagactgtcctctctccttgcgagagtcaaccctgccagcatggggggcagtgtagaccctcacctggacctgggggtggcttgaccttcacttgccattgcgcacagccattttggggccccaggtgcgaacgggtggcacgaagttgccgggagttgcaatgccccgtcggggtaccttgccagcagacgccccgtgggccaagatgtgcctgccccccaggtttgagcggccctagctgcagatcatttccggggagccccccgggcgccagtaatgcctcatag

SEQ ID NO: 276360 - DNA, 3867 bp, Artificial Sequence
  derived and/or modified sequence
gctgccatgggccctggggcccggggcagaagaagaagaagaagacccatgagccccccacctcctcctcctcctgtgcgggccctgcccctgctgctgctgctggccggccctggagctgctgccccaccctgcctggatggcagcccctgtgccaatggaggccgctgcacccagctgcccagccgggaggccgcctgcctgtgccccccaggctgggtgggggagcgctgccagctggaggacccctgccacagcggcccctgtgccggccggggcgtgtgccagagctctgtggtggccggcacagcccgcttcagctgccgctgcccccggggcttccggggccctgactgcagcctgcctgacccctgcctgagcagcccctgtgcccacggggcccgctgcagcgtgggcccagatggccgcttcctgtgcagctgccccccaggctaccagggccgcagctgccgcagtgatgtggatgaatgtcgggtgggggagccctgccgccacggcggcacctgcctgaacaccccaggcagcttccgctgccagtgcccagctggctacacaggccccctgtgtgaaaatcctgctgtgccctgtgcccccagcccctgcagaaatggaggcacctgccggcagagcggggacctgacctatgactgtgcctgcctgcccggctttgagggccagaactgtgaggtgaatgtggatgactgccccggccaccgctgcctgaatggaggcacctgtgtggatggagtgaacacctacaactgccagtgccccccagagtggacaggccagttctgcacagaagatgtggatgagtgccagctgcagcccaatgcctgccacaatggaggcacctgcttcaacaccctgggcggccacagctgtgtgtgtgtgaatggctggacaggagagagctgcagccagaacattgatgactgtgccacagctgtgtgcttccatggagccacctgccacgacagagtggccagcttctactgtgcctgccccatgggcaagacaggcctgctgtgccacctggatgatgcctgtgtgagcaacccctgccatgaagatgccatctgtgacaccaaccctgtgaatggccgggccatctgcacctgccccccaggcttcaccggcggggcctgtgaccaggatgtggatgagtgcagcattggagccaacccctgtgagcacctgggccgctgtgtgaacacccagggcagcttcctgtgccagtgtggccggggctacacaggcccccgctgtgaaacagatgtgaatgaatgtctgagcggcccctgcaggaaccaggccacctgcctggaccgcatcggccagttcacctgcatctgcatggccggcttcaccggcacctactgtgaggtggacattgatgagtgccagagcagcccctgtgtgaatggaggagtgtgcaaggacagagtgaatggcttcagctgcacctgccccagcggcttcagcggcagcacctgccagctggatgtggatgaatgtgccagcaccccctgcagaaatggagccaagtgtgtggaccagccagatggctatgagtgccgctgtgccgagggctttgagggcaccctgtgtgacagaaatgtggatgactgcagcccagacccctgccaccacggccgctgtgtggatggcatcgccagcttcagctgtgcctgtgcccctggctacacaggcacccgctgtgagagccaggtggatgaatgtcgcagccagccctgcagacatggaggcaagtgcctggacctggtggacaagtacctgtgccgctgccccagcggcaccactggagtgaactgtgaggtgaacattgatgactgtgccagcaacccctgcacctttggagtgtgcagagatggcatcaacagatatgactgtgtgtgccagcccggcttcaccggccccctgtgcaatgtggagatcaatgaatgtgccagcagcccctgtggggagggcggcagctgtgtggatggagaaaatggcttccgctgcctgtgccccccaggcagcctgccccccctgtgcctgccccccagccacccctgtgcccacgagccctgcagccacggcatctgctatgatgcccctgggggcttccgctgtgtgtgtgagcccggctggagcggcccccgctgcagccagagcctggccagagatgcctgtgagagccagccctgcagagctgggggcacctgcagcagtgatggcatgggcttccactgcacctgccccccaggagtgcagggccggcagtgtgagctgctgagcccctgcacccccaacccctgtgagcacggcggccgctgtgagagcgcccctggccagctgcctgtgtgcagctgcccccagggctggcaggacccctgcctgaatggaggcagctgccaggatggagtgggcagcttcagctgcagctgcctgcccggctttgctggcccccgctgtgccagagatgtggatgagtgcctgagcaacccctgtggccctggcacctgcacagaccacgtggccagcttcacctgcacctgccccccaggctacggcggcttccactgtgagcaggacctgcctgactgcagccccagcagctgcttcaatggaggcacctgtgtggatggagtgaacagcttcagctgcctgtgccggcccggctacacaggagcccactgccagcatgaagctgacccctgcctgagccggccctgcctgcatggaggagtgtgcagcgctgcccaccctggcttccgctgcacctgcctggagagcttcaccggcccccagtgccagaccctggtggactggtgcagccggcagccctgccagaatggaggccgctgtgtgcagacaggagcctactgcctgtgccccccaggctggagcggccgcctgtgtgacatccgcagcctgccctgccgggaggccgccgcccagattggagtgcggctggagcagctgtgccaggccggcggccagtgtgtggatgaggacagcagccactactgtgtgtgcccagagggccgcacaggcagccactgtgagcaggaggtggacccctgcctggcccagccctgccagcacggcggcacctgccggggctacatgggcggctacatgtgtgaatgtctgcccggctacaatggagacaactgtgaagatgatgtggatgaatgtgccagccagccctgccagcacggcggcagctgcatcgacctggtggcccgctacctgtgcagctgccccccaggcaccctgggcgtgctgtgtgagatcaatgaagatgactgtggccctggcccccccctggacagcggcccccgctgcctgcacaacggcacctgtgtggacctggtgggcggcttccgctgcacctgccccccaggctacacaggcctgcgctgtgaggccgacatcaatgaatgtagaagtggggcctgccacgccgcccacacccgggactgcctgcaggaccccggcggcggcttccgctgcctgtgccacgccggcttcagcggcccccgctgccagacagtgctgagcccctgtgagagccagccctgccagcacggcggccagtgccggcccagccctggccctgggggcggcctgaccttcacctgccactgtgcccagcccttctggggcccccgctgtgagcgggtggcccggagctgccgggagctgcagtgccctgtgggcgtgccctgccagcagaccccccggggcccccgctgtgcctgccccccaggcctgagcggccccagctgccgctccttccctggcagccccccaggggccagcaatgccagctag

SEQ ID NO: 276361 - DNA, 3867 bp, Artificial Sequence
  derived and/or modified sequence
gccgccatgggccccggcgcccggggccggcggcggcggcggcggccgatgtcaccaccgcccccccctccacccgtcagagctctgccacttctgctactgcttgctggccctggtgctgctgctcccccatgcctcgacggatcaccttgcgccaacggtggccggtgcacgcagttgccctcccgcgaagctgcgtgtctgtgtcctccaggttgggtgggagaaagatgccaacttgaggacccatgccactccgggccatgtgctggccgaggcgtatgccagtcttcagtcgtggcagggactgcgcgtttctcttgcaggtgtccacggggcttccgggggcccgattgctctttgcccgatccttgcctgtcctcaccatgcgcacacggtgcccggtgttcagtcgggcctgatggccggttcttatgctcttgcccgcccggctaccagggacgctcctgccgtagcgatgtggacgaatgcagagtaggcgagccttgcagacacgggggcacttgcctgaacacacctggatcttttaggtgtcagtgcccggctgggtacactggtcccctgtgcgaaaatcctgccgttccatgtgcgcccagcccctgccgcaatggggggacatgccgccagagtggtgatctgacctacgattgcgcttgtcttccgggtttcgagggccaaaactgcgaagtgaacgtggacgactgcccaggacatcgatgtttaaacggaggtacgtgtgtggatggggtcaatacttataactgtcaatgcccccctgagtggacaggacaattttgcacagaggacgtggatgagtgccagttgcagcctaatgcatgtcacaacgggggaacttgcttcaacaccttgggggggcactcctgtgtgtgtgttaacggatggacaggagaaagttgtagccagaatattgacgactgtgccacagcagtgtgttttcacggagctacctgtcacgaccgggtggccagcttctactgcgcttgtccgatgggaaagacgggactgctgtgccatttagacgacgcctgtgtctctaacccatgtcatgaggacgcaatctgcgataccaaccctgtgaacgggagagccatctgtacgtgtccccctgggttcacggggggcgcatgtgatcaggacgttgatgagtgtagcattggagccaatccctgcgagcatctcggaagatgcgtgaacactcaagggtctttcttatgccagtgcggtcgaggatacacaggaccaaggtgcgaaacagatgtgaacgaatgtttgtccggcccttgccgaaatcaagccacctgtttagatcgcatcgggcaattcacctgtatttgtatggccggatttactggaacctattgcgaagtggacattgatgagtgccagtcctccccgtgtgtgaacggcggtgtctgtaaggacagagtgaacggattcagctgtacttgcccttccgggttctcaggttccacctgccaactggatgtcgacgagtgcgcttctacaccctgccgtaatggcgctaaatgcgttgaccaacccgatggatacgaatgcaggtgtgctgaagggtttgagggcactttgtgtgatcggaacgtggacgactgttcccccgatccatgccaccacggcaggtgtgtggatggaatcgcctcattctcctgcgcctgcgcgcccggctatacaggcacccgatgtgaatcccaggtggacgagtgtaggtcccagccttgccgccacggtggcaagtgtctggacctcgtagataagtatctctgtcgttgtcccagcggaaccacaggagtgaactgtgaggtcaacatcgacgattgtgcctccaatccgtgcacttttggcgtgtgcagagacgggattaaccgatatgattgcgtgtgccaaccagggttcacgggaccactgtgtaatgtggagatcaatgaatgcgccagttctccctgcggggaggggggctcatgtgtcgatggggagaacgggtttcgctgtctatgtcctcccggtagcctgccccctctgtgccttccaccctcccacccatgtgctcacgagccttgctctcacgggatctgctatgacgcccctggtgggtttcgctgcgtctgtgaacccgggtggtctgggccacgttgttcacagtccctggctagagacgcctgtgaatcacagccttgcagagccggcggtacttgtagctccgacgggatggggttccactgtacatgtcctcctggggttcaaggccggcagtgtgagctgttgagcccgtgtacccctaatccatgcgagcatggcggaagatgcgaatcggcgcctgggcagctgcccgtgtgtagctgcccccaaggctggcaagacccgtgtctgaatggcggatcatgccaagatggcgtgggctctttttcgtgttcctgtttgcccggtttcgccgggccccgatgtgccagggacgtggatgagtgcttgtccaatccctgcggcccgggaacctgtaccgatcacgtggcttcctttacatgtacctgcccaccaggctatggcggcttccattgtgaacaggacctgccggattgttcacccagtagctgctttaacgggggcacttgtgtcgatggagttaattcattcagttgcttatgcagaccaggctataccggcgcccactgccagcatgaggcagatccgtgcctgtcccgaccatgccttcacgggggagtgtgctccgctgctcaccccggttttcgatgcacctgtctggagtcattcactggtccccagtgccagaccctagtggattggtgtagccgacagccttgccagaatgggggccggtgtgtccaaaccggggcttactgtctgtgcccaccagggtggtcagggaggctgtgtgacatccggtctcttccatgccgagaggctgctgcacagattggggttcggttagagcagctttgccaggccggcgggcagtgtgtggacgaagactcatctcactactgcgtctgcccagaagggcgcacaggctcccattgtgagcaggaagtagatccttgcctggcacagccatgtcagcacggcggcacctgtagaggatatatgggggggtatatgtgcgaatgtcttccaggctataacggcgataactgtgaggacgacgtggatgagtgcgcttctcagccatgccagcacggaggcagctgcatcgatctggtcgctcgatatttgtgctcttgtccaccaggcacgctgggtgttctatgcgagatcaatgaggatgattgtggccccggaccgcccttggattcgggcccacggtgcttgcacaatggtacttgcgtggacctggtaggaggcttccggtgtacttgtccccccgggtacaccggtcttaggtgcgaggctgatattaacgagtgcagatccggagcttgtcatgctgcccacactagggattgcctccaagaccctgggggaggctttagatgtctgtgtcacgccgggttctccgggccacgctgtcagacggtgctgagcccgtgcgagagtcaaccttgccaacacgggggacagtgtcgcccatctccaggaccgggggggggtctcacattcacatgccactgtgcgcagcctttttggggcccacggtgtgagagagtggcacgatcgtgtcgggagttgcaatgtccggtaggagttccttgtcagcagacaccaagaggaccacggtgtgcctgccctcctgggttgagcggcccatcttgtagaagctttcccgggagcccacctggggccagtaacgcttcctag

SEQ ID NO: 276362 - DNA, 7914 bp, Artificial Sequence
  derived and/or modified sequence
gcggcgcggaggctggcccgggacgcgcccggagcccagggaaggagggaggaggggagggtcgcggccggccgccatggggccgggggcccgtggccgccgccgccgccgtcgcccgatgtcgccgccaccgccaccgccacccgtgcgggcgctgcccctgctgctgctgctagcggggccgggggctgcagcccccccttgcctggacggaagcccgtgtgcaaatggaggtcgttgcacccagctgccctcccgggaggctgcctgcctgtgcccgcctggctgggtgggtgagcggtgtcagctggaggacccctgtcactcaggcccctgtgctggccgtggtgtctgccagagttcagtggtggctggcaccgcccgattctcatgccggtgcccccgtggcttccgaggccctgactgctccctgccagatccctgcctcagcagcccttgtgcccacggtgcccgctgctcagtggggcccgatggacgcttcctctgctcctgcccacctggctaccagggccgcagctgccgaagcgacgtggatgagtgccgggtgggtgagccctgccgccatggtggcacctgcctcaacacacctggctccttccgctgccagtgtccagctggctacacagggccactatgtgagaaccccgcggtgccctgtgcaccctcaccatgccgtaacgggggcacctgcaggcagagtggcgacctcacttacgactgtgcctgtcttcctgggtttgagggtcagaattgtgaagtgaacgtggacgactgtccaggacaccgatgtctcaatggggggacatgcgtggatggcgtcaacacctataactgccagtgccctcctgagtggacaggccagttctgcacggaggacgtggatgagtgtcagctgcagcccaacgcctgccacaatgggggtacctgcttcaacacgctgggtggccacagctgcgtgtgtgtcaatggctggacaggcgagagctgcagtcagaatatcgatgactgtgccacagccgtgtgcttccatggggccacctgccatgaccgcgtggcttctttctactgtgcctgccccatgggcaagactggcctcctgtgtcacctggatgacgcctgtgtcagcaacccctgccacgaggatgctatctgtgacacaaatccggtgaacggccgggccatttgcacctgtcctcccggcttcacgggtggggcatgtgaccaggatgtggacgagtgctctatcggcgccaacccctgcgagcacttgggcaggtgcgtgaacacgcagggctccttcctgtgccagtgcggtcgtggctacactggacctcgctgtgagaccgatgtcaacgagtgtctgtcggggccctgccgaaaccaggccacgtgcctcgaccgcataggccagttcacctgtatctgtatggcaggcttcacaggaacctattgcgaggtggacattgacgagtgtcagagtagcccctgtgtcaacggtggggtctgcaaggaccgagtcaatggcttcagctgcacctgcccctcgggcttcagcggctccacgtgtcagctggacgtggacgaatgcgccagcacgccctgcaggaatggcgccaaatgcgtggaccagcccgatggctacgagtgccgctgtgccgagggctttgagggcacgctgtgtgatcgcaacgtggacgactgctcccctgacccatgccaccatggtcgctgcgtggatggcatcgccagcttctcatgtgcctgtgctcctggctacacgggcacacgctgcgagagccaggtggacgaatgccgcagccagccctgccgccatggcggcaaatgcctagacctggtggacaagtacctctgccgctgcccttctgggaccacaggtgtgaactgcgaagtgaacattgacgactgtgccagcaacccctgcacctttggagtctgccgtgatggcatcaaccgctacgactgtgtctgccaacctggcttcacagggcccctttgtaacgtggagatcaatgagtgtgcttccagcccatgcggcgagggaggttcctgtgtggatggggaaaatggcttccgctgcctctgcccgcctggctccttgcccccactctgcctccccccgagccatccctgtgcccatgagccctgcagtcacggcatctgctatgatgcacctggcgggttccgctgtgtgtgtgagcctggctggagtggcccccgctgcagccagagcctggcccgagacgcctgtgagtcccagccgtgcagggccggtgggacatgcagcagcgatggaatgggtttccactgcacctgcccgcctggtgtccagggacgtcagtgtgaactcctctccccctgcaccccgaacccctgtgagcatgggggccgctgcgagtctgcccctggccagctgcctgtctgctcctgcccccagggctggcaagacccatgcctgaacggtggctcgtgccaagacggcgtgggctccttttcctgctcctgcctccctggtttcgccggcccacgatgcgcccgcgatgtggatgagtgcctgagcaacccctgcggcccgggcacctgtaccgaccacgtggcctccttcacctgcacctgcccgccaggctacggaggcttccactgcgaacaggacctgcccgactgcagccccagctcctgcttcaatggcgggacctgtgtggacggcgtgaactcgttcagctgcctgtgccgtcccggctacacaggagcccactgccaacatgaggcagacccctgcctctcgcggccctgcctacacgggggcgtctgcagcgccgcccaccctggcttccgctgcacctgcctcgagagcttcacgggcccgcagtgccagacgctggtggattggtgcagccgccagccttgtcaaaacgggggtcgctgcgtccagactggggcctattgcctttgtccccctggatggagcggacgcctctgtgacatccgaagcttgccctgcagggaggccgcagcccagatcggggtgcggctggagcagctgtgtcaggcgggtgggcagtgtgtggatgaagacagctcccactactgcgtgtgcccagagggccgtactggtagccactgtgagcaggaggtggacccctgcttggcccagccctgccagcatggggggacctgccgtggctatatggggggctacatgtgtgagtgtcttcctggctacaatggtgataactgtgaggacgacgtggacgagtgtgcctcccagccctgccagcacgggggttcatgcattgacctcgtggcccgctatctctgctcctgtcccccaggaacgctgggggtgctctgcgagattaatgaggatgactgcggcccaggcccaccgctggactcagggccccggtgcctacacaatggcacctgcgtggacctggtgggtggtttccgctgcacctgtcccccaggatacactggtttgcgctgcgaggcagacatcaatgagtgtcgctcaggtgcctgccacgcggcacacacccgggactgcctgcaggacccaggcggaggtttccgttgcctttgtcatgctggcttctcaggtcctcgctgtcagactgtcctgtctccctgcgagtcccagccatgccagcatggaggccagtgccgtcctagcccgggtcctgggggtgggctgaccttcacctgtcactgtgcccagccgttctggggtccgcgttgcgagcgggtggcgcgctcctgccgggagctgcagtgcccggtgggcgtcccatgccagcagacgccccgcgggccgcgctgcgcctgccccccagggttgtcgggaccctcctgccgcagcttcccggggtcgccgccgggggccagcaacgccagctgcgcggccgccccctgtctccacgggggctcctgccgccccgcgccgctcgcgcccttcttccgctgcgcttgcgcgcagggctggaccgggccgcgctgcgaggcgcccgccgcggcacccgaggtctcggaggagccgcggtgcccgcgcgccgcctgccaggccaagcgcggggaccagcgctgcgaccgcgagtgcaacagcccaggctgcggctgggacggcggcgactgctcgctgagcgtgggcgacccctggcggcaatgcgaggcgctgcagtgctggcgcctcttcaacaacagccgctgcgaccccgcctgcagctcgcccgcctgcctctacgacaacttcgactgccacgccggtggccgcgagcgcacttgcaacccggtgtacgagaagtactgcgccgaccactttgccgacggccgctgcgaccagggctgcaacacggaggagtgcggctgggatgggctggattgtgccagcgaggtgccggccctgctggcccgcggcgtgctggtgctcacagtgctgctgccgccagaggagctactgcgttccagcgccgactttctgcagcggctcagcgccatcctgcgcacctcgctgcgcttccgcctggacgcgcacggccaggccatggtcttcccttaccaccggcctagtcctggctccgaaccccgggcccgtcgggagctggcccccgaggtgatcggctcggtagtaatgctggagattgacaaccggctctgcctgcagtcgcctgagaatgatcactgcttccccgatgcccagagcgccgctgactacctgggagcgttgtcagcggtggagcgcctggacttcccgtacccactgcgggacgtgcggggggagccgctggagcctccagaacccagcgtcccgctgctgccactgctagtggcgggcgctgtcttgctgctggtcattctcgtcctgggtgtcatggtggcccggcgcaagcgcgagcacagcaccctctggttccctgagggcttctcactgcacaaggacgtggcctctggtcacaagggccggcgggaacccgtgggccaggacgcgctgggcatgaagaacatggccaagggtgagagcctgatgggggaggtggccacagactggatggacacagagtgcccagaggccaagcggctaaaggtagaggagccaggcatgggggctgaggaggctgtggattgccgtcagtggactcaacaccatctggttgctgctgacatccgcgtggcaccagccatggcactgacaccaccacagggcgacgcagatgctgatggcatggatgtcaatgtgcgtggcccagatggcttcaccccgctaatgctggcttccttctgtgggggggctctggagccaatgccaactgaagaggatgaggcagatgacacatcagctagcatcatctccgacctgatctgccagggggctcagcttggggcacggactgaccgtactggcgagactgctttgcacctggctgcccgttatgcccgtgctgatgcagccaagcggctgctggatgctggggcagacaccaatgcccaggaccactcaggccgcactcccctgcacacagctgtcacagccgatgcccagggtgtcttccagattctcatccgaaaccgctctacagacttggatgcccgcatggcagatggctcaacggcactgatcctggcggcccgcctggcagtagagggcatggtggaagagctcatcgccagccatgctgatgtcaatgctgtggatgagcttgggaaatcagccttacactgggctgcggctgtgaacaacgtggaagccactttggccctgctcaaaaatggagccaataaggacatgcaggatagcaaggaggagacccccctattcctggccgcccgcgagggcagctatgaggctgccaagctgctgttggaccactttgccaaccgtgagatcaccgaccacctggacaggctgccgcgggacgtagcccaggagagactgcaccaggacatcgtgcgcttgctggatcaacccagtgggccccgcagcccccccggtccccacggcctggggcctctgctctgtcctccaggggccttcctccctggcctcaaagcggcacagtcggggtccaagaagagcaggaggccccccgggaaggcggggctggggccgcaggggccccgggggcggggcaagaagctgacgctggcctgcccgggccccctggctgacagctcggtcacgctgtcgcccgtggactcgctggactccccgcggcctttcggtgggccccctgcttcccctggtggcttcccccttgaggggccctatgcagctgccactgccactgcagtgtctctggcacagcttggtggcccaggccgggcgggtctagggcgccagccccctggaggatgtgtactcagcctgggcctgctgaaccctgtggctgtgcccctcgattgggcccggctgcccccacctgcccctccaggcccctcgttcctgctgccactggcgccgggaccccagctgctcaacccagggacccccgtctccccgcaggagcggcccccgccttacctggcagtcccaggacatggcgaggagtacccggcggctggggcacacagcagccccccaaaggcccgcttcctgcgggttcccagtgagcacccttacctgaccccatcccccgaatcccctgagcactgggccagcccctcacctccctccctctcagactggtccgaatccacgcctagcccagccactgccactggggccatggccaccaccactggggcactgcctgcccagccacttcccttgtctgttcccagctcccttgctcaggcccagacccagctggggccccagccggaagttacccccaagaggcaagtgttggcctgagacgctcgtcagttcttagatcttgggggcctaaagagacccccgtcctgcctcctttctttctctgtctcttccttccttttagtctttttcatcctcttctctttccaccaaccctcctgcatccttgccttgcagcgtgaccgagataggtcatcagcccagggcttcagtcttcctttatttataatgggtgggggctaccacccaccctctcagtcttgtgaagagtctgggacctccttcttccccacttctctcttccctcattcctttctctctccttctggcctctcatttccttacactctgacatgaatgaattattattatttttatttttctttttttttttacattttgtatagaaacaaattcatttaaacaaacttattattattattttttacaaaatatatatatggagatgctccctccccctgtgaaccccccagtgcccccgtggggctgagtctgtgggcccattcggccaagctggattctgtgtacctagtacacaggcatgactgggatcccgtgtaccgagtacacgacccaggtatgtaccaagtaggcacccttgggcgcacccactggggccaggggtcgggggagtgttgggagcctcctccccaccccacctccctcacttcactgcattccagatgggacatgttccatagccttgctggggaagggcccactgccaactccctctgccccagccccacccttggccatctccctttgggaactagggggctgctggtgggaaatgggagccagggcagatgtatgcattcctttgtgtccctgtaaatgtgggactacaagaagaggagctgcctgagtggtactttctcttcctggtaatcctctggcccagcctcatggcagaatagaggtatttttaggctatttttgtaatatggcttctggtcaaaatccctgtgtagctgaattcccaagccctgcattgtacagccccccactcccctcaccacctaataaaggaatagttaacactc

SEQ ID NO: 276363 - DNA, 3867 bp, Artificial Sequence
  derived and/or modified sequence
gccgctatgggacccggtgccaggggaaggcgcaggcgtaggcgacccatgtcacctcctccaccgccaccccctgtccgggctctccctttgcttctgctgctcgccggaccgggagccgcagctcctccatgcctagatggatccccctgcgctaacgggggaaggtgcacacagcttccttctcgggaagctgcttgcctctgcccaccagggtgggtgggcgaacgctgccagcttgaggatccctgccatagcggaccttgtgccggtcgcggagtgtgtcagagtagcgtggtcgccggaacagctagattcagttgccgctgccccagaggttttagaggacctgactgttcccttcccgacccctgcctgagctcaccatgcgcgcatggcgctcggtgctcagtcggacccgacgggagattcttgtgctcttgcccaccaggctatcaaggtcgctcgtgccgatctgacgttgatgaatgcagagtcggagagccctgtcgacacggcggaacatgcctaaacacacccggatccttcaggtgtcagtgtcctgctggctatacagggcctctctgcgagaatcccgctgttccctgcgcaccttctccttgtcgtaatggaggaacgtgtcggcaatcaggagatttgacatacgactgcgcctgtctgccgggtttcgaaggccagaactgtgaagtcaacgtggatgactgcccaggtcatcgctgcctaaatgggggaacatgcgtggatggagtgaacacttacaactgccagtgtcctcctgaatggaccggacagttctgcacagaagacgtggatgagtgtcagttgcaacccaacgcatgccataatgggggtacctgctttaacaccctcggtggtcatagctgcgtctgcgtgaatggatggaccggagaatcctgtagccagaacattgatgattgcgcaaccgccgtgtgttttcatggcgcaacctgtcacgatagagtcgcctctttttactgtgcgtgccccatgggcaaaactgggttgctgtgccacttagacgacgcctgtgtgagcaacccttgccacgaagacgccatctgcgacaccaaccccgtcaacggtagggctatttgcacctgcccccctggatttacagggggtgcctgcgaccaggatgtggacgagtgttccataggggcaaacccttgcgagcacttgggccgatgcgttaacacccagggcagtttcctgtgccagtgtggtcgaggctacacgggacctcgatgtgaaactgacgtgaatgagtgcctgtctggaccatgcagaaaccaggccacctgtctcgatcgtattggtcaatttacatgtatttgtatggcgggattcaccggtacttactgcgaggtcgatatcgacgaatgtcagtctagcccatgcgtaaacggcggagtctgtaaggatagggtcaacggattttcatgtacgtgtccctccggcttctcggggtctacctgtcagctcgatgttgatgaatgcgctagtactccgtgtagaaacggcgctaaatgtgtcgaccaacctgatggctatgaatgtcggtgtgcagaaggttttgaagggacgctgtgtgaccggaatgtggatgactgcagccccgacccctgccaccatgggagatgcgtagacggaatcgcttcattttcatgtgcttgtgctcccggatatacgggcactcggtgcgagtcccaagtggacgaatgccggagccaaccctgtagacacgggggaaaatgtctcgacctcgtcgacaaatacctctgccggtgcccaagcggtactacaggagttaactgcgaggtgaatattgacgattgcgcctcaaacccttgtacttttggtgtgtgtcgcgatggaattaacagatatgattgtgtatgccagcccggattcactggtcccttgtgtaatgtcgagatcaatgaatgcgcgtcctcaccgtgtggagagggaggatcttgtgtggacggggaaaatggctttagatgcttgtgtcccccaggctctttacctcccctgtgcctgccacccagccatccttgcgctcatgaaccatgctcccatgggatatgttacgacgccccaggcggatttcgctgcgtatgcgagcccggttggagcggccctcgatgctctcagagcctcgctcgtgatgcatgtgagtctcagccttgtcgcgcaggaggaacctgttcatccgatggcatggggttccattgcacctgtcctcccggagttcagggaaggcagtgcgagctcctctcgccatgcactccgaacccatgcgaacacgggggtcgttgcgaaagtgcgccaggtcagttgcctgtttgtagctgccctcaaggatggcaggacccctgcctcaacggaggcagctgccaggacggggtggggtctttttcatgttcgtgcctccccggatttgcgggtccaagatgcgcacgagacgtagacgaatgtctgtcgaatccgtgcggaccgggtacatgcactgatcatgttgcatcttttacttgtacatgtccacccggatacggcggtttccattgcgaacaagatctgccagactgctcccctagttcttgtttcaatggaggcacttgtgtggatggggtcaattccttcagctgcctctgccgcccaggttataccggcgctcattgtcagcacgaggctgatccctgcctgtctcggccatgtcttcacgggggtgtctgctccgccgcacatcctggatttaggtgcacctgtctggaaagtttcactggccctcaatgtcagacattggtcgactggtgttctagacaaccttgccagaacggcggaaggtgtgtacaaactggcgcttactgtctctgcccccctgggtggagcgggagattatgtgatatccgctcactgccgtgtagagaggccgctgcccagatcggcgtgcgtttggagcagctgtgccaggccggtgggcaatgcgtcgatgaagacagcagtcactactgtgtgtgccccgaggggcgtacaggctcacattgtgaacaagaagtagatccttgcctcgcacagccctgtcaacacgggggtacatgcagaggctatatgggcggatatatgtgcgaatgtctgccagggtacaacggggacaattgtgaagacgatgtcgatgagtgcgcatcacaaccatgccagcatggcggatcctgtattgatttagtggcacgctatttatgttcatgtccacccggaaccctgggtgtcctctgtgaaattaacgaagacgattgtggtcccggtcctcccctcgattccggccctaggtgcctccataatggaacatgcgtcgacctggttggcggtttccgttgtacatgccccccaggctataccggcttaaggtgcgaagctgacatcaacgaatgccgaagtggagcctgtcacgccgcacacacaagagattgtctgcaggatcccggaggtgggtttagatgcctgtgccacgcagggtttagtggccctcgctgtcagacagtgctttccccatgtgaatcccagccttgtcagcacgggggacagtgtcgccctagccctgggccaggcggagggctcacatttacttgccactgcgcacagcctttctggggcccacggtgtgaacgagtagctagatcctgtcgggaattgcagtgcccagttggggtcccctgtcagcaaaccccgcgaggccctaggtgcgcctgccccccaggactgtccgggccttcttgccggtcattcccgggatcccctcccggagcatctaacgcctcttag

SEQ ID NO: 276364 - DNA, 345 bp, Artificial Sequence
  derived and/or modified sequence
ggcatcagcaagctgaagatggtgaaccagtgcttcggcctgggcgacggcacctgcctgctgagcatccagctggagggccccaagcacgtggccttcggctggcccgagtgccccgaggcccccctgcccaccctgccccccccccccctgaaggagcccctgaccgtgagccccagaggcagccacctgatgagcgccatgcccggcgtgagccccagcagatgcgtgggcagcttccccagctgcctgatgctgacctgcggccacagaggctgcccccacatcggcgccttcagcagcagcagctgccccctgtgccacaacggcatgatggcctggtag

SEQ ID NO: 276365 - DNA, 3867 bp, Artificial Sequence
  derived and/or modified sequence
gccgccatgggccccggcgccagaggcagaagaagaagaagaagacccatgagccccccccccccccccccccccgtgagagccctgcccctgctgctgctgctggccggccccggcgccgccgcccccccctgcctggacggcagcccctgcgccaacggcggcagatgcacccagctgcccagcagagaggccgcctgcctgtgcccccccggctgggtgggcgagagatgccagctggaggacccctgccacagcggcccctgcgccggcagaggcgtgtgccagagcagcgtggtggccggcaccgccagattcagctgcagatgccccagaggcttcagaggccccgactgcagcctgcccgacccctgcctgagcagcccctgcgcccacggcgccagatgcagcgtgggccccgacggcagattcctgtgcagctgcccccccggctaccagggcagaagctgcagaagcgacgtggacgagtgcagagtgggcgagccctgcagacacggcggcacctgcctgaacacccccggcagcttcagatgccagtgccccgccggctacaccggccccctgtgcgagaaccccgccgtgccctgcgcccccagcccctgcagaaacggcggcacctgcagacagagcggcgacctgacctacgactgcgcctgcctgcccggcttcgagggccagaactgcgaggtgaacgtggacgactgccccggccacagatgcctgaacggcggcacctgcgtggacggcgtgaacacctacaactgccagtgcccccccgagtggaccggccagttctgcaccgaggacgtggacgagtgccagctgcagcccaacgcctgccacaacggcggcacctgcttcaacaccctgggcggccacagctgcgtgtgcgtgaacggctggaccggcgagagctgcagccagaacatcgacgactgcgccaccgccgtgtgcttccacggcgccacctgccacgacagagtggccagcttctactgcgcctgccccatgggcaagaccggcctgctgtgccacctggacgacgcctgcgtgagcaacccctgccacgaggacgccatctgcgacaccaaccccgtgaacggcagagccatctgcacctgcccccccggcttcaccggcggcgcctgcgaccaggacgtggacgagtgcagcatcggcgccaacccctgcgagcacctgggcagatgcgtgaacacccagggcagcttcctgtgccagtgcggcagaggctacaccggccccagatgcgagaccgacgtgaacgagtgcctgagcggcccctgcagaaaccaggccacctgcctggacagaatcggccagttcacctgcatctgcatggccggcttcaccggcacctactgcgaggtggacatcgacgagtgccagagcagcccctgcgtgaacggcggcgtgtgcaaggacagagtgaacggcttcagctgcacctgccccagcggcttcagcggcagcacctgccagctggacgtggacgagtgcgccagcaccccctgcagaaacggcgccaagtgcgtggaccagcccgacggctacgagtgcagatgcgccgagggcttcgagggcaccctgtgcgacagaaacgtggacgactgcagccccgacccctgccaccacggcagatgcgtggacggcatcgccagcttcagctgcgcctgcgcccccggctacaccggcaccagatgcgagagccaggtggacgagtgcagaagccagccctgcagacacggcggcaagtgcctggacctggtggacaagtacctgtgcagatgccccagcggcaccaccggcgtgaactgcgaggtgaacatcgacgactgcgccagcaacccctgcaccttcggcgtgtgcagagacggcatcaacagatacgactgcgtgtgccagcccggcttcaccggccccctgtgcaacgtggagatcaacgagtgcgccagcagcccctgcggcgagggcggcagctgcgtggacggcgagaacggcttcagatgcctgtgcccccccggcagcctgccccccctgtgcctgccccccagccacccctgcgcccacgagccctgcagccacggcatctgctacgacgcccccggcggcttcagatgcgtgtgcgagcccggctggagcggccccagatgcagccagagcctggccagagacgcctgcgagagccagccctgcagagccggcggcacctgcagcagcgacggcatgggcttccactgcacctgcccccccggcgtgcagggcagacagtgcgagctgctgagcccctgcacccccaacccctgcgagcacggcggcagatgcgagagcgcccccggccagctgcccgtgtgcagctgcccccagggctggcaggacccctgcctgaacggcggcagctgccaggacggcgtgggcagcttcagctgcagctgcctgcccggcttcgccggccccagatgcgccagagacgtggacgagtgcctgagcaacccctgcggccccggcacctgcaccgaccacgtggccagcttcacctgcacctgcccccccggctacggcggcttccactgcgagcaggacctgcccgactgcagccccagcagctgcttcaacggcggcacctgcgtggacggcgtgaacagcttcagctgcctgtgcagacccggctacaccggcgcccactgccagcacgaggccgacccctgcctgagcagaccctgcctgcacggcggcgtgtgcagcgccgcccaccccggcttcagatgcacctgcctggagagcttcaccggcccccagtgccagaccctggtggactggtgcagcagacagccctgccagaacggcggcagatgcgtgcagaccggcgcctactgcctgtgcccccccggctggagcggcagactgtgcgacatcagaagcctgccctgcagagaggccgccgcccagatcggcgtgagactggagcagctgtgccaggccggcggccagtgcgtggacgaggacagcagccactactgcgtgtgccccgagggcagaaccggcagccactgcgagcaggaggtggacccctgcctggcccagccctgccagcacggcggcacctgcagaggctacatgggcggctacatgtgcgagtgcctgcccggctacaacggcgacaactgcgaggacgacgtggacgagtgcgccagccagccctgccagcacggcggcagctgcatcgacctggtggccagatacctgtgcagctgcccccccggcaccctgggcgtgctgtgcgagatcaacgaggacgactgcggccccggcccccccctggacagcggccccagatgcctgcacaacggcacctgcgtggacctggtgggcggcttcagatgcacctgcccccccggctacaccggcctgagatgcgaggccgacatcaacgagtgcagaagcggcgcctgccacgccgcccacaccagagactgcctgcaggaccccggcggcggcttcagatgcctgtgccacgccggcttcagcggccccagatgccagaccgtgctgagcccctgcgagagccagccctgccagcacggcggccagtgcagacccagccccggccccggcggcggcctgaccttcacctgccactgcgcccagcccttctggggccccagatgcgagagagtggccagaagctgcagagagctgcagtgccccgtgggcgtgccctgccagcagacccccagaggccccagatgcgcctgcccccccggcctgagcggccccagctgcagaagcttccccggcagcccccccggcgccagcaacgccagctag

SEQ ID NO: 276366 - DNA, 309 bp, Artificial Sequence
  derived and/or modified sequence
atggtggagaccaagaaggtgacaagcagtggggttctgttgctggataattactctgatcggatccaggttctgcgcaatatggtgcactgtgccgatctgtccaaccccaccaagccactggagttatataggcagtggaccgatagaattatggccgagttcttccaacagggtgacagggagagggaacgcgggatggaaattagccctatgtgcgacaaacatacggcaagcgtggagaaatcccaggtgggttttatcgactatatcgtccaccccctgtgggaaacctgggctgatctgtag

SEQ ID NO: 276367 - DNA, 309 bp, Artificial Sequence
  derived and/or modified sequence
atggtggagaccaagaaggtgaccagcagcggcgtgctgctgctggacaactacagcgaccgcatccaggtgctgaggaacatggtgcactgtgccgacctgagcaaccccaccaagcccctggagctgtaccggcagtggacagaccgcatcatggccgagttcttccagcagggcgaccgggagcgggagcggggcatggagatcagccccatgtgtgacaagcacacagcctctgtggagaagagccaggtgggcttcatcgactacatcgtgcaccccctgtgggagacctgggccgacctgtag

SEQ ID NO: 276368 - DNA, 309 bp, Artificial Sequence
  derived and/or modified sequence
atggtggagaccaagaaggtgaccagcagcggcgtgctgctgctggataattatagtgataggatccaggtgctgcgtaacatggttcactgcgctgacctgtcaaatccaaccaagccactagagttgtataggcagtggacggataggatcatggcagaattctttcagcagggtgatagagagagagaacgcggcatggaaatcagccccatgtgtgacaagcatacagcctcggtggagaagtcgcaggttggattcatcgattatattgttcaccccctgtgggaaacgtgggccgacctctag

SEQ ID NO: 276369 - DNA, 309 bp, Artificial Sequence
  derived and/or modified sequence
atggtggagaccaaaaaggtcacaagcagcggtgtgctactgctggataactacagtgatagaattcaggtgctgaggaacatggtacactgtgcagaccttagcaatcccaccaagccccttgagctctaccgacagtggaccgatcgcattatggccgagttttttcagcagggggacagagaaagagaacgtgggatggaaatcagtcctatgtgtgataaacacaccgcttctgtcgagaaaagtcaggtcggtttcatcgactatatcgttcacccattatgggaaacatgggctgatctctag

SEQ ID NO: 276370 - DNA, 309 bp, Artificial Sequence
  derived and/or modified sequence
atggtggagaccaagaaggtgaccagcagcggcgtgctgctgctggacaactacagcgacagaatccaggtgctgagaaacatggtgcactgcgccgacctgagcaaccccaccaagcccctggagctgtacagacagtggaccgacagaatcatggccgagttcttccagcagggcgacagagagagagagagaggcatggagatcagccccatgtgcgacaagcacaccgccagcgtggagaagagccaggtgggcttcatcgactacatcgtgcaccccctgtgggagacctgggccgacctgtag

SEQ ID NO: 276371 - protein, 177 aa, Artificial Sequence
  derived and/or modified sequence
MTEEACRTRSQKRALERDPTEDDVESKKIKMERGLLASDLNTDGDMRVTPEPGAGPTQGLLRATEATAMAMGRGEGLVGDGPVDMRTSHSDMKSERRPPSPDVIVLSDNEQPSSPRVNGLTTVALKETSTEALMKSSPEERERMIKQLKEELRLEEAKLVLLKKLRQSQIQKEATAQ

SEQ ID NO: 276372 - protein, 18 aa, Artificial Sequence
  derived and/or modified sequence
MSLWPWPTGRTSTPYPEA

SEQ ID NO: 276373 - protein, 168 aa, Artificial Sequence
  derived and/or modified sequence
MTEEACRTRSQKRALERDPTEDDVESKKIKMERGLLASDLNTDGDMRVTPEPGAGPTQGLLRATEATAMAMGRGEGLVGDGPVDMRTSHSDMKSERRPPSPDVIVLSDNEQPSSPRVNGLTTVALKETSTEALMKSSPEERERMIKQLKEELRLEEAKLVLLKKLRQS

SEQ ID NO: 276374 - DNA, 57 bp, Artificial Sequence
  derived and/or modified sequence
atgtcactttggccttggccaactggaaggacctccacgccttacccagaagcttag

SEQ ID NO: 276375 - DNA, 57 bp, Artificial Sequence
  derived and/or modified sequence
atgagcctgtggccctggcccaccggccgcaccagcaccccctacccagaggcctag

SEQ ID NO: 276376 - DNA, 57 bp, Artificial Sequence
  derived and/or modified sequence
atgagcctgtggccctggcccaccggccggaccagcaccccctaccctgaggcctag

SEQ ID NO: 276377 - DNA, 57 bp, Artificial Sequence
  derived and/or modified sequence
atgtcactttggccctggccaaccggaagaactagtacaccctatccagaagcttag

SEQ ID NO: 276378 - DNA, 937 bp, Artificial Sequence
  derived and/or modified sequence
agcgggcaatttcagtgtgagactgagccgcgagactgagctgcggctccgagcgctgcgcggcggctcctcccgcccagggtcagcgccccggcgcgcgcacgcgcacccccgccgcccgagcgcgccccgcgccgcccgcgcagtcggtcggtcggtcgtctgtcctgtcgccgctgccgccgccgccacagcggccgccgcgggcgccacctgagggagtcgcctccgcgggacgccacaagacctgaccggactgcgccgcccgaggccgtcggccgccgtcagcgagggcgccgagcaacttcggttggtcagcacattgtctcaagtagccttttgatgtcactgtggccatggccaactggtaggaccagcaccccataccccgaagccagttcagaatgaccgaagaagcatgccgaacacggagtcagaaacgagcgcttgaacgggacccaacagaggacgatgtggagagcaagaaaataaaaatggagagaggattgttggcttcagatttaaacactgacggagacatgagggtgacacctgagccgggagcaggtccaacccaaggattgctgagggcaacagaggccacggccatggccatgggcagaggcgaagggctggtgggcgatgggcccgtggacatgcgcacctcacacagtgacatgaagtccgagaggagacccccctcacctgacgtgattgtgctctccgacaacgagcagccctcgagcccgagagtgaatgggctgaccacggtggccttgaaggagactagcaccgaggccctcatgaaaagcagtcctgaagaacgagaaaggatgatcaagcagctgaaggaagaattgaggttagaagaagcaaaactcgtgttgttgaaaaagttgcggcagagtcaaatacaaaaggaagccaccgcccagaa

SEQ ID NO: 276379 - DNA, 507 bp, Artificial Sequence
  derived and/or modified sequence
tctgcccacgcatccagtatgtgcagcacacctgctctgtgactgacactcttgcagaagtggggccacttcagggacatggacaaggtgttgtacctgctgtcacagagcctgttatctgttcagaatgaccgaagaagcatgccgaacacggagtcagaaacgagcgcttgaacgggacccaacagaggacgatgtggagagcaagaaaataaaaatggagagaggattgttggcttcagatttaaacactgacggagacatgagggtgacacctgagccgggagcaggtccaacccaaggattgctgagggcaacagaggccacggccatggccatgggcagaggcgaagggctggtgggcgatgggcccgtggacatgcgcacctcacacagtgacatgaagtccgagaggagacccccctcacctgacgtgattgtgctctccgacaacgagcagccctcgagcccgagagtgaatgggctgaccacggtggccttgaagga

SEQ ID NO: 276380 - DNA, 570 bp, Artificial Sequence
  derived and/or modified sequence
agagtgcggatattctatgggttttcttcagtccctggacaggtggggtcatcctaggacccctgcaatctttaggggatttagggagaaacagtgtccaggaacatctgaggtctctgttcccgtgcattgcttggggattgaagttcagaatgaccgaagaagcatgccgaacacggagtcagaaacgagcgcttgaacgggacccaacagaggacgatgtggagagcaagaaaataaaaatggagagaggattgttggcttcagatttaaacactgacggagacatgagggtgacacctgagccgggagcaggtccaacccaaggattgctgagggcaacagaggccacggccatggccatgggcagaggcgaagggctggtgggcgatgggcccgtggacatgcgcacctcacacagtgacatgaagtccgagaggagacccccctcacctgacgtgattgtgctctccgacaacgagcagccctcgagcccgagagtgaatgggctgaccacggtggccttgaaggagactagcaccgaggccctcatgaaaagcagtcctgaag

SEQ ID NO: 276381 - DNA, 565 bp, Artificial Sequence
  derived and/or modified sequence
atgtgtgtgctgcaggtacagggcagtggcacgttgatgggccaggcctcactctactcaaagtgtacctcactggcaaccaaagggttaaatgtgatccccagtccccactccccagaggtgagcagggagtgaggagacctcccttccctgaaggggagaagctggggttaactcgagtcaccacagcatagggctagtcccaggccccgaccctgctcctggaacagtgcagtcaccgccctcctggattccagacattgcaggtgctgaaaatcccaaagaatgaccgaagaagcatgccgaacacggagtcagaaacgagcgcttgaacgggacccaacagaggacgatgtggagagcaagaaaataaaaatggagagaggattgttggcttcagatttaaacactgacggagacatgagggtgacacctgagccgggagcaggtccaacccaaggattgctgagggcaacagaggccacggccatggccatgggcagaggcgaagggctggtgggcgatgggcccgtggacatgcgcacctcacacagtgacatgaagt

SEQ ID NO: 276382 - DNA, 265 bp, Artificial Sequence
  derived and/or modified sequence
ggcgggcgggcggaccggcgcagcgagcgccgcgggcccgggcggccccacaggcggaacgagcgcgcgcggcccggcgtccccggcccctccgccgcccggccccgcgggcgaccccggaccagcagcccccgtaacctgcgcgctgccctagggcccggccgacccgcggcccggttggtcagcacattgtctcaagtagccttttgatgtcactgtggccatggccaactggtaggaccagcaccccataccccgaagccag

SEQ ID NO: 276383 - DNA, 736 bp, Artificial Sequence
  derived and/or modified sequence
gggctccatgtgtgcggccgaggggcgcattatctggccggcggcgcgggcgggcgggcggaccggcgcagcgagcgccgcgggcccgggcggccccacaggcggaacgagcgcgcgcggcccggcgtccccggcccctccgccgcccggccccgcgggcgaccccggaccagcagcccccgtaacctgcgcgctgccctagggcccggccgacccgcggcccgttcagaatgaccgaagaagcatgccgaacacggagtcagaaacgagcgcttgaacgggacccaacagaggacgatgtggagagcaagaaaataaaaatggagagaggattgttggcttcagatttaaacactgacggagacatgagggtgacacctgagccgggagcaggtccaacccaaggattgctgagggcaacagaggccacggccatggccatgggcagaggcgaagggctggtgggcgatgggcccgtggacatgcgcacctcacacagtgacatgaagtccgagaggagacccccctcacctgacgtgattgtgctctccgacaacgagcagccctcgagcccgagagtgaatgggctgaccacggtggccttgaaggagactagcaccgaggccctcatgaaaagcagtcctgaagaacgagaaaggatgatcaagcagctgaaggaagaattgaggttagaagaagcaaaactcgtgttgttgaaaaagttgcggcagagtca

SEQ ID NO: 276384 - DNA, 57 bp, Artificial Sequence
  derived and/or modified sequence
atgagcctgtggccctggcccaccggcagaaccagcaccccctaccccgaggcctag

SEQ ID NO: 276385 - protein, 509 aa, Artificial Sequence
  derived and/or modified sequence
MTVTYTARVANARFGGFSQLLLLWRGSIYKLLWRELLCFLGFYMALSAAYRFVLTEGQKRYFEKLVIYCDQYASLIPVSFVLGFYVTLVVNRWWSQYLCMPLPDALMCVVAGTVHGRDDRGRLYRRTLMRYAGLSAVLILRSVSTAVFKRFPTIDHVVEAGFMTREERKKFENLNSSYNKYWVPCVWFSNLAAQARREGRIRDNSALKLLLEELNVFRGKCGMLFHYDWISVPLVYTQVVTIALYSYFLACLIGRQFLDPAQGYKDHDLDLCVPIFTLLQFFFYAGWLKVAEQLINPFGEDDDDFETNFLIDRNFQVSMLAVDEMYDDLAVLEKDLYWDAAEARAPYTAATVFQLRQPSFQGSTFDITLAKEDMQFQRLDGLDGPMGEAPGDFLQRLLPAGAGMVAGGPLGRRLSFLLRKNSCVSEASTGASCSCAVVPEGAAPECSCGDPLLDPGLPEPEAPPPAGPEPLTLIPGPVEPFSIVTMPGPRGPAPPWLPSPIGEEEENLA

SEQ ID NO: 276386 - DNA, 1530 bp, Artificial Sequence
  derived and/or modified sequence
atgactgtgacatacacagcaagggtcgccaatgctcggtttgggggattctctcagttgcttctattatggagaggctctatctacaaactgttatggagagagttgttatgcttcctcggtttttatatggccttaagcgctgcctatcggttcgtccttaccgagggccagaaacgctatttcgagaagctggtcatttattgtgatcagtacgcaagcctgatacctgtcagcttcgtcctgggtttttacgtgacattggttgtgaatcgctggtggtcccagtacttgtgtatgccactcccagatgcccttatgtgcgtggtcgcaggaactgtccacggtcgggatgatcgcggccggttgtatagaaggactttaatgcggtatgccggtctctcagcagtgctgatccttaggtccgtgagcacagcagtgttcaagagattccccacaatcgaccatgtagtggaggcaggtttcatgactcgcgaagagcgtaagaaatttgagaacttgaattcctcttataacaagtactgggtgccctgtgtgtggtttagcaatcttgctgctcaggcccggagggagggaagaatccgggacaattccgccttgaagctgcttcttgaggaactgaatgtattcagaggtaagtgcggaatgctctttcattacgactggatatccgtgcccttagtctacactcaggtggtaaccattgctctgtattcttattttctggcatgtctgattgggagacaattcctggacccagcccaaggttataaggatcacgatctggacctctgtgttccaatctttactcttctccaatttttcttctacgccgggtggctcaaggtggccgaacagctaattaacccctttggtgaagacgatgatgatttcgaaacaaattttctcattgatcggaactttcaggtgtctatgctcgccgtcgacgagatgtatgatgacttagccgtcctggagaaagatctgtattgggatgccgctgaagcgagggctccttatacggccgcgacagtgttccagttacgccagccctctttccagggtagcactttcgacatcacattggccaaagaagatatgcagtttcagcgcctggatggcttggatgggcctatgggggaggccccaggagattttctccaacgactcttgcccgcgggcgccggcatggtggctgggggaccgctgggtagaaggttatcctttctgctccgtaaaaacagctgtgtgagtgaagcctccaccggggcaagctgttcttgcgctgtggtgcccgaaggggccgcgcctgagtgctcttgcggggatcctcttttggaccccgggctgccggagccagaggcacccccccccgcaggaccagagccactgacactgattccgggacctgtggagcccttcagtattgtcaccatgcccgggcctaggggccccgcccctccctggctcccctctccgatcggggaggaagaggaaaacctagcctag

SEQ ID NO: 276387 - DNA, 1530 bp, Artificial Sequence
  derived and/or modified sequence
atgaccgtgacttacaccgccagggtggctaatgccaggtttggcggtttctcccagttgctcctgctgtggcgaggctccatttacaaattactatggagggaattgttgtgcttcctgggcttttacatggcccttagtgcggcctacagattcgtcttgaccgaaggacagaagcggtatttcgagaaactcgttatttactgtgaccagtatgcttctttgatcccagtttccttcgtgctcggattctacgttaccctggttgtgaaccgctggtggagtcagtacctgtgtatgccgctgccagatgcactgatgtgtgttgtagctgggaccgtacatggccgggacgaccgcggtaggctatatcggagaaccctgatgaggtacgcaggcctatctgccgtcctgatcctgaggtccgttagtactgcggtgtttaaacggttccccacaatcgaccatgttgtcgaggcaggatttatgaccagggaagagcgtaagaaatttgaaaaccttaattcatcttacaacaaatattgggtcccttgcgtgtggttttctaaccttgcagcccaagcccgaagagagggcaggatccgagataattccgcgctaaagttgctgctcgaggagctcaatgttttcagggggaaatgcggaatgctcttccactacgactggatctcagttccactggtatacacacaggtggtcaccatcgcgttatattcatatttccttgcctgccttattggccggcaattcctggatcccgcccaaggatacaaagatcacgatttggacctatgcgtacccatatttacactgttacaattcttcttttacgcagggtggctaaaggttgcagaacagctcatcaacccttttggtgaggatgatgacgattttgagaccaacttccttatcgatcgcaatttccaagtttcaatgctcgccgtcgacgaaatgtacgacgacctggcagtcctggagaaggacctttactgggacgccgcagaggccagggccccctacaccgccgccaccgtgtttcagttgcgccagccctcattccaaggatccacattcgatattactcttgctaaggaggatatgcaatttcagcgcctagacggcctagatggacctatgggagaagctcctggcgacttcttgcagaggctcctccccgccggcgcaggaatggtggctgggggcccactgggaaggcgcttgtcttttctcctgaggaaaaactcttgcgtgtcagaagcctccactggagcctcttgcagttgcgctgtggtaccagaaggtgctgctcccgagtgctcctgcggggatcctctgttagatccaggtctgcccgaacccgaagctcctccacccgccggcccagaaccactgaccctgatccccggacctgtggagcctttcagcatcgtcactatgcccggaccccggggccccgcacctccttggctcccgtcaccgataggggaggaagaggaaaatttggcctag

SEQ ID NO: 276388 - DNA, 1530 bp, Artificial Sequence
  derived and/or modified sequence
atgaccgtgacatacaccgcgcgggtagctaacgcacggtttggcggcttttctcagctcttgctcctctggagggggtcaatctataagttgttatggagggagctgctgtgctttctgggcttttacatggcactctcagccgcatacagattcgtgctcactgaggggcagaaaagatactttgaaaagctcgtgatctattgtgatcagtacgcgtcattgattcccgtgagcttcgttctgggattctacgtgactctggttgtgaataggtggtggagtcagtatctgtgtatgcctttgccagacgctttgatgtgcgtggttgctggaactgtgcatggaagagacgaccgggggcggctctaccgacgtacacttatgcgatatgcaggcctgtcagcagtgctgatccttcggtctgtcagcaccgctgtctttaagcgattcccaactattgatcacgtggtagaagctggtttcatgacccgcgaggagagaaaaaaattcgagaatttgaatagtagttacaacaaatattgggttccgtgcgtttggttcagtaacctggcagcgcaggctcgaagagagggtcgcataagagacaatagcgcgctcaaactcttactggaggagctcaacgttttcagggggaagtgtgggatgctctttcactacgactggatctctgttcctctagtgtatacacaagtggttaccatcgccctttactcatacttcctggcatgccttatcggcaggcagtttcttgacccagcgcaaggttacaaggaccacgacctggatttgtgcgtccccatcttcaccctgctacaattttttttctatgctgggtggctcaaggtggccgagcagctgattaaccctttcggcgaggacgacgacgatttcgagactaacttcctcatagatcgtaattttcaagtgtccatgctcgcagtagatgaaatgtacgatgacctcgcagtgctggaaaaagacctgtattgggacgccgccgaagccagggctccctatactgccgccacagtgttccagctaaggcagccctcgttccagggaagtacatttgatataacactggcaaaagaggacatgcagttccagcgcctcgatggcttggatggccccatgggcgaagcgcccggcgatttcttgcagagactgctgcctgccggagcgggcatggtggctggaggccctttggggaggcgtttaagcttcttactgcgaaaaaacagttgcgtctcggaggcctccactggggcctcgtgctcctgtgctgtggttccagagggcgccgcacccgaatgtagctgcggcgaccctctgctggatcccggattgcctgagcctgaggctccccctcctgccggtcctgaaccacttactttgatacctggacctgtagaacctttcagtatcgtcactatgcctggcccccgcggccccgccccaccttggctcccctcccctatcggagaagaagaggaaaacctggcctag

SEQ ID NO: 276389 - DNA, 1530 bp, Artificial Sequence
  derived and/or modified sequence
atgacagtgacctacacagcccgggtggccaatgccaggtttggaggcttcagccagctgctgctgctgtggaggggcagcatctacaagctgctgtggagggagctgctgtgcttcctgggcttctacatggccctgtctgctgcctacagatttgtgctgacagagggccagaagcgctactttgagaagctggtgatctactgtgaccagtatgccagcctcatccctgtgtcctttgtgctgggcttctacgtgaccctggtggtgaaccgctggtggagccagtacctgtgcatgcccctgcctgatgccctgatgtgtgtggtggccggcaccgtgcacggcagagatgaccggggccgcctgtacagaaggaccctgatgagatatgccggcctgtctgctgtgctgatcctgcggtctgtgtccacagctgtgttcaagcgcttccccaccatcgaccacgtggtggaggccggcttcatgacccgggaggagaggaagaagtttgagaacctgaacagcagctacaacaagtactgggtgccctgtgtgtggttcagcaacctggccgcccaggcccggcgggagggccgcatccgggacaacagcgccctgaagctgctgctggaggagctgaatgtgttccggggcaaatgtggcatgctgttccactatgactggatctctgtgcccctggtgtacacccaggtggtgaccatcgccctgtacagctacttcctggcctgcctgattggccggcagttcctggaccctgcccagggctacaaggaccatgacctggacctgtgtgtgcccatcttcaccctgctgcagttcttcttctacgccggctggctgaaggtggccgagcagctgatcaacccctttggagaagatgatgatgactttgagaccaacttcctgattgacaggaacttccaggtgtccatgctggccgtggatgagatgtatgatgacctggccgtgctggagaaggacctgtactgggatgctgctgaggcccgggccccctacacagctgccaccgtcttccagctgcggcagcccagcttccagggcagcacctttgacatcaccctggccaaggaggacatgcagttccagaggctggatggcctggatggccccatgggagaggcccctggggacttcctgcagaggctgctgcctgctggggccggcatggtggccggcggccccctgggccggcggctgtccttcctgctgaggaagaacagctgtgtgtctgaggccagcactggagccagctgcagctgtgctgtggtgcctgagggcgccgccccagaatgttcctgtggggaccccctgctggaccccggcctgcctgagcctgaggcccctcctcctgctggccctgagcccctgaccctcatccctggccctgtggagcccttcagcatcgtgaccatgcctggcccccggggccctgccccaccctggctgcccagccccatcggggaggaggaggagaacctggcctag

SEQ ID NO: 276390 - DNA, 1530 bp, Artificial Sequence
  derived and/or modified sequence
atgaccgtgacctacaccgcccgggtggccaacgcccggttcggcggatttagccagctcttactactgtggcgagggagtatctataaattactgtggcgtgagctactgtgttttcttggcttttacatggcactgtccgccgcgtacagatttgtccttaccgagggacagaagcggtactttgagaaactggttatctactgtgaccagtacgcctcgttaatccctgtgtccttcgtgttaggcttctatgttaccctggtcgttaaccggtggtggtcacagtacctatgtatgcccctccccgatgccctgatgtgtgtagtagcaggtactgtacacggacgggacgaccgaggccggctgtataggcggaccctgatgcgctatgcaggcttgtctgcagtcctgatccttcggtccgtgtcgacagctgtgttcaagagatttcccaccatcgaccacgttgtggaggcagggttcatgactagagaggagaggaaaaaattcgaaaatctcaattctagctataacaagtactgggttccatgcgtgtggttttccaatctcgctgctcaggctcggcgagagggtaggataagggacaatagcgcacttaagttgttgcttgaagagttgaacgttttccgtgggaaatgtgggatgctgttccactatgattggattagcgtacccctggtgtatacccaggtggttaccattgctttgtatagttacttccttgcctgccttattggccggcagtttttagaccccgctcaggggtacaaggaccatgacctagacttatgtgtcccaatctttacccttctgcagttttttttttacgccgggtggctgaaagtcgctgaacagttgatcaaccctttcggtgaagatgatgatgactttgaaaccaattttctgattgacagaaactttcaggtgtccatgctggccgttgatgaaatgtacgatgacttagctgtcctcgaaaaggatctgtactgggacgctgccgaggccagggcaccctacacagccgcaacggtctttcagctgcgtcagccatctttccaaggcagcacttttgatatcaccctggcaaaggaggatatgcagttccagagattggatggactggacgggcccatgggcgaggctccaggcgatttcttgcagcggctgctgcccgctggagctggaatggtcgctggcggccctctaggccgacgactctcatttttacttcggaaaaattcttgcgtgtctgaagccagcacaggggctagttgttcctgtgccgtcgtccctgaaggcgcagcacccgaatgctcctgtggggaccctttactggatccaggtctgcctgagccagaggccccccctcctgcaggccctgaaccactcacccttatcccgggcccagtggaaccgttcagtattgtgacgatgccgggaccacgtggacccgcccctccctggttaccatctcctattggagaggaagaggagaatctggcttag

SEQ ID NO: 276391 - DNA, 1530 bp, Artificial Sequence
  derived and/or modified sequence
atgaccgtgacctacaccgcccgggtggccaacgcccggttcggcggtttctcacaacttttgctcctgtggcgtggtagcatctacaagctgctttggcgagagttgctgtgtttcctcgggttctatatggcactgtctgccgcctaccgattcgtcctcaccgaaggacagaagaggtactttgaaaagctggtgatctattgcgaccagtatgccagcctcattccagtgtcattcgtgctcggcttttacgtcacccttgtggtgaatcggtggtggagtcagtatctgtgtatgcccctgccagacgctttgatgtgcgtcgtcgccggcacagtgcacggtcgagacgataggggtcggctataccgacggaccctgatgagatatgccggcttgagcgcagtcctgatactccggagcgtgtccaccgcagtgttcaagcggttccctacgattgaccacgtagtagaagccggctttatgaccagagaagaacgcaaaaaattcgagaatttaaactcctcctacaataagtattgggtaccatgtgtctggttcagcaacctggcggctcaggccagaagggagggccggatcagggataattccgctcttaaactgttgcttgaggagctaaacgtgttccggggtaaatgcgggatgctgtttcattacgactggattagcgttccattggtgtacactcaggtggtgacaatcgccctatattcttattttttggcgtgccttattggtcgacaattcctcgaccctgcccagggttacaaggatcacgacttggatctgtgcgttcccatatttacactgcttcagttttttttttatgccgggtggctaaaggtggctgagcaactcattaatcccttcggcgaggacgatgacgacttcgagacgaactttctaatcgatcgcaactttcaagtgagtatgctggctgttgatgaaatgtacgatgaccttgcggttctggaaaaagacctctactgggatgccgctgaggctagggccccctataccgcggccaccgtgtttcagcttcggcagcctagcttccagggctctactttcgatataactctcgcaaaggaggacatgcagttccagcgtctggacggtttagacggacctatgggggaagcgcctggggattttcttcagcgcttactgccagctggtgccggcatggtggcaggcggccccctgggccgtagactctcgtttctcctgagaaagaactcatgtgtgagcgaagccagcacaggcgctagctgttcatgcgcagtggttccagagggagctgcccccgaatgctcgtgcggggaccctctgctggatcccggattgcctgagcctgaggctcccccgcccgccggtcccgagccattgacactgatccccggccctgtggaacctttcagtattgtgacgatgccaggccccaggggccctgcccctccgtggctcccctcccccattggcgaagaggaagaaaaccttgcttag

SEQ ID NO: 276392 - DNA, 1530 bp, Artificial Sequence
  derived and/or modified sequence
atgaccgtgacctacaccgcccgggtggccaacgcccggttcggcggattcagccagctgctgcttctctggagaggctcaatctataaactgctttggcgtgagttgctctgtttcctcggtttttatatggctctatctgcggcgtaccgttttgtgttgacagagggtcaaaaaagatattttgagaaactggtgatatattgtgaccagtatgccagcctcattccagttagcttcgttctgggattttatgtgaccctcgttgtcaaccgatggtggagccagtatttatgtatgcctctccccgacgctctgatgtgcgttgtggccggcacggttcatgggcgggacgaccgggggaggctgtataggcgcaccttaatgcggtatgcaggactgtcggcagttttgatcttaagaagtgtgagtacggctgtgttcaaacggtttccaaccattgaccacgtggtggaggctggcttcatgacacgagaggagaggaaaaaattcgaaaacctgaattccagctacaacaagtattgggtcccatgcgtgtggtttagcaacctggctgcccaggcgcgccgggaaggcagaataagggataacagtgctctcaagctgctcctggaagagttaaatgtctttagaggaaaatgcgggatgcttttccattatgactggatttctgtcccactggtctatactcaagtggtcaccatcgcactctacagctatttcctggcctgtctgataggaaggcagtttctcgaccctgcgcagggctacaaagatcacgatcttgatctgtgtgtccctatcttcaccttgcttcagtttttcttctatgcagggtggcttaaggtggcagaacaattgatcaacccctttggggaagacgacgatgattttgagacaaacttcctcattgacagaaacttccaggttagcatgctggctgttgatgagatgtacgatgatttggctgttctggaaaaggacctgtactgggatgccgccgaggcccgagctccctataccgccgcaaccgtgtttcagctgcggcagccttcattccagggatccacattcgacattaccctggcaaaggaggacatgcaattccagcgccttgatggccttgacggtccaatgggagaggcaccaggagattttctgcagcggctcctgcctgctggtgccggaatggtggccggcggaccactgggccgcagactctcattcttactccgcaagaatagttgtgtgtcggaggccagcaccggagctagttgcagttgtgccgtggtaccagaaggagcagccccggaatgcagttgcggggacccgcttctcgatccaggcctgcctgaacctgaggcgcctccccccgccggtcccgaaccgctcaccctgatccccgggcccgtcgagcccttttccatagtgactatgcctggccctaggggacctgcccccccttggctgccatccccaattggagaggaagaagaaaatttggcatag

SEQ ID NO: 276393 - DNA, 1530 bp, Artificial Sequence
  derived and/or modified sequence
atgacagttacttacaccgcaagggtggcaaacgctagattcggcggttttagccagttgctcctgctgtggcgaggctctatctataaactgctgtggcgggaattgctgtgcttcctcggtttctacatggctctgagcgcagcctaccggtttgtcctgaccgaagggcagaagcgatatttcgagaagctcgtgatctactgtgaccagtacgccagcttgattccagtgagttttgtgctcggattttacgtgaccctggtggtgaaccggtggtggtcacagtacctctgcatgcctctgcctgacgctctaatgtgtgtcgtggctggcacggtgcatggccgtgatgatcgcggtcgcctgtatcgcagaacattgatgcgatatgccggtctgtcagcagtgttgattctgagatctgtttctacggccgtgttcaaacggttccccactatcgatcacgtggtcgaagccggtttcatgactcgcgaggagcggaagaagttcgagaacttgaatagcagttataacaaatactgggtaccttgtgtttggtttagtaacctcgccgcacaagcccgtcgcgagggtcgaattagagacaattccgctttgaaactgctgctcgaagaactgaatgtcttcaggggtaagtgcggcatgctcttccattacgattggatatccgttcccctcgtatacacgcaggttgtgaccatcgccttgtattcatattttttggcatgccttatcggaaggcaatttcttgaccccgctcaggggtacaaggaccacgatctggacttgtgcgtccccatctttacgttgctgcagttcttcttttatgcgggttggcttaaagtagcggagcaactgatcaaccctttcggagaagacgatgacgatttcgagaccaatttccttattgatcggaatttccaagtctcgatgttggccgttgatgagatgtacgacgacttggctgtcctggaaaaggatctgtattgggacgcagctgaggccagagctccatatactgccgctacagtttttcaactgcgccagccatccttccagggttcaacttttgacatcactctggcaaaagaggatatgcagtttcagagattggatgggctggacgggcctatgggcgaagcgcctggagattttctgcagcgcctcctgccggcaggtgcaggcatggtagcaggtgggccactaggacgcagactttctttcctgctgagaaagaacagctgtgtgtcggaggcatcaaccggagcttcctgctcctgtgctgtggttcctgagggtgccgctccagaatgctcctgcggagacccactcctggaccccggtctcccagagcccgaagctccgcctcccgctggtcccgagccactgactctcattccagggccagtggaacccttcagcatcgtgaccatgccgggtcctagaggccctgcccctccctggctacctagcccaatcggtgaagaggaagagaacctcgcatag

SEQ ID NO: 276394 - DNA, 1530 bp, Artificial Sequence
  derived and/or modified sequence
atgaccgtgacttacacagccagggtggccaatgcgagatttgggggatttagtcagctgctgctactttggaggggctctatttataagctgctgtggagagaactgttgtgcttcttaggcttctacatggcgttgtctgccgcttaccgctttgtgctgacggagggccagaagcgctacttcgaaaaactggtaatatattgcgaccaatatgcctcgctcattcccgtgtcttttgtgttgggattctatgtcacgttagtcgtgaatagatggtggtctcaatacctttgcatgcccttaccggacgccctgatgtgtgtcgtggctggtaccgtgcacggcagggacgatcgcggtaggttgtaccgcaggacactgatgcgctacgctggtctgagcgccgtgttaatcctccgcagcgttagtaccgctgtatttaaaagatttcctaccattgatcatgtggtcgaggcgggttttatgaccagggaagagcggaaaaagttcgaaaacctgaacagttcctataataagtattgggttccttgcgtgtggttttctaatctggcagcccaggctcgcagggaagggaggatacgtgataacagcgctctgaaactgctcttggaggagctgaacgtgtttcgcggtaaatgcggaatgcttttccactatgattggatctccgtaccactcgtttacactcaggtggtgaccatcgctctgtattcctatttcctggcttgcctgatcggccgacagttcttagaccctgcacaggggtataaggaccacgacctcgacctttgtgttcctatctttacactcctgcagttctttttctacgcaggttggttaaaagtggccgaacaactgataaatccttttggagaagatgacgacgattttgaaacaaacttcctgatcgaccgcaatttccaagtatcaatgctggctgttgacgaaatgtatgacgatctcgccgtgctcgagaaggatctttattgggatgcagcagaagccagggcgccttacaccgcagccactgtgtttcagttaagacaaccatcctttcagggatccacttttgacatcaccttggcaaaagaggacatgcaattccagagactcgacgggctggacggccctatgggggaggcccctggcgatttcctccagcgcttgctgcctgctggcgcagggatggtggcagggggacccctagggaggcggttaagtttcttgctgcgcaaaaatagctgcgtcagcgaggcctctactggcgcaagctgctcctgcgcagttgtgcctgagggggctgctcctgagtgttcgtgtggagatccactgctagaccccggactgcctgagcccgaagccccacccccagctggacctgagccacttaccctaatcccaggcccagtggaacccttctcaattgtgacaatgccagggcctagaggccctgctccaccttggctcccctctccaattggggaagaagaggagaacctggcctag

SEQ ID NO: 276395 - DNA, 1530 bp, Artificial Sequence
  derived and/or modified sequence
atgacagtgacttacacagccagggtggcaaatgctcggttcggcggtttcagccagttgttgttattatggagaggctctatatacaaacttctgtggcgcgaacttctctgttttttggggttctacatggcgctttcagcagcctatcgctttgttctgactgaaggccagaaacgatattttgagaagttagttatttactgtgaccaatatgccagcctcatccctgtgtctttcgtcctcggcttctacgtaacgctcgtggtgaatagatggtggagtcaatatttatgtatgccacttcccgacgcgctgatgtgcgtggtggcaggaactgtccatggcagggacgaccggggaagactgtatagaaggaccctaatgagatatgctggcctgagtgctgttctgatcctgcgttcagtaagtaccgctgtgttcaaaaggtttcctactattgatcacgtggtagaagcaggctttatgaccagggaggaaaggaaaaaattcgagaatctgaatagctcctataataagtattgggtgccttgtgtgtggtttagtaatctggctgcacaggcccgtcgcgagggacgaatccgggacaactctgcccttaagttgctgctagaggaactaaacgtgttccggggtaagtgtggcatgctattccactacgattggatttcggtgccattggtgtacacccaggtggttaccatcgcactatatagttacttcctggcctgcctgatcggcagacagttcctggaccccgcacaaggttataaggaccacgatttagacctgtgtgttcccatcttcacacttctgcagttcttcttctacgccggttggctgaaagtcgcagagcaactgattaacccattcggtgaggatgatgacgattttgaaacgaactttttgatcgaccgaaattttcaggtgagcatgttggcagtcgacgagatgtacgatgacttagctgtgctagagaaagatctgtattgggacgctgccgaggcgagagcaccatacacagccgcaacggtgttccagctcaggcaaccgagcttccaaggaagcaccttcgacattaccctggcgaaggaggacatgcagtttcagaggttggatggactggacggacctatgggagaagcccctggagacttcctgcaaagactccttcctgccggagcaggaatggtggcaggtggcccattggggaggcgactaagttttcttcttcgcaagaatagctgcgtaagtgaggcaagcacaggagcctcctgttcatgtgcagtcgtcccagaaggagctgcccctgagtgcagctgtggtgaccccctgctggaccctggtctgcccgaacccgaggctccaccgccagccggacccgaacctctgacactcatccccggtcccgtagagcccttcagcatcgtaactatgcctggacctagaggtccggctcctccgtggctccccagccccattggtgaagaagaagagaaccttgcatag

SEQ ID NO: 276396 - DNA, 1530 bp, Artificial Sequence
  derived and/or modified sequence
atgaccgtcacctacacagcacgcgtcgccaacgcacggttcggcggattcagccagctgctgttgttatggcgtggtagtatttataagctactttggagggaactcctgtgctttctcggtttctatatggccctctctgccgcctacagatttgttcttacagaaggccagaaacggtacttcgagaagctcgtcatttactgtgatcagtatgccagtctgattcctgtgagttttgtgctgggattctatgtgaccctcgtggtcaatcgctggtggtcgcagtacctgtgcatgcccctccctgacgcacttatgtgcgtggtggccggcaccgtgcatgggcgagatgaccgcggcaggctgtacaggcgcaccctgatgcgctatgcaggtctatccgccgtcttgatcctgcgtagcgtgtccaccgctgtgttcaagcgatttcctacaattgatcatgttgttgaagcaggatttatgaccagagaagaacgcaaaaagtttgagaacctcaattcatcatataacaaatattgggtcccttgcgtgtggttcagtaacctggcagcgcaggcacgtcgggaaggacggatccgagataacagcgcccttaagttgctgcttgaagagctgaatgtgttccgtggcaaatgcggcatgctctttcactatgactggatcagtgttccactcgtttacacgcaggtcgtcaccatcgccctttattcttatttcctagcttgtttaatcggccgccagttcctagatcctgctcagggttataaagatcacgacctcgatttgtgcgttcctatcttcaccctactgcagtttttcttttatgccggatggctgaaagtagcggagcagctgattaatccgttcggagaagacgacgacgattttgagaccaactttctcattgaccggaactttcaagtttccatgcttgctgtcgatgagatgtatgatgacttggctgttttggagaaggatttgtactgggacgcagccgaagcccgagctccctataccgctgccactgtgttccagctgcgacagccaagtttccaggggtccacttttgatattacacttgcgaaagaggatatgcagttccaaaggttagacggactggacggccccatgggcgaagctccaggcgactttctccagagactgcttcctgccggggcaggtatggtggctggcggaccacttggtcggagactgtctttcctcttaaggaaaaattcatgtgtcagtgaagcctccacgggtgcatcctgctcctgtgctgtcgttcctgagggagcagctcctgagtgttcatgcggggaccctctgttggacccaggattgcccgagccagaggctcccccccctgccggtccagaacccttgactctcatccccggaccagtcgagccattctccatagtgacgatgcccggcccacggggccccgcccctccatggttgccatcacccatcggcgaagaggaggagaacttagcgtag

SEQ ID NO: 276397 - DNA, 1530 bp, Artificial Sequence
  derived and/or modified sequence
atgacagttacctatacagccagagtggcgaatgcaagattcggcggtttcagtcagcttctgttactatggcgaggctctatctacaagcttctttggcgcgagttgttgtgcttcctagggttctacatggctttatctgctgcatacaggttcgttctgaccgaggggcagaagcggtattttgaaaagttggtaatctattgtgatcagtacgcatccctgattcctgtcagcttcgttctgggattttacgtcaccctggtagttaaccgctggtggtcacagtatctgtgtatgccccttccagatgccttgatgtgtgtggtggccggtactgtccacggtagagacgatcggggccgattatatcggcggacattgatgcgttacgctggactctctgccgttctcatcctgcggagtgtgtccacagccgtctttaaaagatttcctacaatcgaccacgttgtggaagctggattcatgacaagagaagagaggaagaaatttgaaaatctaaatagttcttacaataagtactgggtcccttgtgtgtggttctccaacttggccgcgcaggctcgccgcgaaggccgaattcgggacaactcagccctgaaattgctgctggaagagctcaacgtgtttagaggaaaatgtggaatgctgtttcactatgattggatctcggtgcctttagtgtatacccaggtggtcacgattgctctctatagttacttccttgcttgtttaatcggtagacagttcttagatcctgctcagggatataaagatcatgacctagatctgtgcgtgccgatcttcactctcctccagttttttttttatgctggctggctgaaagttgcggagcagctgattaacccctttggagaagacgacgatgactttgaaacaaactttttaattgaccggaattttcaggtgtcaatgctcgccgtggacgaaatgtatgatgaccttgccgttctagaaaaagacttgtactgggacgcagcagaagcacgcgccccttacaccgccgctactgtcttccaactgagacaaccatcttttcagggcagcaccttcgatatcacattggctaaagaagacatgcaatttcagaggctggacggactggacggcccgatgggcgaggctccaggtgatttcctgcagcgactgctccctgccggtgctggaatggtcgctggcggcccactgggcagaaggctgtccttcctcctgagaaagaattcatgtgtgagcgaggcttctactggagctagctgcagttgcgccgtcgtgcccgaaggggctgcccccgagtgctcatgtggtgatcccctgttagacccagggttaccagagcccgaagccccgcctcccgcaggtccagagccactcaccctcatccccggccctgttgagccttttagcatagtgactatgcccggtcctagaggccctgcccccccctggcttccgtcacccattggggaagaggaagagaatctggcatag

SEQ ID NO: 276398 - DNA, 1908 bp, Artificial Sequence
  derived and/or modified sequence
atgaccgtcacctacacagcccgagtggcgaacgcccgcttcggtggcttctcccagctgctgctactgtggcgtgggagcatctacaaactcctgtggcgagagctgctctgcttccttgggttctacatggcgctgagtgctgcctaccgctttgtgctgaccgaagggcagaagcgctacttcgagaagcttgtgatttattgtgaccagtatgccagcctcatccctgtctccttcgtgcttggcttttatgtgacgctggtggtgaaccgctggtggagccagtacctatgcatgccgctgcccgacgcgctcatgtgcgtggtggcgggcaccgtgcacggacgcgacgaccgcggccgcctctaccggcgcacactcatgcgctacgcagggctctcggccgtgctcatcctgcgctccgtcagcaccgcggtgttcaagcgcttccccaccatagaccacgtggtggaggctgggtttatgacccgcgaggagcgcaagaagtttgaaaacctgaactcatcctacaacaagtactgggtgccctgcgtctggttctccaacctggcggcacaggcccgacgcgagggccgcatccgcgacaacagcgcccttaagctgctgctcgaggagctgaatgtttttcggggcaaatgtggaatgctctttcactatgactggattagcgtacccctcgtgtacacgcaggtggtgaccatcgcactgtacagctacttcctggcttgcctcattggtcgccagttcctggacccggctcagggttacaaagaccacgacctagacctgtgtgtgcccatcttcaccctcttgcagttcttcttctacgccggctggctcaaggtagctgagcagctcatcaaccccttcggagaggacgatgatgactttgagaccaactttctgatcgatagaaacttccaggtgtccatgctggcagtggacgagatgtatgatgacctggctgtgctggagaaggacttgtactgggatgcagccgaggctcgcgccccatacacagcggctactgtcttccagctgcggcagccttccttccagggctccacctttgacatcacgctggccaaagaagacatgcagttccagcggctggacggcttggatggaccgatgggagaggcgcccggcgacttcctgcagcgcctcctgccggcgggcgcgggcatggtcgcgggaggcccgctgggccggcgcctgtcctttctactccgcaagaacagctgcgtgtcggaggcgtctactggggccagctgctcatgcgcggttgtccccgaaggcgcggccccggagtgcagctgcggggacccgctgctcgaccccggcctgccggagcccgaggccccgccccctgcgggtcccgaaccgcttaccctcatccctgggcctgtcgagcccttcagcatcgtgaccatgcccgggccccggggtccggcgccaccctggctgcccagccctattggcgaggaggaggagaatctggcctgagatcttagagcccagccccctaaggacagggaaccaggtccctgcacggcacccacgcaggtgtcccggtctgcataagcctcgtgtgcctttgtaaagtccacctacacttttgaccagctctcgctgcccgcatgtgtttggcgctgtgctaggggcgggagttcttccagactcttggaccagcccgccctgaccaccagctctacttcccaacccccactgcctgagaggtctctatcagtgtcctgcctgaattctttccttcaagtgaagatgtgactgactacctcctcgagttgtcatgaggatgaaagaatggcattaaagcatttggtatacagtaggtgctcaataaattgctagtgatttttactc

SEQ ID NO: 276399 - DNA, 2183 bp, Artificial Sequence
  derived and/or modified sequence
ctgaagctacagcctagccgagggaggaggaccaggaaagggaggcacgcccactccccagccccacccaacgccaaagccacccgcccattccatccctgtccctgtgggtccttgcaccggccaccttcaacacaggtgagatgagcccaggcttggggaaatagggggccctgagggaagagggaacctgcgggcaggaatgcatccggagtcctcccggggcggggagtggagggcttggaaggctggaggggaacggagagaggaaagcccccacccgggccacccactctcccttggccacacctgccgggtgccacgatgaccgtcacctacacagcccgagtggcgaacgcccgcttcggtggcttctcccagctgctgctactgtggcgtgggagcatctacaaactcctgtggcgagagctgctctgcttccttgggttctacatggcgctgagtgctgcctaccgctttgtgctgaccgaagggcagaagcgctacttcgagaagcttgtgatttattgtgaccagtatgccagcctcatccctgtctccttcgtgcttggcttttatgtgacgctggtggtgaaccgctggtggagccagtacctatgcatgccgctgcccgacgcgctcatgtgcgtggtggcgggcaccgtgcacggacgcgacgaccgcggccgcctctaccggcgcacactcatgcgctacgcagggctctcggccgtgctcatcctgcgctccgtcagcaccgcggtgttcaagcgcttccccaccatagaccacgtggtggaggctgggtttatgacccgcgaggagcgcaagaagtttgaaaacctgaactcatcctacaacaagtactgggtgccctgcgtctggttctccaacctggcggcacaggcccgacgcgagggccgcatccgcgacaacagcgcccttaagctgctgctcgaggagctgaatgtttttcggggcaaatgtggaatgctctttcactatgactggattagcgtacccctcgtgtacacgcaggtggtgaccatcgcactgtacagctacttcctggcttgcctcattggtcgccagttcctggacccggctcagggttacaaagaccacgacctagacctgtgtgtgcccatcttcaccctcttgcagttcttcttctacgccggctggctcaaggtagctgagcagctcatcaaccccttcggagaggacgatgatgactttgagaccaactttctgatcgatagaaacttccaggtgtccatgctggcagtggacgagatgtatgatgacctggctgtgctggagaaggacttgtactgggatgcagccgaggctcgcgccccatacacagcggctactgtcttccagctgcggcagccttccttccagggctccacctttgacatcacgctggccaaagaagacatgcagttccagcggctggacggcttggatggaccgatgggagaggcgcccggcgacttcctgcagcgcctcctgccggcgggcgcgggcatggtcgcgggaggcccgctgggccggcgcctgtcctttctactccgcaagaacagctgcgtgtcggaggcgtctactggggccagctgctcatgcgcggttgtccccgaaggcgcggccccggagtgcagctgcggggacccgctgctcgaccccggcctgccggagcccgaggccccgccccctgcgggtcccgaaccgcttaccctcatccctgggcctgtcgagcccttcagcatcgtgaccatgcccgggccccggggtccggcgccaccctggctgcccagccctattggcgaggaggaggagaatctggcctgagatcttagagcccagccccctaaggacagggaaccaggtccctgcacggcacccacgcaggtgtcccggtctgcataagcctcgtgtgcctttgtaaagtccacctacacttttgaccagctctcgctgcccgcatgtgtttggcgctgtgctaggggcgggagttcttccagactcttggaccagcccgccctgaccaccagctctacttcccaacccccactgcctgagaggtctctatcagtgtcctgcctgaattctttccttcaagtgaagatgtgactgactacctcctcgagttgtcatgaggatgaaagaatggcattaaa

SEQ ID NO: 276400 - DNA, 2000 bp, Artificial Sequence
  derived and/or modified sequence
gtccctgtgggtccttgcaccggccaccttcaacacagcccccacccgggccacccactctcccttggccacacctgccgggtgccacgatgaccgtcacctacacagcccgagtggcgaacgcccgcttcggtggcttctcccagctgctgctactgtggcgtgggagcatctacaaactcctgtggcgagagctgctctgcttccttgggttctacatggcgctgagtgctgcctaccgctttgtgctgaccgaagggcagaagcgctacttcgagaagcttgtgatttattgtgaccagtatgccagcctcatccctgtctccttcgtgcttggcttttatgtgacgctggtggtgaaccgctggtggagccagtacctatgcatgccgctgcccgacgcgctcatgtgcgtggtggcgggcaccgtgcacggacgcgacgaccgcggccgcctctaccggcgcacactcatgcgctacgcagggctctcggccgtgctcatcctgcgctccgtcagcaccgcggtgttcaagcgcttccccaccatagaccacgtggtggaggctgggtttatgacccgcgaggagcgcaagaagtttgaaaacctgaactcatcctacaacaagtactgggtgccctgcgtctggttctccaacctggcggcacaggcccgacgcgagggccgcatccgcgacaacagcgcccttaagctgctgctcgaggagctgaatgtttttcggggcaaatgtggaatgctctttcactatgactggattagcgtacccctcgtgtacacgcaggtggtgaccatcgcactgtacagctacttcctggcttgcctcattggtcgccagttcctggacccggctcagggttacaaagaccacgacctagacctgtgtgtgcccatcttcaccctcttgcagttcttcttctacgccggctggctcaaggtagctgagcagctcatcaaccccttcggagaggacgatgatgactttgagaccaactttctgatcgatagaaacttccaggtgtccatgctggcagtggacgagatgtatgatgacctggctgtgctggagaaggacttgtactgggatgcagccgaggctcgcgccccatacacagcggctactgtcttccagctgcggcagccttccttccagggctccacctttgacatcacgctggccaaagaagacatgcagttccagcggctggacggcttggatggaccgatgggagaggcgcccggcgacttcctgcagcgcctcctgccggcgggcgcgggcatggtcgcgggaggcccgctgggccggcgcctgtcctttctactccgcaagaacagctgcgtgtcggaggcgtctactggggccagctgctcatgcgcggttgtccccgaaggcgcggccccggagtgcagctgcggggacccgctgctcgaccccggcctgccggagcccgaggccccgccccctgcgggtcccgaaccgcttaccctcatccctgggcctgtcgagcccttcagcatcgtgaccatgcccgggccccggggtccggcgccaccctggctgcccagccctattggcgaggaggaggagaatctggcctgagatcttagagcccagccccctaaggacagggaaccaggtccctgcacggcacccacgcaggtgtcccggtctgcataagcctcgtgtgcctttgtaaagtccacctacacttttgaccagctctcgctgcccgcatgtgtttggcgctgtgctaggggcgggagttcttccagactcttggaccagcccgccctgaccaccagctctacttcccaacccccactgcctgagaggtctctatcagtgtcctgcctgaattctttccttcaagtgaagatgtgactgactacctcctcgagttgtcatgaggatgaaagaatggcattaaagcatttggtatacagtaggtgctcaataaattgctagtgatttttactcaaa

SEQ ID NO: 276401 - DNA, 1530 bp, Artificial Sequence
  derived and/or modified sequence
atgaccgtgacctacaccgccagagtggccaacgccagattcggcggcttcagccagctgctgctgctgtggagaggcagcatctacaagctgctgtggagagagctgctgtgcttcctgggcttctacatggccctgagcgccgcctacagattcgtgctgaccgagggccagaagagatacttcgagaagctggtgatctactgcgaccagtacgccagcctgatccccgtgagcttcgtgctgggcttctacgtgaccctggtggtgaacagatggtggagccagtacctgtgcatgcccctgcccgacgccctgatgtgcgtggtggccggcaccgtgcacggcagagacgacagaggcagactgtacagaagaaccctgatgagatacgccggcctgagcgccgtgctgatcctgagaagcgtgagcaccgccgtgttcaagagattccccaccatcgaccacgtggtggaggccggcttcatgaccagagaggagagaaagaagttcgagaacctgaacagcagctacaacaagtactgggtgccctgcgtgtggttcagcaacctggccgcccaggccagaagagagggcagaatcagagacaacagcgccctgaagctgctgctggaggagctgaacgtgttcagaggcaagtgcggcatgctgttccactacgactggatcagcgtgcccctggtgtacacccaggtggtgaccatcgccctgtacagctacttcctggcctgcctgatcggcagacagttcctggaccccgcccagggctacaaggaccacgacctggacctgtgcgtgcccatcttcaccctgctgcagttcttcttctacgccggctggctgaaggtggccgagcagctgatcaaccccttcggcgaggacgacgacgacttcgagaccaacttcctgatcgacagaaacttccaggtgagcatgctggccgtggacgagatgtacgacgacctggccgtgctggagaaggacctgtactgggacgccgccgaggccagagccccctacaccgccgccaccgtgttccagctgagacagcccagcttccagggcagcaccttcgacatcaccctggccaaggaggacatgcagttccagagactggacggcctggacggccccatgggcgaggcccccggcgacttcctgcagagactgctgcccgccggcgccggcatggtggccggcggccccctgggcagaagactgagcttcctgctgagaaagaacagctgcgtgagcgaggccagcaccggcgccagctgcagctgcgccgtggtgcccgagggcgccgcccccgagtgcagctgcggcgaccccctgctggaccccggcctgcccgagcccgaggcccccccccccgccggccccgagcccctgaccctgatccccggccccgtggagcccttcagcatcgtgaccatgcccggccccagaggccccgcccccccctggctgcccagccccatcggcgaggaggaggagaacctggcctag

SEQ ID NO: 276402 - protein, 573 aa, Artificial Sequence
  derived and/or modified sequence
MRRYDRGLKTLENLLASIRKGNAIDEADIPPPVAIGKGPASTPTYSPAPTQPAPRIASAPEPRVTLEGPSATAPASSPGLAKPQMPPGPCSPGPLAQLQSRQRDYKLAALHAKQQQLAFLEGRKKQLLQAALRAKQKNDVEGAKMHLRQAKGLEPMLEASRNGLPVDITKVPPAPVNKDDFALVQRPGPGLSQEAARRYGELTKLIRQQHEMCLNHSNQFTQLGNITETTKFEKLAEDCKRSMDILKQAFVRGLPTPTARFEQRTFSVIKIFPDLSSNDMLLFIVKGINLPTPPGLSPGDLDVFVRFDFPYPNVEEAQKDKTSVIKNTDSPEFKEQFKLCINRSHRGFRRAIQTKGIKFEVVHKGGLFKTDRVLGTAQLKLDALEIACEVREILEVLDGRRPTGGRLEVMVRIREPLTAQQLETTTERWLVIDPVPAAVPTVAGPKGKAPPVPAPARESGNRSARPLHSLSVLAFDQERLERKILALRQARRPVPPEVAQQYQDIMQRSQWQRAQLEQGGVGIRREYAAQLERQLQFYTEAARRLGNDGSRDAAKEALYRRNLVESELQRLRR

SEQ ID NO: 276403 - protein, 236 aa, Artificial Sequence
  derived and/or modified sequence
WHSPDGLMIPEDGANDEELEAEFLALVGGQPPALEKLKGKGPLPMEAIEKMASLCMRDPDEDEEEGTDEDDLEADDDLLAELNEVLGEEQKASETPPPVAQPKPEAPHPGLETTLQERLALYQTAIESARQAGDSAKMRRYDRGLKTLENLLASIRKGNAIDEADIPPPVAIGKGPASTPTYSPAPTQPAPRIASAPEPRVTLEGPSATAPASSPGLAKPQMPPGPCSPGPLAQLQ

SEQ ID NO: 276404 - DNA, 1722 bp, Artificial Sequence
  derived and/or modified sequence
atgagaaggtacgatagaggcttaaaaaccctcgagaacctgttagcaagcatccgaaagggaaatgccatagacgaggcagatatcccccctcccgtggccatcggcaaaggtcctgcttcaactcccacatactcaccagcccctacgcaacctgcaccgcgaatagcatccgccccagaaccgagagtgactctggaaggaccaagtgcaaccgcccccgcatcaagtcctggcctggcaaaaccgcagatgccccctgggccatgctcacccggacctctggcccagttacagtccagacagcgggactacaaactggctgcattgcacgccaaacaacaacagctggcttttttggaagggcgcaagaaacagctcctccaggctgcgctgagagctaaacagaaaaatgacgttgaaggagcgaagatgcatttgcgacaggccaagggcctggagccaatgcttgaagcatctcgcaatggcctgcccgtggacataacgaaggtacctccagcccccgttaacaaagatgatttcgccttggtccagaggcccggccccggtctctcccaggaagcagcccgtaggtacggagaacttacaaagctaatcagacagcagcacgaaatgtgtctcaatcatagcaaccagttcacccaacttggcaatattacagagaccacgaaattcgaaaaattggccgaagattgcaaacggtcgatggatatcctgaaacaagctttcgtgcgaggcttgccaactcctactgcccggttcgaacagagaaccttttccgtaataaagatattcccagacctgagttcgaatgatatgttactttttatcgtgaaagggatcaacctgcccactccaccgggtctgtcacccggcgacctggatgtgtttgttcgtttcgacttcccttaccctaatgttgaggaagctcagaaagataagacatctgtgatcaagaacacagattcacccgagtttaaggagcagtttaagctgtgtatcaatcggtctcacagaggcttcagacgagccatacagaccaagggcatcaaattcgaggttgtgcataaaggcgggctgtttaagacagatcgggtactggggactgctcaactgaagctggacgccctagaaatcgcatgcgaagtaagagagatcttggaagtgctggacggcagaaggcctaccggcggccgactggaagtgatggtgcgaatccgggagcctctgacggcacaacagctggagactactaccgagcgttggctcgtgattgatcctgtcccagcagctgtccccacggtggctggcccaaaaggcaaggcgccccccgtacccgctccagccagggaaagcggaaatagatctgcacgacccctgcacagcctgagtgtgctcgccttcgatcaagagcgccttgaacggaaaatcctcgcactccgccaggcccggcggccagtgccacccgaggttgcgcaacagtatcaggatatcatgcagaggtcacagtggcagagagcacagcttgagcagggaggagtgggcattagaagggagtatgctgcccagttagagaggcaattacagttttatactgaagctgcacggcggcttgggaatgatggatctcgcgatgccgcgaaagaggctctgtatcgacggaatcttgtggagagcgagctgcagcggcttcggagatag

SEQ ID NO: 276405 - DNA, 1116 bp, Artificial Sequence
  derived and/or modified sequence
atgccccccggtccatgctctcctgggcctctagcacagttacagagtcgacaaagagactataaactcgcggctttgcacgccaagcagcagggcgacacaaccgccgctgctcgtcacttccgcgtagcaaaaagctttgatgcggttctggaggcactaagtcgtggagagccagtcgacctttcctgtctcccgccgccccctgatcagctgcccccagaccccccaagcccccccagtcagcccccaactcccgccaccgccccaagtacaaccgaagtccctccccctcccagaactctgctggaggctctcgaacaaaggatggagcgctaccaggttgccgccgcccaagccaaaagtaagggcgaccagcgcaaggccagaatgcatgagaggattgtgaagcagtatcaagacgccattagggcacataaagctgggagggctgttgatgtggctgaactgcccgtgccaccaggcttcccaccaattcaggggctggaagctaccaagccgacccaacagtctttagttggggttctggagacagcgatgaaattggccaaccaggatgaaggcccagaggatgaagaagatgaggtccctaagaagcagaattctcccgtggctcctactgcacaaccaaaagcccctccaagtcgcacgcctcagtcaggctctgcacccaccgctaaagcaccacccaaggccaccagtactcgggcccagcaacagctcgccttcctggaaggaaggaaaaagcagttgctgcaggcagccctgcgagcaaagcaaaagaacgatgttgagggggcgaagatgcacttaaggcaggccaaaggcctcgagccaatgctggaggcctccagaaacgggctaccagtggatatcacaaaggtgcctccagccccggtcaacaaggacgactttgccctggtgcagcgcccaggtccaggcctgtcccaagaagcagctagacgctatggggagttgacaaaactgattcgtcaacagcatgagatgtgtctgaatcatagtaaccagttcacgcagttaggcaatatcaccgaaaccactaaagcaaacatggtgaagccatgcttctactag

SEQ ID NO: 276406 - DNA, 1722 bp, Artificial Sequence
  derived and/or modified sequence
atgagaagatatgaccggggcctgaagaccctggagaacctgctggccagcatcagaaaaggaaatgccattgatgaagctgacatccccccacctgtggccatcggcaaaggacctgccagcacccccacctacagccctgcccccacccagcctgccccccgcatcgccagcgcccctgagccccgggtgaccctggagggccccagcgccacagccccagccagcagccctggcctggccaagccccagatgcctcctggcccctgcagccctggccccctggcccagctgcagagccggcagagggactacaagctggccgccctgcacgccaagcagcagcagctggccttcctggagggcaggaagaagcagctgctgcaggccgccctgcgggccaagcagaagaatgatgtggagggcgccaagatgcacctgcggcaggccaagggcctggagcccatgctggaggccagcagaaatggcctgcctgtggacatcaccaaggtgcccccagcccctgtgaacaaggatgactttgccctggtgcagaggcctggccctggcctgagccaggaggccgccaggagatatggagagctgaccaagctgatccggcagcagcacgagatgtgcctgaaccacagcaaccagttcacccagctgggcaacatcacagagaccaccaagtttgagaagctggccgaggactgcaagaggtccatggacatcctgaagcaggcctttgtgcggggcctgcccacccccacagccaggtttgagcagaggaccttcagcgtcatcaagatcttcccagacctgagcagcaatgacatgctgctcttcatcgtgaagggcatcaacctgcccaccccacctggcctgagccctggggacctggatgtgtttgtgcgctttgacttcccctacccaaatgtggaggaggcccagaaggacaagaccagcgtcatcaagaacacagacagccctgagttcaaggagcagttcaagctgtgcatcaacagaagccaccggggcttcagaagagccatccagaccaagggcatcaagtttgaggtggtgcacaagggcggcctcttcaagacagacagagtgctgggcacagcccagctgaagctggatgccctggagatcgcctgtgaggtgcgggagatcctggaggtgctggatggccggcggcccactggaggccgcctggaggtgatggtgcgcatccgggagcccctgacagcccagcagctggagaccaccacagagcgctggctggtgattgatcctgtgcctgctgctgtgcccaccgtggccggccccaagggcaaggcccctcctgtgcctgccccagcccgggagagcggcaacagaagtgcccggcccctgcacagcctgtctgtgctggcctttgaccaggagcggctggagaggaagatcctggccctgcggcaggcccggcggcctgtgcccccagaggtggcccagcagtaccaggacatcatgcagaggagccagtggcagagggcccagctggagcagggcggcgtgggcatccggcgggagtatgctgcccagctggagcggcagctgcagttctacacagaagctgcccggcggctgggcaatgatggcagcagagatgctgccaaggaggccctgtacagaagaaacctggtggagagcgagctgcagaggctgcggaggtag

SEQ ID NO: 276407 - DNA, 1116 bp, Artificial Sequence
  derived and/or modified sequence
atgcctcctggcccctgcagccctggccccctggcccagctgcagagccggcagagggactacaagctggccgccctgcacgccaagcagcagggcgacaccacagctgctgcccggcacttccgggtggccaagagctttgatgctgtgctggaggccctgagcagaggagagcctgtggacctgagctgcctgcccccacctccagaccagctgcccccagacccccccagcccccccagccagccccccaccccagccacagcccccagcaccacagaggtgcccccaccacccaggaccctgctggaggccctggagcagaggatggagcgctaccaggtggccgccgcccaggccaagagcaaaggagaccagaggaaggccaggatgcatgaaagaattgtgaagcagtaccaggatgccatccgggcccacaaggccggccgggctgtggatgtggccgagctgcctgtgcccccaggcttcccccccatccagggcctggaggccaccaagcccacccagcagagcctggtgggcgtgctggagacagccatgaagctggccaaccaggatgagggcccagaagatgaggaggatgaggtgcccaagaagcagaacagccctgtggcccccacagcccagcccaaggccccacccagcaggaccccccagagcggcagcgcccccacagccaaggccccacccaaggccaccagcacccgggcccagcagcagctggccttcctggagggcaggaagaagcagctgctgcaggccgccctgcgggccaagcagaagaatgatgtggagggcgccaagatgcacctgcggcaggccaagggcctggagcccatgctggaggccagcagaaatggcctgcctgtggacatcaccaaggtgcccccagcccctgtgaacaaggatgactttgccctggtgcagaggcctggccctggcctgagccaggaggccgcccggcgctacggggagctgaccaagctgatccggcagcagcacgagatgtgcctgaaccacagcaaccagttcacccagctgggcaacatcacagagaccaccaaggccaacatggtgaagccctgcttctactag

SEQ ID NO: 276408 - DNA, 1722 bp, Artificial Sequence
  derived and/or modified sequence
atgcggcggtacgaccggggcctgaagaccctggagaacctgctggcatctatacgaaagggtaacgctatcgacgaagccgacatccctcctcccgtggccattggcaagggacctgccagtacccctacctactcacctgcgcccacacagccagccccacggatcgcttccgctcctgaacctagggtgacacttgaagggccatctgccaccgctcccgcctcatcccccgggctcgccaaaccccagatgcctcccggcccctgctctccgggtcccctcgcgcagctgcagtctagacagcgggactataagctcgccgcactccatgctaaacagcagcagctggcctttctcgaggggaggaaaaagcagcttcttcaagccgccttacgcgccaaacaaaagaatgatgtggagggggcgaagatgcacctgcggcaagccaaaggtctagagccaatgctggaagcttctaggaatggcctgcctgtagacatcacaaaggtgccacccgcccctgtgaataaggatgactttgccctcgtccaaagacctgggcctggattgtcccaggaggccgctagaaggtacggcgaactgaccaagcttattaggcaacagcatgaaatgtgtctgaaccattctaaccagtttactcagctcggaaacatcaccgagacgacaaaatttgagaaactggccgaagactgcaagaggtcaatggacatcttgaaacaggctttcgtgagaggattgccaacacctactgcacgtttcgagcagagaacctttagcgttatcaagatttttcccgatctcagctccaacgatatgctgctgtttattgttaagggcattaaccttcctacgcctcccggactatcccctggcgacttggatgtgttcgttaggttcgattttccttatcctaatgtcgaggaggctcaaaaggacaagacaagcgtgattaagaacactgacagccctgagttcaaagagcaattcaaactctgtatcaataggtcacacaggggtttcaggcgtgcgatccagacaaaaggcattaaatttgaggttgtgcacaagggggggttgttcaaaacagacagggtcctcggcaccgcccagctcaagctggacgcactggagatcgcatgcgaggttcgcgagatcctggaagttttagacggtcgacgaccaaccggcgggcggctcgaggtcatggttcgcattcgggaaccacttacggcacagcaattagagacaacaacagaacggtggctggttatcgaccctgtgcccgctgctgtcccaactgtagccggcccaaagggaaaggcccctccagtgcctgcccccgcccgggaaagcggaaacagatcagcccggcccttacactccctcagtgtcctggcattcgatcaggaaaggctggagcgcaaaatactcgcactgagacaggctcggcggcctgtgccccccgaggtcgctcagcagtaccaggatataatgcagagatcgcaatggcaacgcgcccagctcgagcagggcggggtggggatccggcgcgagtacgcagcccaactggagcgccagctccagttctatacagaagccgcgcgccgccttggcaacgacggatcccgcgacgcagccaaggaggcgttgtatagacgcaatctggtggagtctgagctgcaacgcctccgccgctag

SEQ ID NO: 276409 - DNA, 1116 bp, Artificial Sequence
  derived and/or modified sequence
atgccccccggcccctgcagccccggccccctggcccagctgcagtctaggcaaagagactacaaattggcagccctgcatgcgaagcagcaaggcgatacaaccgccgccgccaggcattttagagtggctaagagcttcgacgcagtcctggaggccctcagtagaggggagccggtggatctgagttgtcttcccccgccccctgatcaacttcctcccgacccacccagccccccatctcagcctcccacaccggcgacggccccatcaaccacagaggtaccaccgcccccccgcacacttctggaagctctcgagcaacggatggagaggtaccaggtagccgccgcgcaggcgaaatctaaaggggaccagcgaaaggcccggatgcatgagcgtatcgtgaaacagtatcaagatgccatccgggcccataaagctgggagggcagtcgacgtggctgagctgccagtccccccgggtttcccacctatccagggacttgaggcaaccaaaccaacccaacagagccttgtcggcgttctggaaaccgcaatgaagctggccaaccaagacgagggcccggaagacgaggaagatgaagttccgaaaaagcagaattccccagtggcccccactgcccagccgaaggcacccccaagccggactccgcagtctggcagtgcgccaacagctaaagcccctcccaaagctactagcacccgggctcagcagcaactggcctttcttgagggccggaagaagcagcttctgcaggcagccttgcgtgccaagcagaagaacgacgtggagggtgccaagatgcatctgagacaggccaagggactggaacctatgttggaggcctctagaaacggcttacctgtggacatcacaaaagttcctcctgcgccagtgaataaggacgacttcgccctggtgcagagacctggccctgggctctctcaggaagccgccaggaggtacggtgagcttaccaagctgatccgccagcagcacgagatgtgcctgaaccattctaaccagttcacgcagctgggcaatatcacggaaaccaccaaggccaatatggtaaaaccatgtttctattag

SEQ ID NO: 276410 - DNA, 1722 bp, Artificial Sequence
  derived and/or modified sequence
atgaggcgctatgacaggggcctgaagactctcgaaaacctgctggcttcgatccggaaagggaacgccattgatgaagccgacatcccacctcccgtggccatcgggaaaggccctgcatccaccccgacttacagcccagcccctactcagcccgcaccacgcattgcttctgctccggagcccagagtcaccctcgagggaccctccgccacagccccagccagctctccaggattagccaaacctcaaatgcccccagggccatgcagccctgggccattggcccagctgcagtcccgccagagagactacaaactcgcggcactgcacgcaaagcaacagcaactcgcattcttggagggacggaagaaacagcttctgcaggctgctctgcgagccaaacagaaaaacgatgtggaaggcgctaagatgcacctccggcaggccaagggactcgagcccatgttggaggcttcccggaatggcctgccagtggacatcactaaagttccacctgctcccgtcaacaaggatgacttcgctctggtccagcggccaggacctggtctgtctcaagaagccgctcgcagatatggggagctaaccaagttgatccggcagcagcacgagatgtgccttaatcatagcaaccagttcacccagttaggcaatatcactgaaacgaccaaatttgaaaagctagccgaagattgtaagcgttctatggatatcctgaagcaggcgtttgttcgaggcctgcccacgcccactgctcgcttcgaacagcgcacattctcggtaattaagatatttcctgatctctcttctaatgatatgttgctgttcatcgttaaagggattaacctgcctacccccccagggctgtcacccggagacctggacgtgtttgttagatttgacttcccctaccctaatgtggaggaggcccaaaaagataaaaccagcgtgattaagaacaccgactcacccgagttcaaggagcaatttaaactctgtatcaatcgcagccatcgaggttttcgcagagctatccagacaaaagggatcaaattcgaggtcgtacataagggtgggctcttcaaaaccgatagggtactgggcaccgcgcagctgaagttggacgcgcttgagatcgcctgtgaggttagggagattctggaagtattggacggtcgacgccctacgggaggcaggctggaggttatggtgagaatccgagagccactgacagctcagcagcttgaaaccaccacagagcgttggttagttattgatcctgtgcctgcagcagtgccaaccgtggcaggacccaagggaaaggcccctccagtcccggctccagccagagaatctggaaatcgatccgccagaccgctgcattccctgagcgtgctggctttcgatcaggagaggttggaacggaaaatcctcgccctccggcaggccagaaggccggttccccctgaggtcgcacagcagtatcaggatatcatgcaacgcagtcagtggcagagagcacagttagaacaaggaggggtggggattaggagggagtacgcggctcagctggagaggcagcttcagttctataccgaggccgctagacgactgggcaatgacggctcacgggacgccgctaaagaggccctatatcggagaaatttggtcgagtccgaactgcagaggctaaggcgatag

SEQ ID NO: 276411 - DNA, 1116 bp, Artificial Sequence
  derived and/or modified sequence
atgcctcccggaccctgctctccgggaccattggcccagctccagagtcgccagcgtgattacaagctggccgctctacatgccaaacagcagggtgacaccaccgccgctgcacggcacttcagggtggctaaaagctttgatgccgtactggaggcactctccagaggagaacctgttgatctgtcctgcttgccgccaccccctgaccaacttcccccagatccaccttcacccccaagtcagcctccaactcctgccactgcaccctctacaaccgaagttcctcctccacccaggaccttactcgaggccctcgagcagcggatggagcgctatcaggtggccgcagctcaggctaaatccaagggcgaccagcgtaaagccagaatgcatgagcgaatcgtcaagcagtatcaggacgccatcagggctcacaaggcaggaagggcagtggacgttgcggaactgcccgtgcctccaggctttcccccaatccagggtttggaagcaaccaaacccacccagcaatctctcgtgggggtgctcgagaccgctatgaaactggctaaccaagatgagggtcccgaagatgaagaagacgaggtgccaaaaaagcaaaattctcccgtcgcccctacagcacaaccaaaggcaccccctagtcggactcctcagtcaggttcagctcccaccgcgaaggcgccacctaaggccacttccacgagagctcagcagcagctggcttttttagaggggcgtaagaagcagctcttgcaggcagctctgagagctaagcaaaagaacgatgtggagggtgcaaaaatgcaccttcgccaggctaaaggcctggaacccatgctcgaagcttcaagaaacgggcttcccgtggacattaccaaagttccaccagccccagtgaacaaagatgatttcgcactagtgcaaagacccggtcccggtctctcccaagaggcagctcgtaggtacggcgagcttaccaagctgattagacagcagcacgagatgtgcctgaaccattcaaaccagtttacccagctggggaatattaccgaaactacgaaagccaacatggtgaagccctgcttctactag

SEQ ID NO: 276412 - DNA, 2992 bp, Artificial Sequence
  derived and/or modified sequence
acagtcagcaccgccccagccaggcgcctgcgcgcccacgcactacctgccgggagttgtagtttcggctcggcagacccggcgagcccagtggccgcgctccggtgcggcggcgcccgaggcccgaggcggaagtgggacggccaagcagggaagcgagggctcgggatcgacggccgcggggcgccgacgaggagtgcaggactcaggaagggcgagtgcgcggcgacagagcccggggaaggaggcagggcaaggccgggcttgggggcaggtggtccgggcatccagccttgaagatgcacaagaggaaaggacccccgggacccccgggcagaggcgccgcggccgcccgccagctgggcctgctggttgacctctccccagatggcctgatgatccctgaggacggggctaacgatgaagaactggaggctgagttcttggctttggtcgggggccagcccccagccctggagaagctcaaaggcaaaggtcccttgccgatggaggccattgagaagatggccagcctgtgcatgagagacccggatgaggatgaggaggaggggacggatgaggacgacttggaggctgatgatgacctgctggcggagctaaatgaggtccttggagaggagcagaaggcttcagagaccccacctcctgtggcccagccgaagcctgaggcccctcatccggggctggagaccaccttgcaggagaggctggcgctctatcagacagcaattgaaagcgccagacaagctggagacagcgccaagatgcggcgctacgatcgggggcttaaaacactggaaaacctgctcgcctccatccgtaagggcaatgccattgacgaagcggacatcccgccgccagtggccataggaaaaggcccggcgtccacgcctacctacagccctgcacccacccagccggcccctagaatcgcgtcagccccagagcccagggtcaccctggagggaccttctgccaccgccccagcctcatctccaggcttggctaagccccagatgcccccaggtccctgcagccctggccctctggcccagttgcagagccgccagcgcgactacaagctggctgccctccacgccaagcagcagcagctggccttcctagagggccgcaagaagcagctcctgcaggccgcactgcgagccaagcagaaaaacgacgtggagggtgccaagatgcacctgcgccaagccaagggactggagcctatgctggaggcctcgcgcaatgggctgcctgtggacatcaccaaggtgccgcctgcccctgtcaacaaggacgactttgccctggtccagcggcctggcccgggtctgtctcaggaggccgcccggcgctatggtgaactcaccaagctcatacggcagcagcacgagatgtgcctgaaccactcaaaccaattcacccagctgggcaacatcactgaaaccaccaagtttgaaaagttggcggaggactgtaagcggagcatggacattctgaagcaagccttcgtccggggtctccccacgcccaccgcccgctttgagcaaaggaccttcagcgtcatcaagatcttccctgacctcagcagcaacgacatgctcctcttcatcgtgaagggcatcaacttgcccacacccccaggactgtcccctggcgatctggatgtctttgttcggtttgacttcccctatcccaacgtggaagaagctcagaaagacaagaccagtgtgatcaagaacacagactcccctgagttcaaggagcagttcaaactctgcatcaaccgcagccaccgtggcttccgaagggccatccagaccaagggcatcaagttcgaagtggttcacaagggggggctgttcaagactgaccgggtgctggggacagcccagctgaagctggatgcactggagatagcatgtgaggtccgggagatccttgaggtcctggatggtcgccggcccacaggggggcgactggaggtaatggtccggattcgggagccactgacagcccagcagttggagacgacgacagagaggtggctggtcattgaccctgtgccggcagctgtgcccacagttgctgggcccaaagggaaggcccctcctgtgcctgcccctgcaagggagtcagggaacagatcagcccggcccctgcatagcctcagtgtgctggcgtttgaccaagagcgtctggagcggaagatcctggccctcaggcaggcgcggcggccggtgcccccagaagtggcccagcagtaccaggacatcatgcaacgcagccagtggcagagggcacagctggagcaggggggtgtgggcatccgacgggaatacgcagcccagctggagcggcagctgcagttctacacggaggctgcccggcgcctgggcaacgatggcagcagggatgctgcaaaggaggcgctctataggcggaatctggtagagagtgagctgcagcggctccgcaggtgaggagcccatggggcgggcagcccccagaaagcgggcagcaggccccgataccgggaagagccgacacagccacgaaccagacaagcagacaatcagcggacaatcggttctggactcacccctcatccgggcccccagccccgccagagcctccgtggctgcgggtgttgggaaccatgcctgccagccagtatgtgcccctcacccaggcctggctgggccctggagagtcctgtttgcacagcccaggggtgtccggcctctggcccgccccggagcagggagggtggctggggccaagccccgagggcccctgcaagcactttacttcctgttcctccccagccttaaccccaaagccctcctgcaccccaaagaagccactgaggctggccgagccacactgtctccccaggggcgtcgacctggcccagctgggtccccagggccagcacatggaataaaatagccagggccacactcag

SEQ ID NO: 276413 - DNA, 2153 bp, Artificial Sequence
  derived and/or modified sequence
acagtcagcaccgccccagccaggcgcctgcgcgcccacgcactacctgccgggagttgtagtttcggctcggcagacccggcgagcccagtggccgcgctccggtgcggcggcgcccgaggcccgaggcggaagtgggacggccaagcagggaagcgagggctcgggatcgacggccgcggggcgccgacgaggagtgcaggactcaggaagggcgagtgcgcggcgacagagcccggggaaggaggcagggcaaggccgggcttgggggcaggtggtccgggcatccagccttgaagatgcacaagaggaaaggacccccgggacccccgggcagaggcgccgcggccgcccgccagctgggcctgctggttgacctctccccagatggcctgatgatccctgaggacggggctaacgatgaagaactggaggctgagttcttggctttggtcgggggccagcccccagccctggagaagctcaaaggcaaaggtcccttgccgatggaggccattgagaagatggccagcctgtgcatgagagacccggatgaggatgaggaggaggggacggatgaggacgacttggaggctgatgatgacctgctggcggagctaaatgaggtccttggagaggagcagaaggcttcagagaccccacctcctgtggcccagccgaagcctgaggcccctcatccggggctggagaccaccttgcaggagaggctggcgctctatcagacagcaattgaaagcgccagacaagctggagacagcgccaagatgcggcgctacgatcgggggcttaaaacactggaaaacctgctcgcctccatccgtaagggcaatgccattgacgaagcggacatcccgccgccagtggccataggaaaaggcccggcgtccacgcctacctacagccctgcacccacccagccggcccctagaatcgcgtcagccccagagcccagggtcaccctggagggaccttctgccaccgccccagcctcatctccaggcttggctaagccccagatgcccccaggtccctgcagccctggccctctggcccagttgcagagccgccagcgcgactacaagctggctgccctccacgccaagcagcagggagataccactgctgccgctagacacttccgcgtggctaagagctttgatgctgtcttggaggccctgagccggggtgagcccgtggacctctcctgcctgccccctccacccgaccagctgcccccagacccaccgtcaccaccgtcgcagcctccgacccccgctacggcgccctccacaacagaggtgcccccacccccgaggaccctgctggaggcgctggagcagcggatggagcggtaccaggtggccgcagcccaggccaagagcaagggggaccagcggaaagctcgaatgcacgagcgcatcgtcaagcaataccaagatgccatccgagcccacaaggctggccgagccgtggatgtcgctgaattgcccgtgcccccaggcttccccccaatccagggcctggaggccaccaagcccacccagcagagtctggtgggtgtcctggagactgccatgaagctggccaaccaggatgaaggcccagaggatgaagaggatgaggtgcctaagaagcagaacagccctgtggcccccacagcccagcccaaagccccaccctcaagaactccccagtcgggatcagccccaacagccaaagcgccccccaaagccacatccaccagagcccagcagcagctggccttcctagagggccgcaagaagcagctcctgcaggccgcactgcgagccaagcagaaaaacgacgtggagggtgccaagatgcacctgcgccaagccaagggactggagcctatgctggaggcctcgcgcaatgggctgcctgtggacatcaccaaggtgccgcctgcccctgtcaacaaggacgactttgccctggtccagcggcctggcccgggtctgtctcaggaggccgcccggcgctatggtgaactcaccaagctcatacggcagcagcacgagatgtgcctgaaccactcaaaccaattcacccagctgggcaacatcactgaaaccaccaaggctaacatggtgaaaccctgtttctactaa

SEQ ID NO: 276414 - DNA, 1722 bp, Artificial Sequence
  derived and/or modified sequence
atgagaagatacgacagaggcctgaagaccctggagaacctgctggccagcatcagaaagggcaacgccatcgacgaggccgacatccccccccccgtggccatcggcaagggccccgccagcacccccacctacagccccgcccccacccagcccgcccccagaatcgccagcgcccccgagcccagagtgaccctggagggccccagcgccaccgcccccgccagcagccccggcctggccaagccccagatgccccccggcccctgcagccccggccccctggcccagctgcagagcagacagagagactacaagctggccgccctgcacgccaagcagcagcagctggccttcctggagggcagaaagaagcagctgctgcaggccgccctgagagccaagcagaagaacgacgtggagggcgccaagatgcacctgagacaggccaagggcctggagcccatgctggaggccagcagaaacggcctgcccgtggacatcaccaaggtgccccccgcccccgtgaacaaggacgacttcgccctggtgcagagacccggccccggcctgagccaggaggccgccagaagatacggcgagctgaccaagctgatcagacagcagcacgagatgtgcctgaaccacagcaaccagttcacccagctgggcaacatcaccgagaccaccaagttcgagaagctggccgaggactgcaagagaagcatggacatcctgaagcaggccttcgtgagaggcctgcccacccccaccgccagattcgagcagagaaccttcagcgtgatcaagatcttccccgacctgagcagcaacgacatgctgctgttcatcgtgaagggcatcaacctgcccaccccccccggcctgagccccggcgacctggacgtgttcgtgagattcgacttcccctaccccaacgtggaggaggcccagaaggacaagaccagcgtgatcaagaacaccgacagccccgagttcaaggagcagttcaagctgtgcatcaacagaagccacagaggcttcagaagagccatccagaccaagggcatcaagttcgaggtggtgcacaagggcggcctgttcaagaccgacagagtgctgggcaccgcccagctgaagctggacgccctggagatcgcctgcgaggtgagagagatcctggaggtgctggacggcagaagacccaccggcggcagactggaggtgatggtgagaatcagagagcccctgaccgcccagcagctggagaccaccaccgagagatggctggtgatcgaccccgtgcccgccgccgtgcccaccgtggccggccccaagggcaaggccccccccgtgcccgcccccgccagagagagcggcaacagaagcgccagacccctgcacagcctgagcgtgctggccttcgaccaggagagactggagagaaagatcctggccctgagacaggccagaagacccgtgccccccgaggtggcccagcagtaccaggacatcatgcagagaagccagtggcagagagcccagctggagcagggcggcgtgggcatcagaagagagtacgccgcccagctggagagacagctgcagttctacaccgaggccgccagaagactgggcaacgacggcagcagagacgccgccaaggaggccctgtacagaagaaacctggtggagagcgagctgcagagactgagaagatag

SEQ ID NO: 276415 - DNA, 1116 bp, Artificial Sequence
  derived and/or modified sequence
atgccccccggcccctgcagccccggccccctggcccagctgcagagcagacagagagactacaagctggccgccctgcacgccaagcagcagggcgacaccaccgccgccgccagacacttcagagtggccaagagcttcgacgccgtgctggaggccctgagcagaggcgagcccgtggacctgagctgcctgccccccccccccgaccagctgccccccgacccccccagcccccccagccagccccccacccccgccaccgcccccagcaccaccgaggtgccccccccccccagaaccctgctggaggccctggagcagagaatggagagataccaggtggccgccgcccaggccaagagcaagggcgaccagagaaaggccagaatgcacgagagaatcgtgaagcagtaccaggacgccatcagagcccacaaggccggcagagccgtggacgtggccgagctgcccgtgccccccggcttcccccccatccagggcctggaggccaccaagcccacccagcagagcctggtgggcgtgctggagaccgccatgaagctggccaaccaggacgagggccccgaggacgaggaggacgaggtgcccaagaagcagaacagccccgtggcccccaccgcccagcccaaggccccccccagcagaaccccccagagcggcagcgcccccaccgccaaggccccccccaaggccaccagcaccagagcccagcagcagctggccttcctggagggcagaaagaagcagctgctgcaggccgccctgagagccaagcagaagaacgacgtggagggcgccaagatgcacctgagacaggccaagggcctggagcccatgctggaggccagcagaaacggcctgcccgtggacatcaccaaggtgccccccgcccccgtgaacaaggacgacttcgccctggtgcagagacccggccccggcctgagccaggaggccgccagaagatacggcgagctgaccaagctgatcagacagcagcacgagatgtgcctgaaccacagcaaccagttcacccagctgggcaacatcaccgagaccaccaaggccaacatggtgaagccctgcttctactag

SEQ ID NO: 276416 - DNA, 711 bp, Artificial Sequence
  derived and/or modified sequence
tggcactctcctgacggcctcatgattccagaagacggcgcgaatgatgaggaactcgaagcagaattcctagcattggtgggaggacaacctcctgcgctagagaaactcaaagggaagggaccactgcctatggaggcaatcgagaagatggccagcctgtgtatgcgggaccccgatgaggacgaggaagaggggacagacgaggacgacctcgaggcagatgatgacctcctggccgagctgaacgaagtgctgggagaggaacagaaggcatctgaaactcctccacctgtggctcaaccaaagccggaggctccacatcctgggttagaaacaacgcttcaggaacgcctcgcgttataccagacagctatagagagtgccaggcaggccggtgactcagcaaaaatgcgtcgatacgacagaggtctcaagaccctggaaaatctcctggcatccattcggaaggggaatgctattgatgaggccgatatacccccaccagtagcgataggtaagggccctgcatctacccccacttattcccccgctcctacccagccagctccacgcattgcctctgcacctgagcctagagttactctcgaaggacccagtgctaccgccccggccagtagtcctggccttgccaaaccacaaatgcctcccgggccctgttccccaggtccgctggcccagctgcagtag

SEQ ID NO: 276417 - DNA, 711 bp, Artificial Sequence
  derived and/or modified sequence
tggcacagcccagatggcctgatgatcccagaagatggagccaatgatgaggagctggaggccgagttcctggccctggtgggcggccagcccccagccctggagaagctgaagggcaagggccccctgcccatggaggccatcgagaagatggccagcctgtgcatgagggaccctgatgaagatgaggaggagggcacagatgaagatgacctggaggctgatgatgacctgctggccgagctgaatgaggtgctgggggaggagcagaaggccagcgagaccccacctcctgtggcccagcccaagccagaggccccccaccctggcctggagaccaccctgcaggagcggctggccctgtaccagacagccatcgagagcgcccggcaggccggggacagcgccaagatgagaagatatgaccggggcctgaagaccctggagaacctgctggccagcatcagaaaaggaaatgccattgatgaggccgacatccccccacctgtggccatcggcaagggccctgccagcacccccacctacagccctgcccccacccagcctgcccccagaattgccagcgcccctgagccccgggtgaccctggagggccccagcgccacagccccagccagcagccctggcctggccaagccccagatgcctcctggcccctgcagccctggccccctggcccagctgcagtag

SEQ ID NO: 276418 - DNA, 711 bp, Artificial Sequence
  derived and/or modified sequence
tggcacagccccgacggcctgatgatccccgaggacggcgccaacgatgaagaactggaagccgagtttttggccctggtgggaggccaaccgcccgcgctggagaaactgaaaggcaagggacctctccctatggaggcgatcgagaagatggcctccctttgcatgcgcgaccccgacgaagatgaagaagagggtacagacgaggacgatctcgaggcagatgacgaccttctcgcagaactgaatgaggtactcggtgaagagcagaaggccagtgagacccccccaccggtggctcagccgaagcctgaggcccctcaccctggactggagaccactctgcaagagcgcctggccctgtaccagacagccatagaatcggcccgccaggctggcgattccgctaagatgagacggtatgataggggtctaaagacattggagaaccttctagccagtattcggaaggggaatgcaatagatgaggcagacatacctccacccgtggctatcggaaagggtcccgcgtcaacccctacatatagtcccgcccctactcagcctgcgccccgcattgcctcagcccccgaaccaagggtcacgctcgaagggccctcagcaactgcccccgctagctccccgggccttgctaaacctcaaatgccacccggcccatgttctcccggcccgctcgcccagctgcagtag

SEQ ID NO: 276419 - DNA, 711 bp, Artificial Sequence
  derived and/or modified sequence
tggcatagtcccgacggcttaatgatcccagaggacggagctaatgacgaagaactcgaagccgaattcctagccttagtcggcggacagcctccggctctggaaaagctaaaggggaagggaccgttgcccatggaggcaatcgaaaaaatggctagcctctgtatgcgagaccctgatgaggatgaggaggaggggacagatgaggacgaccttgaggccgacgatgatctcctagcggaattaaacgaggtgcttggcgaggaacagaaggcctccgagactccccctccagtcgcacagccaaagccagaggcccctcaccctgggctggaaaccaccttgcaggagcgacttgccctgtatcagactgctatcgagagcgcgcgacaagccggagactccgccaaaatgcgacgatacgaccggggactcaaaacgttagagaatctgctagctagtattcgcaagggcaacgccatagacgaggcagatattccccctcccgtcgcaattggaaaagggccagcctctactccaacctacagtcctgcaccgacacagcctgctccaaggattgcttccgctcccgagcccagagttacactcgaaggcccatcggctactgcccctgcgagttctccaggactggcaaagccacagatgccacctgggccttgttccccaggtcctctggctcaactccagtag

SEQ ID NO: 276420 - DNA, 711 bp, Artificial Sequence
  derived and/or modified sequence
tggcacagccccgacggcctgatgatccccgaggacggcgccaacgacgaggagctggaggccgagttcctggccctggtgggcggccagccccccgccctggagaagctgaagggcaagggccccctgcccatggaggccatcgagaagatggccagcctgtgcatgagagaccccgacgaggacgaggaggagggcaccgacgaggacgacctggaggccgacgacgacctgctggccgagctgaacgaggtgctgggcgaggagcagaaggccagcgagacccccccccccgtggcccagcccaagcccgaggccccccaccccggcctggagaccaccctgcaggagagactggccctgtaccagaccgccatcgagagcgccagacaggccggcgacagcgccaagatgagaagatacgacagaggcctgaagaccctggagaacctgctggccagcatcagaaagggcaacgccatcgacgaggccgacatccccccccccgtggccatcggcaagggccccgccagcacccccacctacagccccgcccccacccagcccgcccccagaatcgccagcgcccccgagcccagagtgaccctggagggccccagcgccaccgcccccgccagcagccccggcctggccaagccccagatgccccccggcccctgcagccccggccccctggcccagctgcagtag

SEQ ID NO: 276421 - protein, 706 aa, Artificial Sequence
  derived and/or modified sequence
MGDERPHYYGKHGTPQKYDPTFKGPIYNRGCTDIICCVFLLLAIVGYVAVGIIAWTHGDPRKVIYPTDSRGEFCGQKGTKNENKPYLFYFNIVKCASPLVLLEFQCPTPQICVEKCPDRYLTYLNARSSRDFEYYKQFCVPGFKNNKGVAEVLQDGDCPAVLIPSKPLARRCFPAIHAYKGVLMVGNETTYEDGHGSRKNITDLVEGAKKANGVLEARQLAMRIFEDYTVSWYWIIIGLVIAMAMSLLFIILLRFLAGIMVWVMIIMVILVLGYGIFHCYMEYSRLRGEAGSDVSLVDLGFQTDFRVYLHLRQTWLAFMIILSILEVIIILLLIFLRKRILIAIALIKEASRAVGYVMCSLLYPLVTFFLLCLCIAYWASTAVFLSTSNEAVYKIFDDSPCPFTAKTCNPETFPSSNESRQCPNARCQFAFYGGESGYHRALLGLQIFNAFMFFWLANFVLALGQVTLAGAFASYYWALRKPDDLPAFPLFSAFGRALRYHTGSLAFGALILAIVQIIRVILEYLDQRLKAAENKFAKCLMTCLKCCFWCLEKFIKFLNRNAYIMIAIYGTNFCTSARNAFFLLMRNIIRVAVLDKVTDFLFLLGKLLIVGSVGILAFFFFTHRIRIVQDTAPPLNYYWVPILTVIVGSYLIAHGFFSVYGMCVDTLFLCFCEDLERNDGSQERPYFMSPELRDILLKGSAEEGKR

SEQ ID NO: 276422 - DNA, 2121 bp, Artificial Sequence
  derived and/or modified sequence
atgggcgacgagagaccccactactacggcaagcacggcaccccccagaagtacgaccccaccttcaagggccccatctacaacagaggctgcaccgacatcatctgctgcgtgttcctgctgctggccatcgtgggctacgtggccgtgggcatcatcgcctggacccacggcgaccccagaaaggtgatctaccccaccgacagcagaggcgagttctgcggccagaagggcaccaagaacgagaacaagccctacctgttctacttcaacatcgtgaagtgcgccagccccctggtgctgctggagttccagtgccccaccccccagatctgcgtggagaagtgccccgacagatacctgacctacctgaacgccagaagcagcagagacttcgagtactacaagcagttctgcgtgcccggcttcaagaacaacaagggcgtggccgaggtgctgcaggacggcgactgccccgccgtgctgatccccagcaagcccctggccagaagatgcttccccgccatccacgcctacaagggcgtgctgatggtgggcaacgagaccacctacgaggacggccacggcagcagaaagaacatcaccgacctggtggagggcgccaagaaggccaacggcgtgctggaggccagacagctggccatgagaatcttcgaggactacaccgtgagctggtactggatcatcatcggcctggtgatcgccatggccatgagcctgctgttcatcatcctgctgagattcctggccggcatcatggtgtgggtgatgatcatcatggtgatcctggtgctgggctacggcatcttccactgctacatggagtacagcagactgagaggcgaggccggcagcgacgtgagcctggtggacctgggcttccagaccgacttcagagtgtacctgcacctgagacagacctggctggccttcatgatcatcctgagcatcctggaggtgatcatcatcctgctgctgatcttcctgagaaagagaatcctgatcgccatcgccctgatcaaggaggccagcagagccgtgggctacgtgatgtgcagcctgctgtaccccctggtgaccttcttcctgctgtgcctgtgcatcgcctactgggccagcaccgccgtgttcctgagcaccagcaacgaggccgtgtacaagatcttcgacgacagcccctgccccttcaccgccaagacctgcaaccccgagaccttccccagcagcaacgagagcagacagtgccccaacgccagatgccagttcgccttctacggcggcgagagcggctaccacagagccctgctgggcctgcagatcttcaacgccttcatgttcttctggctggccaacttcgtgctggccctgggccaggtgaccctggccggcgccttcgccagctactactgggccctgagaaagcccgacgacctgcccgccttccccctgttcagcgccttcggcagagccctgagataccacaccggcagcctggccttcggcgccctgatcctggccatcgtgcagatcatcagagtgatcctggagtacctggaccagagactgaaggccgccgagaacaagttcgccaagtgcctgatgacctgcctgaagtgctgcttctggtgcctggagaagttcatcaagttcctgaacagaaacgcctacatcatgatcgccatctacggcaccaacttctgcaccagcgccagaaacgccttcttcctgctgatgagaaacatcatcagagtggccgtgctggacaaggtgaccgacttcctgttcctgctgggcaagctgctgatcgtgggcagcgtgggcatcctggccttcttcttcttcacccacagaatcagaatcgtgcaggacaccgccccccccctgaactactactgggtgcccatcctgaccgtgatcgtgggcagctacctgatcgcccacggcttcttcagcgtgtacggcatgtgcgtggacaccctgttcctgtgcttctgcgaggacctggagagaaacgacggcagccaggagagaccctacttcatgagccccgagctgagagacatcctgctgaagggcagcgccgaggagggcaagagatag

SEQ ID NO: 276423 - DNA, 2121 bp, Artificial Sequence
  derived and/or modified sequence
atgggggatgagaggccacattactacggcaagcacggaacccctcagaaatacgaccccaccttcaagggtcccatctataaccgcggctgcactgacatcatttgctgcgtttttcttctgctggctatcgttgggtatgtggccgtgggtataatagcatggactcatggcgatcctcgcaaggtgatataccccacggattctaggggcgaattctgtggccaaaagggaacaaagaatgaaaacaaaccatatttgttctacttcaacatcgtgaaatgcgcgagccccctcgtgctgttagaattccagtgtcccactccacaaatctgcgttgaaaagtgcccggacaggtaccttacttacctcaacgcaaggagttcccgagactttgaatattataagcagttctgtgtccccgggtttaagaataacaagggcgttgccgaagttctccaagacggggactgcccggccgttctcatccctagcaagcctcttgcccgaagatgttttcccgcgatccatgcttacaagggggtcctgatggttgggaatgaaacaacctacgaggatggacacggaagccggaagaacatcaccgacctggtagagggtgccaaaaaggctaacggagtgcttgaagcccggcaactggcgatgagaatcttcgaagactataccgtcagctggtactggatcattataggcttggtgattgcaatggctatgtctctcctgtttattatcctgctgcgcttcctggctggtatcatggtttgggtcatgataatcatggttatcctcgtactgggatacgggatctttcactgctacatggaatattctaggctgcgtggcgaagccggcagcgacgtatccctggtggacttgggcttccaaacggattttcgggtgtaccttcacttgcgccagacctggctggcttttatgatcattttgtccatcttagaggtgatcatcattctacttcttatctttctgagaaagaggattcttatcgccatcgcactcattaaggaagccagcagggctgttggctatgtgatgtgttccctcttgtaccctctcgtcaccttctttcttctgtgtctctgcatcgcctactgggcctccaccgccgtttttctctctacctctaatgaagccgtctataagatttttgatgatagtccctgcccattcaccgcaaagacatgtaatcccgagacattcccgtcaagcaacgaatctcgccagtgcccaaatgcccggtgccagtttgccttttacgggggtgagtccggctatcacagagctttgctaggcctccagattttcaatgcttttatgttcttttggctggctaactttgttttggctctaggccaggtaacactggctggcgcatttgctagctattattgggcgctgaggaagccagatgatcttcccgcttttcctctcttttcggcctttggccgcgccttgcgataccacacaggatctttggcctttggggccctcatactggccatcgttcagatcataagagtaattctggagtatcttgaccaacgcttgaaggccgcagagaataagtttgctaagtgccttatgacttgtctgaaatgttgtttttggtgcttagagaaattcataaagttcctgaacagaaatgcttacatcatgatcgctatatacggcacaaacttttgcacttccgccagaaacgcgttctttctgctgatgcggaatattatcagagtcgccgtgctggacaaggttactgacttcctctttcttcttgggaagctcctcatcgtgggatccgtgggcatcctagcatttttttttttcacacaccggatcagaatcgtgcaggataccgcgccacccctcaactactattgggtccccatcctcacagtcatcgttggcagctacctaatagcgcatgggtttttctccgtctacggaatgtgcgttgatacactgttcctctgcttctgtgaggacctagagagaaacgacggatctcaggagcgaccatattttatgtcaccagaactgcgtgatatcctcttaaagggctccgcagaagaggggaagcggtag

SEQ ID NO: 276424 - DNA, 2121 bp, Artificial Sequence
  derived and/or modified sequence
atgggagatgagcggccccactactacggcaagcacggcaccccccagaagtatgaccccaccttcaagggccccatctacaacagaggctgcacagacatcatctgctgcgtgttcctgctgctggccatcgtgggctacgtggccgtgggcatcatcgcctggacccatggagaccccaggaaggtgatctaccccacagacagcagaggagagttctgtggccagaagggcaccaagaatgaaaacaagccctacctgttctacttcaacatcgtgaagtgtgccagccccctggtgctgctggagttccagtgccccaccccccagatctgtgtggagaagtgcccagaccgctacctgacctacctgaatgcccggagcagccgggactttgagtactacaagcagttctgtgtgcccggcttcaagaacaacaagggcgtggccgaggtgctgcaggatggagactgcccagctgtgctgatccccagcaagcccctggcccggcgctgcttccctgccatccacgcctacaagggcgtgctgatggtgggcaatgagaccacctatgaagatggccacggcagcaggaagaacatcacagacctggtggagggcgccaagaaggccaacggggtgctggaggcccggcagctggccatgaggatctttgaggactacacagtgtcctggtactggatcatcatcggcctggtgattgccatggccatgagcctgctcttcatcatcctgctgcgcttcctggccggcatcatggtgtgggtgatgatcatcatggtgatcctggtgctgggctacggcatcttccactgctacatggagtacagccggctgcggggggaggccggcagtgatgtgtccctggtggacctgggcttccagacagacttccgggtgtacctgcacctgcggcagacctggctggccttcatgatcatcctgagcatcctggaggtgatcatcatcctgctgctgatcttcctgaggaagaggatcctgattgccatcgccctgatcaaggaggccagcagagctgtgggctacgtgatgtgcagcctgctgtaccccctggtgaccttcttcctgctgtgcctgtgcatcgcctactgggccagcacagctgtgttcctgagcaccagcaatgaagctgtgtacaagatctttgatgacagcccctgccccttcaccgccaagacctgcaaccctgagaccttccccagcagcaatgaaagccggcagtgccccaatgcccgctgccagtttgccttctacggcggggagagcggctaccaccgggccctgctgggcctgcagatcttcaatgccttcatgttcttctggctggccaactttgtgctggccctgggccaggtgaccctggccggggcctttgccagctactactgggccctgaggaagccagatgacctgcctgccttccccctcttcagcgccttcggccgggccctgcgctaccacacaggcagcctggcctttggagccctgatcctggccatcgtgcagatcatccgggtcatcctggagtacctggaccagaggctgaaggctgctgagaacaagtttgccaagtgcctgatgacctgcctgaagtgctgcttctggtgcctggagaagttcatcaagttcctgaacagaaatgcctacatcatgattgccatctacggcaccaacttctgcaccagcgccagaaatgccttcttcctgctgatgaggaacatcatccgggtggccgtgctggacaaggtgacagacttcctgttcctgctgggcaagctgctgattgtgggctctgtgggcatcctggccttcttcttcttcacccaccgcatcagaattgtgcaggacacagccccacccctgaactactactgggtgcccatcctgaccgtcatcgtgggcagctacctgattgcccacggcttcttctctgtgtatggcatgtgtgtggacaccctcttcctgtgcttctgtgaggacctggagagaaatgatggcagccaggagcggccctacttcatgagccctgagctgcgggacatcctgctgaagggcagcgctgaggagggcaagaggtag

SEQ ID NO: 276425 - DNA, 2121 bp, Artificial Sequence
  derived and/or modified sequence
atgggcgacgagcggccccactactacggcaagcacggcaccccccagaagtacgaccctacattcaagggtccaatttacaatcggggttgcaccgacatcatttgttgcgtgtttctcctcttagcgatcgtgggctatgtagctgtgggtataatcgcttggacccacggcgaccctcgaaaggtgatctaccctacagactctcgaggcgaattctgtggccagaagggaacgaagaatgaaaacaaaccttatctattttactttaacatagtcaagtgcgcttcccccctggtccttttagaattccagtgccctacaccacagatctgcgtagaaaaatgtcctgatcggtacctgacatatctcaatgccagaagcagtcgggacttcgaatactataaacagttctgcgttccggggtttaagaataacaaaggagtggcagaagtgctgcaggacggggactgccccgccgtattaattcccagcaagcccctggcccgaagatgttttcctgccattcacgcctacaagggtgtgctgatggtcgggaatgagactacatacgaagacggacacgggtccaggaaaaatattaccgacttagtggagggcgctaagaaagccaacggagtgctggaggctcgccaactcgctatgagaatttttgaggactacacggtctcgtggtattggatcattattggcctggtgattgcaatggccatgtctctgctgtttatcatactcttaagatttctggccggaataatggtctgggttatgattatcatggtgattcttgtgctgggatatggcatctttcattgttacatggaatattctcgtctgagaggggaagccggaagcgacgtaagcctggtcgatctgggcttccagacggactttcgcgtctacctgcaccttcggcagacctggctggccttcatgatcatcctatcaattctggaagtcatcatcatccttctgctcatttttctccggaagagaatactgatcgccattgcactcataaaggaagcgagcagagctgtgggatacgtgatgtgtagtctgctataccccctggtaacctttttcctcctgtgcctctgcatcgcctattgggctagcactgctgtgtttctgagtacgagcaacgaagccgtctacaagatatttgatgatagcccttgcccatttaccgcgaagacctgtaatccggagacctttccatcctccaatgagtctaggcagtgcccgaacgcgcgctgccaatttgcattctatggaggagagtctggataccacagagctctgttagggctgcaaatctttaacgccttcatgttcttctggctggctaatttcgtcctggccctcgggcaggtgactctggcaggggccttcgccagttattactgggctctcaggaaaccagacgatctgcccgcctttccactattctccgcctttggcagggcattacgctaccatacgggttctctggctttcggagcactgattttggccatcgtacagatcattagagtgattttggagtacctggaccagcgccttaaagcggccgagaacaagttcgccaagtgtctgatgacctgcctgaagtgttgtttctggtgcctggagaaatttattaagttcctcaacagaaacgcctatatcatgatcgctatctacgggaccaatttttgcacctctgcaaggaatgccttcttcctccttatgcgcaacatcatcagggtggcagtcctagacaaagtcacagattttctgtttctcttgggcaagttgctaatagtcggatcggtcggcatcctcgccttttttttttttacacatcgtatcaggattgtgcaagataccgcacctccactgaattattactgggtgcccattctcaccgtgatagtcggcagctacttaattgcccatgggtttttttcagtgtacggcatgtgcgtcgatacactgttcctgtgcttttgcgaggatctggagcgaaacgacggatctcaggagcggccttatttcatgagcccagaacttcgggacatcttattgaaaggcagcgccgaagagggcaagcggtag

SEQ ID NO: 276426 - DNA, 2121 bp, Artificial Sequence
  derived and/or modified sequence
atgggggatgaaagaccccactactacggaaaacacggaacccctcagaaatatgaccccaccttcaaaggcccaatctacaatagaggctgtaccgacataatatgctgcgttttcttgttgttggccattgtcggttacgtcgcagtgggcatcattgcttggacacacggggacccacgcaaggtgatctatcccaccgacagtaggggggagttctgtgggcagaaaggcacaaaaaatgaaaacaagccctacctgttttattttaatatcgtcaaatgcgcatctcccctcgttctgctggagtttcagtgccccacaccccagatttgcgtcgagaaatgtcccgacagatatctgacatacctaaacgcacggagttctcgagactttgagtactataagcagttctgcgtgccaggcttcaagaacaataagggtgtggccgaggtattgcaggacggagactgccccgctgtgctgatcccatcaaaaccattggccagaagatgcttccctgctattcatgcttataaaggggttctgatggtgggcaatgaaacaacctatgaagatgggcatggtagcagaaaaaacatcactgatctggtagagggcgctaagaaagctaacggcgtcttggaagcgcgacagctagcaatgagaatatttgaggattataccgtaagctggtattggattataattggtctggtgattgccatggccatgtcccttctcttcataatccttctaagatttctcgcaggaattatggtctgggttatgattattatggtgattctggttctgggttatggcatttttcactgttatatggaatatagcaggctgcggggtgaagcaggctctgacgtatcattggtggatctgggcttccaaacggacttcagggtgtacttgcacttacggcagacctggctggcatttatgattatcctgagtatcttagaagtgattatcatactgttactgatcttcctacggaaaaggattctgatcgcgattgcgttaatcaaagaggctagccgggcagttggttacgtaatgtgctcactgctgtacccccttgtcacgtttttcttgctgtgcctgtgtattgcttactgggctagtaccgccgttttcctgtccacaagtaacgaggctgtgtacaaaatttttgacgattcgccgtgcccatttactgctaaaacttgcaaccccgagacatttccgagttcaaatgagagccgacagtgcccaaacgccaggtgccagtttgctttttatgggggagagtcaggataccaccgcgctcttttagggcttcagatcttcaatgccttcatgtttttttggttggctaatttcgtgcttgccctgggccaggtaaccttagccggagctttcgcctcgtattactgggccttgcgcaagcccgatgatcttcctgcctttccactgttctccgcttttggtcgggcactaaggtatcataccggaagtctggcattcggagctctcattctagcaatcgtgcaaatcattcgggttatcttagaatacctggaccagagacttaaggcagccgagaacaaattcgccaaatgtttaatgacatgtctgaaatgttgtttctggtgtttggagaagttcattaagttcctgaatcgaaacgcatatattatgattgctatttacggcacgaatttctgtacctctgccaggaacgctttttttttgctgatgcgtaacattattagagttgccgtgctggacaaggtcactgactttctgtttttgcttggtaagttgctgatcgtcggaagtgttggtattctggcatttttttttttcacccacaggatcagaatcgtgcaggatacagccccacccctaaactactattgggtgcccattttaacagtgatcgtcggcagctatcttatagcacatggtttcttctccgtatatgggatgtgcgtggacactctttttctctgcttctgtgaagaccttgagcgcaacgacgggtctcaggagagaccatatttcatgtcccctgagttacgggacatccttcttaagggaagcgctgaggagggtaagcgttag

SEQ ID NO: 276427 - DNA, 2199 bp, Artificial Sequence
  derived and/or modified sequence
agtgcctccctccagactcgggagggtcgagggggcgcgggagagagcgcgggcggccgccggggctggtcgcctgcagggatgggggacgagcggccccactactacgggaaacacggaacgccacagaagtatgatcccactttcaaaggacccatttacaataggggctgcacggatatcatatgctgtgtgttcctgctcctggccattgtgggctacgtggctgtaggcatcatagcctggactcatggagaccctcgaaaggtgatctaccccactgacagccggggcgagttctgcgggcagaagggcacaaaaaacgagaacaaaccctatctgttttatttcaacattgtgaaatgtgccagccccctggttctgctggaattccaatgtcccactccccagatctgcgtggaaaaatgccccgaccgctacctcacgtacctgaatgctcgcagctcccgggactttgagtactataagcagttctgtgttcctggcttcaagaacaataaaggagtggctgaggtgcttcaagatggtgactgccctgctgtcctcatccccagcaaacccttggcccggagatgcttccccgctatccacgcctacaagggtgtcctgatggtgggcaatgagacgacctatgaggatgggcatggctcccggaaaaacatcacagacctggtggagggcgccaagaaagccaatggagtcctagaggcgcggcaactcgccatgcgcatatttgaagattacaccgtctcttggtactggattatcataggcctggtcattgccatggcgatgagcctcctgttcatcatcctgcttcgcttcctggctggtattatggtctgggtgatgatcatcatggtgattctggtgctgggctacggaatatttcactgctacatggagtactcccgactgcgtggtgaggccggctctgatgtctctttggtggacctcggctttcagacggatttccgggtgtacctgcacttacggcagacctggttggcctttatgatcattctgagtatccttgaagtcattatcatcttgctgctcatctttctccggaagagaattctcatcgcgattgcactcatcaaagaagccagcagggctgtgggatacgtcatgtgctccttgctctacccactggtcaccttcttcttgctgtgcctctgcatcgcctactgggccagcactgctgtcttcctgtccacttccaacgaagcggtctataagatctttgatgacagcccctgcccatttactgcgaaaacctgcaacccagagaccttcccctcctccaatgagtcccgccaatgccccaatgcccgttgccagttcgccttctacggtggtgagtcgggctaccaccgggccctgctgggcctgcagatcttcaatgccttcatgttcttctggttggccaacttcgtgctggcgctgggccaggtcacgctggccggggcctttgcctcctactactgggccctgcgcaagccggacgacctgccggccttcccgctcttctctgcctttggccgggcgctcaggtaccacacaggctccctggcctttggcgcgctcatcctggccattgtgcagatcatccgtgtgatactcgagtacctggatcagcggctgaaagctgcagagaacaagtttgccaagtgcctcatgacctgtctcaaatgctgcttctggtgcctggagaagttcatcaaattccttaataggaatgcctacatcatgattgccatctacggcaccaatttctgcacctcggccaggaatgccttcttcctgctcatgagaaacatcatcagagtggctgtcctggataaagttactgacttcctcttcctgttgggcaaacttctgatcgttggtagtgtggggatcctggctttcttcttcttcacccaccgtatcaggatcgtgcaggatacagcaccacccctcaattattactgggttcctatactgacggtgatcgttggctcctacttgattgcacacggtttcttcagcgtctatggcatgtgtgtggacacgctgttcctctgcttctgtgaggacctggaaaggaatgacggctctcaggagcgaccctacttcatgtcgcccgagctgagagacatcctgttgaaggggagtgcggaggaggggaagcgg

SEQ ID NO: 276428 - protein, 1386 aa, Artificial Sequence [sequence omitted]

SEQ ID NO: 276429 - DNA, 4161 bp, Artificial Sequence
  derived and/or modified sequence
atgcgatgggtcgatggacataaaggggtgttctctgtagaactgaccgccgtgtcgagcgtgcacccccaagatccgtatttagacaagttctttacccttgtgcacgtccttgaggaaggcgccttccctttcagattaaaagacactgttctttctgaagggaatgtggaacaggagctgagggccagtctcgccgctctacgcctcgcctctccggagccattagttgctttttcccatcacgttctcgacaagcttgttcgtctggtgatccgtccccccatcattagtggacagatcgttaacctgggcagaggcgcatttgaagccatggcgcacgttgtttcactggttcaccgatctctggaagcagcgcaagacgcccgcgggcattgtccccagctggcggcatacgtgcattatgcatttaggctgccagggaccgaaccaagcctgccggacggtgccccacctgtgaccgtacaggcggcaaccctcgcccgcggtagcggacgccccgcctcgctctacttagcacggtccaagtctatcagtagcagcaaccccgacttggctgtggcacccggttccgtggatgacgaagtcagcaggatcctggcatccaaaggcattgatcgttctcacagctgggtgaatagcgcctatgcccccgggggatctaaagcagttctgcggagggcccctccttactgtggagcggacccacgccaactcttgcatgaagagcttgcccttcagtgggtggtgagtagcagcgccgtaagggaggccatcttgcaacatgcgtggttcttctttcagctaatggtgaagtccatggcactgcatctacttctcggacagagactggatacacctcgaaagctcagattcccgggccgctttctggacgatataacagctttagttggttctgttggcctggaggttatcaccagggtgcacaaggacgtggaactggccgaacatctcaacgcctccctagccttctttctatctgaccttctgagcttagttgaccggggattcgttttttcactggttcgagctcactacaagcaggtagctacacgactccagtcctccccaaacccagccgcactccttaccctccggatggaatttactaggattctttgcagccatgaacattacgttactctgaatctgccttgctgccctttaagccccccagccagccccagtcctagcgtcagctcgacgacgagccaaagcagcactttctcttctcaggcccccgatccgaaggtcacctctatgtttgagctgtccggacccttcaggcagcaacatttcctggctggcctgctgttgacggagctggctttggccctggagcctgaggcagagggggcgtttctcctgcataagaaggccattagcgccgtgcactcactgctctgtggtcatgacaccgatcctcgctacgcggaagccacagtcaaggctcgcgtggccgagctgtacctcccgctgctctctatcgcccgggacaccctgccacgccttcacgattttgctgagggaccaggccaacggtccaggttggcctctatgctagacagtgatacggaaggtgaaggtgatatcgccggcactatcaacccctccgtggccatggccatcgctggtggaccattggcaccaggctcaagagcgtcaatttctcagggccccccaaccgccagccgggccggttgtgccctcagcgcggagagctctagaacactgcttgcttgtgtcctgtgggtgttgaaaaataccgaaccagcattgctccagcgctgggccactgatttgaccctgcctcagctgggacggttacttgatctcctgtacctttgtctcgctgcattcgagtataaagggaaaaaggcctttgagcgtatcaactcactgaccttcaagaaaagcctagacatgaaagccagattggaagaagctattctcggcacgattggggcccgtcaagaaatggtgcgtaggtcacgagagcgttcccctttcggaaatcccgagaatgttcggtggcggaagtccgttacccactggaagcagacatccgatcgagtcgacaagacgaaagacgagatggaacacgaggcgctcgtggaggggaaccttgctaccgaggcctcactggttgtcctcgacacattggagattattgtccagacagtgatgctctccgaggcccgggagtccgtgctgggcgccgtcctgaaagttgttctgtatagtctcggcagtgcccaatccgcgttgtttctccagcatgggctcgctacccagagagcactggtatccaagttccccgaactcctctttgaggaggataccgaactatgcgctgatctctgtttacggttgcttagacattgcggttcaagaataagcactattcgcacgcatgctagtgcatctctgtaccttctgatgaggcagaattttgaaattggccacaattttgcacgagtaaaaatgcaagtcacaatgagcttaagtagccttgtgggtactacacagaatttctcggaggaacacttgaggaggtcactcaagacaatcttgacttacgctgaggaggacatgggcttgcgagacagtacttttgctgagcaagtccaggatctgatgtttaaccttcacatgatcctgaccgatactgtcaagatgaaagagcaccaggaggatcctgaaatgctgattgacctgatgtaccgaattgccaggggctatcaggggagccccgacctgcggctaacctggctccaaaatatggctgggaagcacgctgaattggggaatcacgccgaggctgcacaatgcatggtacacgccgccgccctggtcgccgagtatcttgccttattggaggaccatcggcacctgccagttggttgtgtgtctttccagaacatttcttctaatgttctagaggaaagtgcgatttcggacgatattctatcaccggatgaggaaggcttttgcagtgggaagcactttactgagctgggactggtgggattactggaacaggccgccggctactttaccatgggcggcctgtacgaggccgtgaatgaagtatataagaacctcatacctattctggaagcacatcgcgattataaaaagctagctgccgttcacggtaagctgcaagaggcctttacaaagatcatgcaccagagcagcggatgggaacgcgtgtttggaacctattttcgggttggcttctatggcgcccacttcggcgatttagatgaacaggagtttgtatataaggaacctagcataaccaagctcgcagagatatcccacagacttgaagaattttacacagagcgcttcggtgatgatgttgtggaaatcattaaggattctaaccctgttgataagtcgaagctggacagtcaaaaagcttacatacaaataacttatgtcgaaccgtacttcgacacttacgagctcaaagatagggttacatattttgacagaaactatggcctccggacatttttattctgtaccccttttacgccagacggtcgcgcccacggtgagctgccagagcagcacaagagaaagacactgctgtcaacagatcacgccttcccttatatcaagactcgcatacgcgtttgccacagagaggagaccgtgctgaccccggtggaagtagctatcgaggacatgcagaaaaaaacaagggagctggctttcgctacagagcaggacccccctgatgccaaaatgctgcaaatggtgctgcagggttcagtaggcccaactgtcaaccagggtcctctagaggttgcccaggtgtttctggctgagattccagaagatcccaaactgttcaggcaccataacaagctgcgcctttgcttcaaggacttctgcaagaagtgtgaggatgcactcagaaagaacaaggcactgatcgggcctgaccaaaaagagtaccaccgcgagctcgagcgcaactactgtagactgagagaggccctacagcctctgctaacccagcggctcccccaactgatggctcccaccccaccaggcctgagaaatagcttaaatcgtgcgagctttagaaaagcagacctctag

SEQ ID NO: 276430 - DNA, 4161 bp, Artificial Sequence
  derived and/or modified sequence
atgcgctgggtggatggccacaagggcgtcttctctgtggagctgacagctgtgtcctctgtgcacccccaggacccctacctggacaagttcttcaccctggtgcacgtgctggaggagggcgccttccccttccggctgaaggacacagtgctgtctgagggcaatgtggagcaggagctgcgggccagcctggccgccctgcggctggccagccctgagcccctggtggccttcagccaccacgtgctggacaagctggtgcggctggtgatccggccccccatcatcagcggccagatcgtgaacctgggccgcggggcctttgaggccatggcccacgtggtgtccctggtgcacaggagcctggaggccgcccaggatgcccggggccactgcccccagctggccgcctacgtgcactacgccttccggctgcctggaacagagcccagcctgcctgatggagcccctcctgtgacagtgcaggccgccaccctggcccggggcagcggccggcctgccagcctgtacctggcccggagcaagagcatcagcagcagcaacccagacctggccgtggcccctggctctgtggatgatgaggtgagccgcatcctggccagcaagggcatcgacaggagccacagctgggtgaacagcgcctatgcccctgggggcagcaaggctgtgctgcggcgggccccaccctactgtggggctgacccccggcagctgctgcacgaggagctggccctgcagtgggtggtgagcagcagcgctgtgcgggaggccatcctgcagcacgcctggttcttcttccagctgatggtgaagtccatggccctgcacctgctgctgggccagaggctggacacccccaggaagctgcgcttccctggccgcttcctggatgacatcacagccctggtgggctctgtgggcctggaggtgatcaccagggtgcacaaggatgtggagctggccgagcacctgaatgccagcctggccttcttcctgagtgacctgctgagcctggtggaccggggctttgtgttcagcctggtgcgggcccactacaagcaggtggccacccggctgcagagcagccccaacccagctgccctgctgaccctgaggatggagttcacccgcatcctgtgcagccatgagcactacgtgaccctgaacctgccctgctgccccctgagccccccagccagccccagccccagcgtgagcagcaccaccagccagagcagcaccttcagcagccaggccccagaccccaaggtgacctccatgtttgagctgagcggccccttccggcagcagcacttcctggccggcctgctgctgacagagctggccctggccctggagcctgaggccgagggcgccttcctgctgcacaagaaggccatctctgctgtgcacagcctgctgtgtggccatgacacagaccccaggtatgcagaggccaccgtgaaggcccgggtggccgagctgtacctgcccctgctgagcatcgcccgggacaccctgccccggctgcatgactttgctgagggccctggccagaggagccggctggcctccatgctggacagcgacacagaaggagagggggacattgctggcaccatcaaccccagcgtggccatggccatcgccggcggccccctggcccctggcagccgggccagcatcagccagggccccccaacagccagccgggccggctgtgccctgtctgctgagagcagcaggaccctgctggcctgtgtgctgtgggtgctgaagaacacagagcccgccctgctgcagcgctgggccacagacctgaccctgccccagctgggccgcctgctggacctgctgtacctgtgcctggccgcctttgagtacaagggcaagaaggcctttgagcgcatcaacagcctgaccttcaagaagagcctggacatgaaggcccggctggaggaggccatcctgggcaccatcggggcccggcaggagatggtgcggcgcagccgggagaggagccccttcggcaacccagaaaatgtgcgctggaggaagtctgtgacccactggaagcagaccagtgacagagtggacaagaccaaggatgagatggagcacgaggccctggtggagggcaacctggccacagaggccagcctggtggtgctggacaccctggagatcatcgtgcagacagtgatgctgtctgaggcccgggagagcgtgctgggcgctgtgctgaaggtggtgctgtacagcctgggcagcgcccagagcgccctcttcctgcagcacggcctggccacccagagggccctggtgtccaagtttcctgagctgctgtttgaggaggacacagagctgtgtgccgacctgtgcctgcggctgctgcggcactgcggcagccgcatcagcaccatccgcacccacgccagcgccagcctgtacctgctgatgaggcagaactttgagatcggccacaactttgcccgggtgaagatgcaggtgaccatgagcctgagcagcctggtgggcaccacccagaacttcagcgaggagcacctgcggcgcagcctgaagaccatcctgacctatgcagaggaggacatgggcctgcgggacagcacctttgctgagcaggtgcaggacctgatgttcaacctgcacatgatcctgacagacacagtgaagatgaaggagcaccaggaggaccctgagatgctgattgacctgatgtaccgcatcgcccggggctaccagggcagcccagacctgcggctgacctggctgcagaacatggccggcaagcatgctgagctgggcaaccacgccgaggccgcccagtgcatggtgcacgccgccgccctggtggccgagtacctggccctgctggaggaccaccgccacctgcctgtgggctgtgtgtccttccagaacatcagcagcaatgtgctggaggagagcgccatcagtgatgacatcctgagcccagatgaggagggcttctgcagcggcaagcacttcacagagctgggcctggtgggcctgctggagcaggccgccggctacttcaccatgggcggcctgtatgaagctgtgaatgaggtgtacaagaacctgatccccatcctggaggcccaccgggactacaagaagctggccgctgtgcacggcaagctgcaggaggccttcaccaagatcatgcaccagagcagcggctgggagcgggtgtttggcacctacttccgggtgggcttctacggggcccactttggagacctggatgagcaggagtttgtgtacaaggagcccagcatcaccaagctggccgagatcagccaccggctggaggagttctacacagaaagatttggagatgatgtggtggagatcatcaaggacagcaaccctgtggacaagagcaagctggacagccagaaggcctacatccagatcacctacgtggagccctactttgacacctatgagctgaaggacagagtgacctactttgacaggaactacggcctgcggaccttcctgttctgcacccccttcaccccagatggccgggcccacggggagctgcctgagcagcacaagaggaagaccctgctgagcacagaccacgccttcccctacatcaagacccgcatccgggtgtgccaccgggaggagaccgtgctgacccctgtggaggtggccatcgaggacatgcagaagaagacccgggagctggcctttgccacagagcaggaccccccagatgccaagatgctgcagatggtgctgcagggctctgtgggccccaccgtgaaccagggccccctggaggtggcccaggtgttcctggccgagatccctgaggaccccaagctgttccgccaccacaacaagctgcggctgtgcttcaaggacttctgcaagaagtgtgaagatgccctgaggaagaacaaggccctgattggaccagaccagaaggagtaccaccgggagctggagaggaactactgccgcctgcgggaggccctgcagcccctgctgacccagaggctgccccagctgatggcccccaccccacctggcctgaggaacagcctgaacagagccagcttcaggaaggctgacctgtag

SEQ ID NO: 276431 - DNA, 4161 bp, Artificial Sequence
  derived and/or modified sequence
atgcggtgggtggacggccacaagggcgtgttcagcgtggagctgacggcggtgtcctctgtgcatccccaggatccatacttggataaattctttaccctcgtgcatgttctcgaggaaggcgcctttccttttcgcttaaaagacacagtcttaagcgagggaaatgtggagcaggaactccgcgcgagtctggcagcactgcggctggcctcgcctgagccgctggtggcattttcccatcacgtgctggataagttggtccgtttggtgattcgcccacccattatctccgggcagattgtgaacctcgggcggggtgctttcgaggctatggcccacgtggtgagccttgtccatcgctcactcgaggcggcccaggatgccagaggacattgccctcagctggccgcttacgtgcactatgctttcagacttcccggcaccgagcccagcctgccagatggagccccccctgtgacggttcaggctgccactcttgcccgcggcagcgggcgccccgctagcttatatttagcccgcagcaaatccatttcctcctctaatccggatcttgcagtggccccaggcagcgtggacgacgaagttagcagaatattagctagcaaaggcattgataggtcccattcgtgggtcaactctgcttacgcgcctggtggcagtaaggccgtcctgcgtcgcgcccccccttattgtggagctgacccacgccagcttttacacgaggaattagccttgcagtgggtcgtcagctcttccgctgtcagggaagccatcctgcagcacgcatggttcttctttcagctgatggttaaatcgatggccttgcacctgctccttggacagagactggacacccccagaaagctcaggtttcccggcagatttctcgacgatatcaccgcccttgttggctccgtcggcctagaagtgattacgagggtccacaaagacgttgaactggccgagcacttaaatgctagtttggcattttttcttagcgacctgctgtccctggtagaccggggcttcgttttcagcctggtcagggcccattataagcaagtagcaactagactccaatcttcccctaacccagcagcgctcttgacgctgagaatggagttcacacgtatcttatgctcccatgagcactatgttacactgaatctaccgtgctgccccttatctccccctgctagtcccagtccctcagtgagcagtaccacttcacaaagttctacattttcttcccaagcaccagacccaaaggtaacatcaatgtttgagctctcaggccccttccgacaacagcatttcctcgccgggctcctacttacggaattggcgcttgctctagagcccgaggcagagggtgcatttctcctccacaaaaaggcaatcagtgccgtccacagcctcctgtgcgggcatgacaccgacccgcggtacgccgaagccaccgtcaaagccagagtcgccgaactatatctgccactgttgtcaatcgcacgggatacactgcctcggctacacgattttgctgagggtccaggtcaacgctctcgcctcgccagtatgctggattcagataccgagggcgagggggatattgccggcacaattaatccctccgtcgccatggcgattgccggggggcccttggcccccgggagtagggcttccatatcccagggaccgcctaccgcctctagagcaggctgtgccctgtcagccgaaagcagccgtacccttttggcctgcgtgctgtgggtgctgaaaaataccgaacccgcgctacttcagagatgggccaccgatttgacgctgccccagctgggccgcctgttggacctactgtacttatgcctcgccgccttcgagtataaggggaaaaaagcattcgaaagaattaattccctgacttttaaaaagtcacttgacatgaaggcaaggctcgaggaggcaatactggggaccatcggagcacggcaagaaatggtgagaagaagtcgggaacgtagcccatttgggaatcccgagaacgtgaggtggcgcaagagtgtcacacactggaagcagaccagcgatcgtgtggacaaaacaaaagatgagatggaacacgaagcactcgtcgagggaaacctggccaccgaagcctctttagtcgtgctggacaccctggagatcatagtacagacagtaatgctatcagaggcccgtgagagtgtgttgggcgctgtgcttaaggtggtgctctatagcctgggcagcgcccagtccgccctgtttcttcagcacggcctggctacccagagggcgctggttagcaaattccccgaactcctgtttgaggaagacaccgagctatgtgctgacctgtgcttgcgcctgctccggcattgcggctctcggatatccacaattcggacacatgctagcgcctccctctaccttctcatgagacaaaactttgaaatcggccataacttcgcacgagtgaagatgcaagtcactatgagtcttagttccttggttgggaccacccagaacttttctgaggagcacttaaggcggagcctgaaaaccatccttacctacgccgaggaagacatgggtttacgtgactctaccttcgcagaacaggtgcaggacctgatgtttaacctgcacatgattctgaccgacacggtgaagatgaaggaacaccaggaggatcccgaaatgctgatcgacctaatgtacaggattgctcgcgggtaccaggggtctccagacctccggctgacatggctgcaaaatatggcaggtaaacacgctgaactgggcaaccatgccgaagcagcccagtgcatggtacatgccgctgcgctggtcgctgagtacttggccctactcgaggaccatcggcacctgcctgtcgggtgtgtgtcatttcagaatatatcatccaacgtcctcgaggagtctgcaattagcgacgatatattgtcgcccgatgaagaagggttctgttccggaaagcatttcacagagttgggcctggttggattgctggagcaagcggccggctactttaccatgggtggcctgtacgaagcagtgaatgaggtatataagaatttgattcccattttggaagcacacagggattacaaaaaactggccgcagtgcacggaaaactgcaggaggctttcacaaagatcatgcaccagtcgtcgggatgggaacgggtgttcggcacctactttagagtaggcttttatggcgctcatttcggagacctggatgaacaggaatttgtatacaaagagcccagcatcaccaagctcgcggaaatcagccacagactggaagagttctataccgagcgctttggagacgacgtcgttgagattatcaaggattcaaatccggtggacaagtccaaattggactcacagaaggcatatatccaaataacctatgtggagccatactttgacacctacgaactgaaggatagagtaacgtacttcgatcggaattatggccttcgcaccttcctcttttgtaccccattcacacctgatggccgtgcccatggggaacttcctgagcaacataagcgaaagaccctcctgtccacggaccatgccttcccatacatcaagacccgaatacgcgtctgccatcgggaagaaaccgtgcttacacctgtcgaggtggccatagaggacatgcaaaagaagacacgggaactagcatttgccaccgaacaagatcctccggacgccaagatgctccagatggtcctacagggctccgtgggccctaccgtgaaccaaggcccccttgaggttgcccaggtgtttttggctgagatcccagaagatcccaagctctttcgtcaccacaataaacttaggctctgttttaaagatttctgcaagaaatgtgaggatgcccttcgtaagaataaagctctgatcggccctgatcaaaaagaataccacagagaactggaaagaaactattgcagactgagggaagcacttcaaccactcctcacacagagattaccacagttgatggccccaaccccccccggtttaaggaatagcctgaaccgggcgtcatttaggaaggctgacctttag

SEQ ID NO: 276432 - DNA, 4161 bp, Artificial Sequence
  derived and/or modified sequence
atgcgctgggttgatgggcacaaaggggtcttttcagttgagctgaccgctgttagctccgtccacccacaagatccatacctagataaattttttacgcttgtgcatgttctggaggagggggcattcccatttcgattgaaggacacagtgttgagcgagggaaatgttgaacaggagctccgagcatcgctagcggcacttcggctcgcaagccccgagcccctcgtggctttcagccaccacgtgttggacaaattagtgagactggttatccggccacctatcatcagcgggcagatagtgaatctgggcaggggggcattcgaagctatggcccacgtcgtgtccctggtccaccgatctctggaggcggctcaggacgctaggggacactgcccgcaactggcggcatatgtgcattatgcctttagactgccagggaccgaaccctccctccccgacggcgcacctcccgttacggtgcaggccgcaaccctggcacgaggaagtgggcgacccgcttcactatacctcgctagaagcaagtcgattagcagctcaaatcccgacttagcagttgcccctggctcagttgatgatgaagtatcgaggatccttgcatccaagggaatagatagaagtcactcctgggtgaatagtgcctacgcccctgggggtagtaaggccgtgctgagaagggcaccaccttattgtggggcagacccaaggcagctccttcatgaggaactcgccctccaatgggtggtcagtagttctgctgtgcgggaagcgattcttcagcatgcatggtttttcttccagctaatggtgaaaagtatggcgctgcacctgctcctggggcaacggctagatactccaagaaagcttcgcttcccagggagattcctggacgacataacagccctggtcgggagtgtcggcctcgaggtgattactagagtccacaaggacgtcgaactcgccgaacatctgaacgcctcactggccttctttctgtcagacctcctgtcgttagtggacagaggctttgtgttctctctggttcgcgctcactataaacaggtggccaccaggctgcagagtagccccaaccccgctgcgctgttaaccctccgtatggagtttaccagaatcctttgcagtcacgagcactacgtcacccttaacctcccatgttgtcctctgtcaccacccgcttctccatcaccttcagtatctagcaccacttcacagtcctcgactttttcgagccaggcccctgatcctaaggtaacttcaatgtttgagctatctggcccttttcgtcagcagcatttcctggctggtctgctgctgaccgagctcgctctggcattagagcccgaagccgaaggggcatttcttcttcataaaaaagcgatttctgccgtgcatagcctgctgtgtgggcacgataccgatcccaggtatgcagaagcaactgtgaaagccagggtagcagagctatacctccctctgctgtccattgctcgagacacattgcccagactgcacgattttgccgagggtcctggccagaggagccggctagccagcatgttagactctgacaccgagggagaaggagatattgcagggacaattaatccatcagtcgccatggcgatagctggcggaccactcgctcctgggtccagggcctccatctcccaggggccacctaccgcctcccgagccggatgcgctctgtccgccgaaagctcccgaaccctgctggcttgtgtgctttgggtcttgaaaaacaccgaacccgctctgttgcaaagatgggctaccgacctgacgctccctcagctaggtcgactgctcgaccttctgtacttatgcctggcggcttttgaatataaggggaagaaagcgttcgagagaattaattcgctgactttcaaaaagtccctcgacatgaaggctcgcctggaggaagctatcctcggcacgatcggggcaagacaggagatggttaggcggagtagagaaagaagccctttcggcaacccagaaaatgtgcggtggcgaaaaagtgtgactcactggaaacaaacatcagacagagtggataagaccaaggacgaaatggaacacgaagctcttgtcgaaggaaatcttgccactgaagcaagcttggtggtccttgacaccctggagatcatcgtccagacagtcatgctgtctgaggctcgcgagagtgtcctgggcgcagtcttgaaggtggttttgtactccctgggaagtgctcaaagtgctctcttcctgcagcacgggctggctacccaacgagcactggtgagcaaatttcctgaacttctgttcgaagaagatactgagctgtgtgcagatctctgcctccgcctcctgcgacactgcggttccagaatctccaccatcagaacccatgcctcggcctctctgtatctcctgatgaggcagaatttcgagatcggtcataactttgccagggttaagatgcaagtcacaatgtctctgtcatcacttgtcggaacaactcagaactttagcgaagagcacttaagacgttcgctgaagacaatcctcacttacgctgaagaggacatgggacttagggattcgacatttgccgagcaagttcaggacctgatgttcaacctccatatgatccttactgacaccgtcaaaatgaaggaacatcaggaggaccctgagatgctgattgacctgatgtataggatagctcgtgggtaccaaggttctcctgatctcagactgacctggctgcagaacatggctgggaaacatgccgagctgggcaaccatgccgaagcagcccagtgtatggtgcacgcagctgccctggtggccgaatacctggctctgttggaggaccacaggcacctccccgtgggctgtgtgtcatttcagaacataagcagcaatgtgctggaagaatcagccatttccgacgatatcttatctcctgatgaggaaggcttctgttctggaaagcatttcacagagttaggcctggtcggcttgcttgaacaggccgcaggatacttcacaatgggcggactctacgaagccgtgaacgaggtgtacaaaaacctgattcctatactcgaggcacatagggattacaaaaagcttgccgcagtgcacggtaagcttcaagaggcttttacgaaaattatgcatcagagtagcggctgggagagagtcttcggaacttatttccgggtagggttttatggagcacatttcggcgacctagacgaacaggaatttgtctataaggagcccagtattactaagttggccgaaatctcccataggttggaagagttctacacagaacggtttggtgacgacgtggtggagatcatcaaagactccaacccggtcgataagagcaaactcgactcccagaaggcctacattcagataacatatgtagagccttacttcgacacctacgagctcaaagaccgagtcacctacttcgatagaaattacggcctccgaacctttctgttctgcaccccttttactcctgacggccgagcccatggggagctgccggagcagcacaagaggaaaacactgctgtcaaccgaccatgctttcccttacatcaagactagaattagagtgtgccaccgcgaagaaacagtgttgaccccagtggaagtcgctatcgaagatatgcagaagaagacccgtgagttggcttttgccactgaacaggaccctcccgatgccaagatgctacagatggtgctccagggatctgtcggcccaactgtgaaccagggacctctggaggtcgcacaggttttcctggctgagatacctgaggatcccaagttgtttcgacatcacaataagttacgactgtgctttaaggacttctgtaaaaaatgtgaagatgccctccgcaagaacaaggcgctcatcggtccagatcagaaagaatatcatcgagagctggaacggaactactgccggctccgcgaggccctgcagccacttctcacccagcggttgccgcaactgatggccccaacaccacctggtctgagaaattctttgaaccgggcttcatttcggaaagccgacttatag

SEQ ID NO: 276433 - DNA, 4161 bp, Artificial Sequence
  derived and/or modified sequence
atgagatgggtggacggccacaagggcgtgttcagcgtggagctgaccgccgtgagcagcgtgcacccccaggacccctacctggacaagttcttcaccctggtgcacgtgctggaggagggcgccttccccttcagactgaaggacaccgtgctgagcgagggcaacgtggagcaggagctgagagccagcctggccgccctgagactggccagccccgagcccctggtggccttcagccaccacgtgctggacaagctggtgagactggtgatcagaccccccatcatcagcggccagatcgtgaacctgggcagaggcgccttcgaggccatggcccacgtggtgagcctggtgcacagaagcctggaggccgcccaggacgccagaggccactgcccccagctggccgcctacgtgcactacgccttcagactgcccggcaccgagcccagcctgcccgacggcgccccccccgtgaccgtgcaggccgccaccctggccagaggcagcggcagacccgccagcctgtacctggccagaagcaagagcatcagcagcagcaaccccgacctggccgtggcccccggcagcgtggacgacgaggtgagcagaatcctggccagcaagggcatcgacagaagccacagctgggtgaacagcgcctacgcccccggcggcagcaaggccgtgctgagaagagcccccccctactgcggcgccgaccccagacagctgctgcacgaggagctggccctgcagtgggtggtgagcagcagcgccgtgagagaggccatcctgcagcacgcctggttcttcttccagctgatggtgaagagcatggccctgcacctgctgctgggccagagactggacacccccagaaagctgagattccccggcagattcctggacgacatcaccgccctggtgggcagcgtgggcctggaggtgatcaccagagtgcacaaggacgtggagctggccgagcacctgaacgccagcctggccttcttcctgagcgacctgctgagcctggtggacagaggcttcgtgttcagcctggtgagagcccactacaagcaggtggccaccagactgcagagcagccccaaccccgccgccctgctgaccctgagaatggagttcaccagaatcctgtgcagccacgagcactacgtgaccctgaacctgccctgctgccccctgagcccccccgccagccccagccccagcgtgagcagcaccaccagccagagcagcaccttcagcagccaggcccccgaccccaaggtgaccagcatgttcgagctgagcggccccttcagacagcagcacttcctggccggcctgctgctgaccgagctggccctggccctggagcccgaggccgagggcgccttcctgctgcacaagaaggccatcagcgccgtgcacagcctgctgtgcggccacgacaccgaccccagatacgccgaggccaccgtgaaggccagagtggccgagctgtacctgcccctgctgagcatcgccagagacaccctgcccagactgcacgacttcgccgagggccccggccagagaagcagactggccagcatgctggacagcgacaccgagggcgagggcgacatcgccggcaccatcaaccccagcgtggccatggccatcgccggcggccccctggcccccggcagcagagccagcatcagccagggcccccccaccgccagcagagccggctgcgccctgagcgccgagagcagcagaaccctgctggcctgcgtgctgtgggtgctgaagaacaccgagcccgccctgctgcagagatgggccaccgacctgaccctgccccagctgggcagactgctggacctgctgtacctgtgcctggccgccttcgagtacaagggcaagaaggccttcgagagaatcaacagcctgaccttcaagaagagcctggacatgaaggccagactggaggaggccatcctgggcaccatcggcgccagacaggagatggtgagaagaagcagagagagaagccccttcggcaaccccgagaacgtgagatggagaaagagcgtgacccactggaagcagaccagcgacagagtggacaagaccaaggacgagatggagcacgaggccctggtggagggcaacctggccaccgaggccagcctggtggtgctggacaccctggagatcatcgtgcagaccgtgatgctgagcgaggccagagagagcgtgctgggcgccgtgctgaaggtggtgctgtacagcctgggcagcgcccagagcgccctgttcctgcagcacggcctggccacccagagagccctggtgagcaagttccccgagctgctgttcgaggaggacaccgagctgtgcgccgacctgtgcctgagactgctgagacactgcggcagcagaatcagcaccatcagaacccacgccagcgccagcctgtacctgctgatgagacagaacttcgagatcggccacaacttcgccagagtgaagatgcaggtgaccatgagcctgagcagcctggtgggcaccacccagaacttcagcgaggagcacctgagaagaagcctgaagaccatcctgacctacgccgaggaggacatgggcctgagagacagcaccttcgccgagcaggtgcaggacctgatgttcaacctgcacatgatcctgaccgacaccgtgaagatgaaggagcaccaggaggaccccgagatgctgatcgacctgatgtacagaatcgccagaggctaccagggcagccccgacctgagactgacctggctgcagaacatggccggcaagcacgccgagctgggcaaccacgccgaggccgcccagtgcatggtgcacgccgccgccctggtggccgagtacctggccctgctggaggaccacagacacctgcccgtgggctgcgtgagcttccagaacatcagcagcaacgtgctggaggagagcgccatcagcgacgacatcctgagccccgacgaggagggcttctgcagcggcaagcacttcaccgagctgggcctggtgggcctgctggagcaggccgccggctacttcaccatgggcggcctgtacgaggccgtgaacgaggtgtacaagaacctgatccccatcctggaggcccacagagactacaagaagctggccgccgtgcacggcaagctgcaggaggccttcaccaagatcatgcaccagagcagcggctgggagagagtgttcggcacctacttcagagtgggcttctacggcgcccacttcggcgacctggacgagcaggagttcgtgtacaaggagcccagcatcaccaagctggccgagatcagccacagactggaggagttctacaccgagagattcggcgacgacgtggtggagatcatcaaggacagcaaccccgtggacaagagcaagctggacagccagaaggcctacatccagatcacctacgtggagccctacttcgacacctacgagctgaaggacagagtgacctacttcgacagaaactacggcctgagaaccttcctgttctgcacccccttcacccccgacggcagagcccacggcgagctgcccgagcagcacaagagaaagaccctgctgagcaccgaccacgccttcccctacatcaagaccagaatcagagtgtgccacagagaggagaccgtgctgacccccgtggaggtggccatcgaggacatgcagaagaagaccagagagctggccttcgccaccgagcaggacccccccgacgccaagatgctgcagatggtgctgcagggcagcgtgggccccaccgtgaaccagggccccctggaggtggcccaggtgttcctggccgagatccccgaggaccccaagctgttcagacaccacaacaagctgagactgtgcttcaaggacttctgcaagaagtgcgaggacgccctgagaaagaacaaggccctgatcggccccgaccagaaggagtaccacagagagctggagagaaactactgcagactgagagaggccctgcagcccctgctgacccagagactgccccagctgatggcccccaccccccccggcctgagaaacagcctgaacagagccagcttcagaaaggccgacctgtag

SEQ ID NO: 276434 - DNA, 4660 bp, Artificial Sequence
  derived and/or modified sequence
aatttacccgcgaggccttcacaccggtggtctaccataacaagtcccccgagttctacgaggagttcaagctgcatcttccagcctgcgtgacagagaaccatcacctgctgttcaccttctaccatgtcagctgccagccccggccgggcactgccctggagacacccgtgggctttacttggatcccactgctgcagcacgggcgcctgaggaccggccccttctgtctcccagtgtctgtggaccagccgccgcccagctattccgtgctcacacccgatgtggcgcttccgggcatgcgctgggtggacggtcacaagggcgtgttcagtgtggagctcacagccgtgtcctctgtgcacccccaggacccctacctggacaaattcttcaccctggtgcacgtcctggaggagggagccttcccattccggctcaaggacactgtgctgagcgagggcaacgtggagcaggagctgcgggccagtcttgcagcactgcgcctggccagccccgaaccccttgtggccttctcccaccacgtgctggacaagctcgtgcgtctggtcatcaggcccccgatcatcagtggccagattgtgaacctgggccgtggagcctttgaagcaatggcccatgtagtcagccttgttcaccggagcctggaggcagcccaggatgcccgcggtcactgcccacagctggctgcctacgtccactacgcctttcgccttcctggcactgagcccagcctcccggatggggcccctccagtgacagtgcaggctgccacactggcccgtggctctggtcgccccgcaagcctctacctggcgcgttccaagagcatcagcagcagcaaccctgacctcgccgtggcccctggctctgtggatgacgaggtttcccgcatcctggccagcaagggcatcgatcgctcacactcctgggtgaattccgcttatgctccaggaggcagtaaggctgtgctgcggcgggcgcccccttattgtggggccgaccccagacagctgcttcacgaggagctggctctgcagtgggtggtcagcagcagtgccgtacgcgaggccatcctccagcacgcctggttcttcttccagctcatggtgaagagtatggcgctgcacctgctgcttggccagcgactagacacaccccgcaagctgcgcttccccggacgcttcctggacgacatcactgccttggtgggctctgtgggcctggaggtcatcacccgtgtccacaaggatgtggagctggccgagcacctcaacgccagcctggctttcttcctcagtgaccttctgtccctggtggaccggggctttgtcttcagcctggtccgggcccactacaagcaggtggccacgcggctccagtcgtcccctaatccagcagccctgctgaccctgcgcatggaattcacccgcatcctgtgcagccacgagcactacgtgaccctcaacctcccctgctgccccctgtcacctccagcctcgccctccccctctgtgtcctccaccacctcccagagctccaccttctccagccaagccccggaccccaaggtgaccagcatgttcgaactgagtggaccattccggcagcagcacttcctagctgggctcctgctgacggagctggcactggccctcgaacctgaggctgaaggggcattcctgttgcacaagaaggccatcagtgctgtgcacagcctgctatgtggccatgacactgacccccgctacgccgaggccactgtgaaggctcgtgtggccgagctgtacctgccactgctatcgattgcacgggataccttgccacggctgcatgactttgctgagggcccaggtcagcggtcaagactggcctcaatgcttgactcagacacagaaggcgaaggggacattgcgggtaccatcaacccctctgtggccatggccattgctggtggccccctagcccctggctcccgggccagcatctcccaggggccaccaacggcttctcgcgcaggctgtgccctctctgctgagtcaagccggaccttgctggcgtgtgtgctgtgggtgctgaaaaacaccgagccggcgctcctgcagcgctgggccactgacctgacactcccccagctgggacgtctgttggatttgctgtacctttgcctagctgcctttgagtacaaggggaaaaaggcctttgaacgcatcaacagcctcacattcaaaaaatctctggatatgaaggcgcggctagaggaagccattctgggtaccatcggagctcgacaagaaatggttcggcgaagtcgtgagaggagcccgtttgggaatccggagaatgtgcgctggcggaagagcgtcacacactggaagcaaacctcagaccgcgtggacaagaccaaggatgaaatggaacacgaggccttggtggaagggaacctggcaaccgaggcaagcctagtggttctggacacactggagatcatcgtgcagacggtgatgctttcagaagcccgggagagcgtcttgggggcagtgctgaaggttgtgctgtacagcctgggcagtgcccagagtgccctcttcttgcagcatggcctggccacccagagggcccttgtgtccaagttcccggagctgctgttcgaggaggacacggagctgtgtgccgacctgtgcctgaggctcctacgacactgtggcagccgcatcagcaccatccgcacgcacgccagcgcctcgctgtacctgctcatgcgacagaacttcgagatcggccacaactttgcccgtgtgaagatgcaggtcaccatgtctctctcgtccctggtggggacgacgcagaacttcagtgaagagcacctgcgacgttcactcaaaaccatcctcacctatgctgaggaggacatggggctgcgggacagcaccttcgcagagcaggtccaggacctgatgttcaacctgcacatgatcctgacggacacggtgaagatgaaggaacaccaggaggaccctgagatgctcatcgacctcatgtacagaattgcccggggctaccagggctcaccggaccttcggctgacctggttgcagaacatggccgggaagcacgcggagctgggcaaccacgccgaggccgcccagtgcatggtgcacgcggccgccctcgtggctgagtacctcgccctgctcgaggaccaccgccacctgcccgtgggctgcgtttccttccagaacatctcatccaacgtgctagaggagtccgccatctccgacgacatcctgtcgcccgacgaggagggcttctgctccgggaagcacttcactgagctggggctggtagggttgctggaacaggcagccggctacttcaccatgggcgggctctacgaggcggtgaatgaggtctacaagaacctcatccccatcctggaagcccaccgtgactacaagaagctggccgcggtgcacggcaaactgcaggaggccttcaccaagatcatgcaccagagttccggctgggagcgcgtgttcgggacgtatttccgcgtgggcttctacggcgcccacttcggtgacctggatgagcaggagtttgtgtacaaggagccatcgatcacgaagctggcagagatctcacaccggctggaggagttctacacggagagatttggcgacgacgtcgttgagattatcaaagactctaaccctgtggacaagtccaagcttgactcacaaaaggcctacatccagatcacgtatgtggaaccgtactttgatacctacgagctcaaggaccgggtgacctactttgaccgcaactatgggcttcgcacattcctgttctgcacgccgttcacgccggatgggcgcgcacacggggagctgcccgagcaacacaagcgtaagacgctgctcagcaccgaccacgccttcccctacatcaagactcgcatccgtgtgtgccaccgggaggagacggtgctgacgccagtggaggtggccatcgaggacatgcagaagaagacacgggagctggcctttgccaccgagcaggacccaccagatgctaagatgctacagatggtgcttcagggctctgtagggcccaccgtgaaccagggtcccctggaggtggcccaggtgtttttagcagagatcccggaagaccccaagctcttccggcatcacaacaaattgcggctctgcttcaaggacttctgcaagaaatgtgaggatgcgctgcggaaaaataaggccctgattgggccggaccagaaggagtaccaccgtgagctggagcgcaactactgccgcctgcgggaggctctgcagcccctgcttacccagcgcctgccccagctgatggcacccaccccacccggcctcaggaactccttgaacagagcaagtttccgaaaggcagacctctgagcccacaaggaccaaagctgtacctagaggaaccagcacccgggcctcagctgtctgtgctgcgaggggagtctgccctggtgcccactgggctgtggggtgaccacactgtacttggggctgggccctctgcccctgtgtccccatctgtgtgcactgatgcttcctcccttttttaatttaaaatggtttttataagc

SEQ ID NO: 276435 - protein, 1681 aa, Artificial Sequence [sequence omitted]

SEQ ID NO: 276436 - protein, 1617 aa, Artificial Sequence
  derived and/or modified sequence
MSTPDPPLGGTPRPGPSPGPGPSPGAMLGPSPGPSPGSAHSMMGPSPGPPSAGHPIPTQGPGGYPQDNMHQMHKPMESMHEKGMSDDPRYNQMKGMGMRSGGHAGMGPPPSPMDQHSQGYPSPLGGSEHASSPVPASGPSSGPQMSSGPGGAPLDGADPQALGQQNRGPTPFNQNQLHQLRAQIMAYKMLARGQPLPDHLQMAVQGKRPMPGMQQQMPTLPPPSVSATGPGPGPGPGPGPGPGPAPPNYSRPHGMGGPNMPPPGPSGVPPGMPGQPPGGPPKPWPEGPMANAAAPTSTPQKLIPPQPTGRPSPAPPAVPPAASPVMPPQTQSPGQPAQPAPMVPLHQKQSRITPIQKPRGLDPVEILQEREYRLQARIAHRIQELENLPGSLAGDLRTKATIELKALRLLNFQRQLRQEVVVCMRRDTALETALNAKAYKRSKRQSLREARITEKLEKQQKIEQERKRRQKHQEYLNSILQHAKDFKEYHRSVTGKIQKLTKAVATYHANTEREQKKENERIEKERMRRLMAEDEEGYRKLIDQKKDKRLAYLLQQTDEYVANLTELVRQHKAAQVAKEKKKKKKKKKAENAEGQTPAIGPDGEPLDETSQMSDLPVKVIHVESGKILTGTDAPKAGQLEAWLEMNPGYEVAPRSDSEESGSEEEEEEEEEEQPQAAQPPTLPVEEKKKIPDPDSDDVSEVDARHIIENAKQDVDDEYGVSQALARGLQSYYAVAHAVTERVDKQSALMVNGVLKQYQIKGLEWLVSLYNNNLNGILADEMGLGKTIQTIALITYLMEHKRINGPFLIIVPLSTLSNWAYEFDKWAPSVVKVSYKGSPAARRAFVPQLRSGKFNVLLTTYEYIIKDKHILAKIRWKYMIVDEGHRMKNHHCKLTQVLNTHYVAPRRLLLTGTPLQNKLPELWALLNFLLPTIFKSCSTFEQWFNAPFAMTGEKVDLNEEETILIIRRLHKVLRPFLLRRLKKEVEAQLPEKVEYVIKCDMSALQRVLYRHMQAKGVLLTDGSEKDKKGKGGTKTLMNTIMQLRKICNHPYMFQHIEESFSEHLGFTGGIVQGLDLYRASGKFELLDRILPKLRATNHKVLLFCQMTSLMTIMEDYFAYRGFKYLRLDGTTKAEDRGMLLKTFNEPGSEYFIFLLSTRAGGLGLNLQSADTVIIFDSDWNPHQDLQAQDRAHRIGQQNEVRVLRLCTVNSVEEKILAAAKYKLNVDQKVIQAGMFDQKSSSHERRAFLQAILEHEEQDEEEDEVPDDETVNQMIARHEEEFDLFMRMDLDRRREEARNPKRKPRLMEEDELPSWIIKDDAEVERLTCEEEEEKMFGRGSRHRKEVDYSDSLTEKQWLKTLKAIEEGTLEEIEEEVRQKKSSRKRKRDSDAGSSTPTTSTRSRDKDDESKKQKKRGRPPAEKLSPNPPNLTKKMKKIVDAVIKYKDSSSGRQLSEVFIQLPSRKELPEYYELIRKPVDFKKIKERIRNHKYRSLNDLEKDVMLLCQNAQTFNLEGSLIYEDSIVLQSVFTSVRQKIEKEDDSEGEESEEEEEGEEEGSESESRSVKVKIKLGRKEKAQDRLKGGRRRPSRGSRAKPVVSDDDSEEEQEEDRSGSGSEED

SEQ ID NO: 276437 - DNA, 4854 bp, Artificial Sequence
  derived and/or modified sequence
atgagcacccccgacccccccctgggcggcacccccagacccggccccagccccggccccggccccagccccggcgccatgctgggccccagccccggccccagccccggcagcgcccacagcatgatgggccccagccccggcccccccagcgccggccaccccatccccacccagggccccggcggctacccccaggacaacatgcaccagatgcacaagcccatggagagcatgcacgagaagggcatgagcgacgaccccagatacaaccagatgaagggcatgggcatgagaagcggcggccacgccggcatgggccccccccccagccccatggaccagcacagccagggctaccccagccccctgggcggcagcgagcacgccagcagccccgtgcccgccagcggccccagcagcggcccccagatgagcagcggccccggcggcgcccccctggacggcgccgacccccaggccctgggccagcagaacagaggccccacccccttcaaccagaaccagctgcaccagctgagagcccagatcatggcctacaagatgctggccagaggccagcccctgcccgaccacctgcagatggccgtgcagggcaagagacccatgcccggcatgcagcagcagatgcccaccctgcccccccccagcgtgagcgccaccggccccggccccggccccggccccggccccggccccggccccggccccgccccccccaactacagcagaccccacggcatgggcggccccaacatgcccccccccggccccagcggcgtgccccccggcatgcccggccagccccccggcggcccccccaagccctggcccgagggccccatggccaacgccgccgcccccaccagcaccccccagaagctgatccccccccagcccaccggcagacccagccccgccccccccgccgtgccccccgccgccagccccgtgatgcccccccagacccagagccccggccagcccgcccagcccgcccccatggtgcccctgcaccagaagcagagcagaatcacccccatccagaagcccagaggcctggaccccgtggagatcctgcaggagagagagtacagactgcaggccagaatcgcccacagaatccaggagctggagaacctgcccggcagcctggccggcgacctgagaaccaaggccaccatcgagctgaaggccctgagactgctgaacttccagagacagctgagacaggaggtggtggtgtgcatgagaagagacaccgccctggagaccgccctgaacgccaaggcctacaagagaagcaagagacagagcctgagagaggccagaatcaccgagaagctggagaagcagcagaagatcgagcaggagagaaagagaagacagaagcaccaggagtacctgaacagcatcctgcagcacgccaaggacttcaaggagtaccacagaagcgtgaccggcaagatccagaagctgaccaaggccgtggccacctaccacgccaacaccgagagagagcagaagaaggagaacgagagaatcgagaaggagagaatgagaagactgatggccgaggacgaggagggctacagaaagctgatcgaccagaagaaggacaagagactggcctacctgctgcagcagaccgacgagtacgtggccaacctgaccgagctggtgagacagcacaaggccgcccaggtggccaaggagaagaagaagaagaagaagaagaagaaggccgagaacgccgagggccagacccccgccatcggccccgacggcgagcccctggacgagaccagccagatgagcgacctgcccgtgaaggtgatccacgtggagagcggcaagatcctgaccggcaccgacgcccccaaggccggccagctggaggcctggctggagatgaaccccggctacgaggtggcccccagaagcgacagcgaggagagcggcagcgaggaggaggaggaggaggaggaggaggagcagccccaggccgcccagccccccaccctgcccgtggaggagaagaagaagatccccgaccccgacagcgacgacgtgagcgaggtggacgccagacacatcatcgagaacgccaagcaggacgtggacgacgagtacggcgtgagccaggccctggccagaggcctgcagagctactacgccgtggcccacgccgtgaccgagagagtggacaagcagagcgccctgatggtgaacggcgtgctgaagcagtaccagatcaagggcctggagtggctggtgagcctgtacaacaacaacctgaacggcatcctggccgacgagatgggcctgggcaagaccatccagaccatcgccctgatcacctacctgatggagcacaagagaatcaacggccccttcctgatcatcgtgcccctgagcaccctgagcaactgggcctacgagttcgacaagtgggcccccagcgtggtgaaggtgagctacaagggcagccccgccgccagaagagccttcgtgccccagctgagaagcggcaagttcaacgtgctgctgaccacctacgagtacatcatcaaggacaagcacatcctggccaagatcagatggaagtacatgatcgtggacgagggccacagaatgaagaaccaccactgcaagctgacccaggtgctgaacacccactacgtggcccccagaagactgctgctgaccggcacccccctgcagaacaagctgcccgagctgtgggccctgctgaacttcctgctgcccaccatcttcaagagctgcagcaccttcgagcagtggttcaacgcccccttcgccatgaccggcgagaaggtggacctgaacgaggaggagaccatcctgatcatcagaagactgcacaaggtgctgagacccttcctgctgagaagactgaagaaggaggtggaggcccagctgcccgagaaggtggagtacgtgatcaagtgcgacatgagcgccctgcagagagtgctgtacagacacatgcaggccaagggcgtgctgctgaccgacggcagcgagaaggacaagaagggcaagggcggcaccaagaccctgatgaacaccatcatgcagctgagaaagatctgcaaccacccctacatgttccagcacatcgaggagagcttcagcgagcacctgggcttcaccggcggcatcgtgcagggcctggacctgtacagagccagcggcaagttcgagctgctggacagaatcctgcccaagctgagagccaccaaccacaaggtgctgctgttctgccagatgaccagcctgatgaccatcatggaggactacttcgcctacagaggcttcaagtacctgagactggacggcaccaccaaggccgaggacagaggcatgctgctgaagaccttcaacgagcccggcagcgagtacttcatcttcctgctgagcaccagagccggcggcctgggcctgaacctgcagagcgccgacaccgtgatcatcttcgacagcgactggaacccccaccaggacctgcaggcccaggacagagcccacagaatcggccagcagaacgaggtgagagtgctgagactgtgcaccgtgaacagcgtggaggagaagatcctggccgccgccaagtacaagctgaacgtggaccagaaggtgatccaggccggcatgttcgaccagaagagcagcagccacgagagaagagccttcctgcaggccatcctggagcacgaggagcaggacgaggaggaggacgaggtgcccgacgacgagaccgtgaaccagatgatcgccagacacgaggaggagttcgacctgttcatgagaatggacctggacagaagaagagaggaggccagaaaccccaagagaaagcccagactgatggaggaggacgagctgcccagctggatcatcaaggacgacgccgaggtggagagactgacctgcgaggaggaggaggagaagatgttcggcagaggcagcagacacagaaaggaggtggactacagcgacagcctgaccgagaagcagtggctgaagaccctgaaggccatcgaggagggcaccctggaggagatcgaggaggaggtgagacagaagaagagcagcagaaagagaaagagagacagcgacgccggcagcagcacccccaccaccagcaccagaagcagagacaaggacgacgagagcaagaagcagaagaagagaggcagaccccccgccgagaagctgagccccaacccccccaacctgaccaagaagatgaagaagatcgtggacgccgtgatcaagtacaaggacagcagcagcggcagacagctgagcgaggtgttcatccagctgcccagcagaaaggagctgcccgagtactacgagctgatcagaaagcccgtggacttcaagaagatcaaggagagaatcagaaaccacaagtacagaagcctgaacgacctggagaaggacgtgatgctgctgtgccagaacgcccagaccttcaacctggagggcagcctgatctacgaggacagcatcgtgctgcagagcgtgttcaccagcgtgagacagaagatcgagaaggaggacgacagcgagggcgaggagagcgaggaggaggaggagggcgaggaggagggcagcgagagcgagagcagaagcgtgaaggtgaagatcaagctgggcagaaaggagaaggcccaggacagactgaagggcggcagaagaagacccagcagaggcagcagagccaagcccgtggtgagcgacgacgacagcgaggaggagcaggaggaggacagaagcggcagcggcagcgaggaggactag

SEQ ID NO: 276438 - DNA, 5046 bp, Artificial Sequence
  derived and/or modified sequence
atgagcacccccgacccccccctgggcggcacccccagacccggccccagccccggccccggccccagccccggcgccatgctgggccccagccccggccccagccccggcagcgcccacagcatgatgggccccagccccggcccccccagcgccggccaccccatccccacccagggccccggcggctacccccaggacaacatgcaccagatgcacaagcccatggagagcatgcacgagaagggcatgagcgacgaccccagatacaaccagatgaagggcatgggcatgagaagcggcggccacgccggcatgggccccccccccagccccatggaccagcacagccagggctaccccagccccctgggcggcagcgagcacgccagcagccccgtgcccgccagcggccccagcagcggcccccagatgagcagcggccccggcggcgcccccctggacggcgccgacccccaggccctgggccagcagaacagaggccccacccccttcaaccagaaccagctgcaccagctgagagcccagatcatggcctacaagatgctggccagaggccagcccctgcccgaccacctgcagatggccgtgcagggcaagagacccatgcccggcatgcagcagcagatgcccaccctgcccccccccagcgtgagcgccaccggccccggccccggccccggccccggccccggccccggccccggccccgccccccccaactacagcagaccccacggcatgggcggccccaacatgcccccccccggccccagcggcgtgccccccggcatgcccggccagccccccggcggcccccccaagccctggcccgagggccccatggccaacgccgccgcccccaccagcaccccccagaagctgatccccccccagcccaccggcagacccagccccgccccccccgccgtgccccccgccgccagccccgtgatgcccccccagacccagagccccggccagcccgcccagcccgcccccatggtgcccctgcaccagaagcagagcagaatcacccccatccagaagcccagaggcctggaccccgtggagatcctgcaggagagagagtacagactgcaggccagaatcgcccacagaatccaggagctggagaacctgcccggcagcctggccggcgacctgagaaccaaggccaccatcgagctgaaggccctgagactgctgaacttccagagacagctgagacaggaggtggtggtgtgcatgagaagagacaccgccctggagaccgccctgaacgccaaggcctacaagagaagcaagagacagagcctgagagaggccagaatcaccgagaagctggagaagcagcagaagatcgagcaggagagaaagagaagacagaagcaccaggagtacctgaacagcatcctgcagcacgccaaggacttcaaggagtaccacagaagcgtgaccggcaagatccagaagctgaccaaggccgtggccacctaccacgccaacaccgagagagagcagaagaaggagaacgagagaatcgagaaggagagaatgagaagactgatgggccagagagagaagagcagaagaggcctgggcagccagagctgggccagaatcttcgccgacctgagcgaccaccagaacgactgcgtgaccagcgtgaccgagagcctggtgggccagatcctggccgcctgcagcggcgaggagggcgaggtggagtggaagggcagagacagagtgagaagactgagagccgaggacgaggagggctacagaaagctgatcgaccagaagaaggacaagagactggcctacctgctgcagcagaccgacgagtacgtggccaacctgaccgagctggtgagacagcacaaggccgcccaggtggccaaggagaagaagaagaagaagaagaagaagaaggccgagaacgccgagggccagacccccgccatcggccccgacggcgagcccctggacgagaccagccagatgagcgacctgcccgtgaaggtgatccacgtggagagcggcaagatcctgaccggcaccgacgcccccaaggccggccagctggaggcctggctggagatgaaccccggctacgaggtggcccccagaagcgacagcgaggagagcggcagcgaggaggaggaggaggaggaggaggaggagcagccccaggccgcccagccccccaccctgcccgtggaggagaagaagaagatccccgaccccgacagcgacgacgtgagcgaggtggacgccagacacatcatcgagaacgccaagcaggacgtggacgacgagtacggcgtgagccaggccctggccagaggcctgcagagctactacgccgtggcccacgccgtgaccgagagagtggacaagcagagcgccctgatggtgaacggcgtgctgaagcagtaccagatcaagggcctggagtggctggtgagcctgtacaacaacaacctgaacggcatcctggccgacgagatgggcctgggcaagaccatccagaccatcgccctgatcacctacctgatggagcacaagagaatcaacggccccttcctgatcatcgtgcccctgagcaccctgagcaactgggcctacgagttcgacaagtgggcccccagcgtggtgaaggtgagctacaagggcagccccgccgccagaagagccttcgtgccccagctgagaagcggcaagttcaacgtgctgctgaccacctacgagtacatcatcaaggacaagcacatcctggccaagatcagatggaagtacatgatcgtggacgagggccacagaatgaagaaccaccactgcaagctgacccaggtgctgaacacccactacgtggcccccagaagactgctgctgaccggcacccccctgcagaacaagctgcccgagctgtgggccctgctgaacttcctgctgcccaccatcttcaagagctgcagcaccttcgagcagtggttcaacgcccccttcgccatgaccggcgagaaggtggacctgaacgaggaggagaccatcctgatcatcagaagactgcacaaggtgctgagacccttcctgctgagaagactgaagaaggaggtggaggcccagctgcccgagaaggtggagtacgtgatcaagtgcgacatgagcgccctgcagagagtgctgtacagacacatgcaggccaagggcgtgctgctgaccgacggcagcgagaaggacaagaagggcaagggcggcaccaagaccctgatgaacaccatcatgcagctgagaaagatctgcaaccacccctacatgttccagcacatcgaggagagcttcagcgagcacctgggcttcaccggcggcatcgtgcagggcctggacctgtacagagccagcggcaagttcgagctgctggacagaatcctgcccaagctgagagccaccaaccacaaggtgctgctgttctgccagatgaccagcctgatgaccatcatggaggactacttcgcctacagaggcttcaagtacctgagactggacggcaccaccaaggccgaggacagaggcatgctgctgaagaccttcaacgagcccggcagcgagtacttcatcttcctgctgagcaccagagccggcggcctgggcctgaacctgcagagcgccgacaccgtgatcatcttcgacagcgactggaacccccaccaggacctgcaggcccaggacagagcccacagaatcggccagcagaacgaggtgagagtgctgagactgtgcaccgtgaacagcgtggaggagaagatcctggccgccgccaagtacaagctgaacgtggaccagaaggtgatccaggccggcatgttcgaccagaagagcagcagccacgagagaagagccttcctgcaggccatcctggagcacgaggagcaggacgaggaggaggacgaggtgcccgacgacgagaccgtgaaccagatgatcgccagacacgaggaggagttcgacctgttcatgagaatggacctggacagaagaagagaggaggccagaaaccccaagagaaagcccagactgatggaggaggacgagctgcccagctggatcatcaaggacgacgccgaggtggagagactgacctgcgaggaggaggaggagaagatgttcggcagaggcagcagacacagaaaggaggtggactacagcgacagcctgaccgagaagcagtggctgaagaccctgaaggccatcgaggagggcaccctggaggagatcgaggaggaggtgagacagaagaagagcagcagaaagagaaagagagacagcgacgccggcagcagcacccccaccaccagcaccagaagcagagacaaggacgacgagagcaagaagcagaagaagagaggcagaccccccgccgagaagctgagccccaacccccccaacctgaccaagaagatgaagaagatcgtggacgccgtgatcaagtacaaggacagcagcagcggcagacagctgagcgaggtgttcatccagctgcccagcagaaaggagctgcccgagtactacgagctgatcagaaagcccgtggacttcaagaagatcaaggagagaatcagaaaccacaagtacagaagcctgaacgacctggagaaggacgtgatgctgctgtgccagaacgcccagaccttcaacctggagggcagcctgatctacgaggacagcatcgtgctgcagagcgtgttcaccagcgtgagacagaagatcgagaaggaggacgacagcgagggcgaggagagcgaggaggaggaggagggcgaggaggagggcagcgagagcgagagcagaagcgtgaaggtgaagatcaagctgggcagaaaggagaaggcccaggacagactgaagggcggcagaagaagacccagcagaggcagcagagccaagcccgtggtgagcgacgacgacagcgaggaggagcaggaggaggacagaagcggcagcggcagcgaggaggactag

SEQ ID NO: 276439 - DNA, 4854 bp, Artificial Sequence
  derived and/or modified sequence
atgagtacccctgatccaccactgggtggtaccccccggcctggtcctagccccggcccgggcccaagccccggggccatgctgggtccctctcccgggcctagtcctgggtccgcacatagcatgatgggaccttctcctggaccaccatcagcaggccacccaattcctacccagggtcccggaggctatccccaggacaacatgcaccagatgcataagcctatggagagcatgcatgagaagggaatgagtgacgacccccgctataaccagatgaaggggatgggaatgaggagcggtgggcatgctggtatgggcccccctcccagtcccatggatcagcattcccagggatatcctagtcctctgggggggagcgagcacgcctcttctcctgtccctgcgagcggtccaagctctgggccccagatgagcagtggcccgggtggggccccgctggacggagcagacccccaggcactgggacagcagaatcgaggtccgacaccatttaatcaaaatcagctccaccagctcagggcccagatcatggcatacaaaatgcttgcccgtggccagccattgccggatcatctgcaaatggcagtgcaggggaagagacccatgcccggcatgcagcagcagatgccaacgcttcctccaccaagcgtaagtgccacaggccccgggcccgggcctgggccaggccccggtcctgggcctggtccggctcctcctaactactccagacctcatgggatgggggggccaaatatgccgcctcccggtcctagcggggttcctccaggtatgccaggacagcccccgggaggccccccgaaaccttggcccgaaggtccaatggcaaatgcagcggcccctactagcacccctcagaagcttatccctccacagccgacagggcgaccaagcccggccccccccgcagttcctccagctgcctccccggtgatgccaccacagacacagtcaccagggcagccggctcagcctgcacccatggtcccgcttcaccagaagcagagtagaataactccaatccaaaagccacggggccttgatcccgttgagatcctgcaggagagggagtaccgactccaggcgcggatcgcacatcggatccaggagctggagaatctaccaggtagtctcgcaggagacctgagaaccaaggccacaatagagcttaaggcccttagacttctgaacttccagcgtcaactgagacaagaggttgtggtgtgtatgagaagagacacggctcttgagaccgctttaaatgctaaggcctataaacggagtaagcgacaaagcttaagagaggctaggattaccgagaaactggaaaaacagcagaagatagagcaggaacggaagagacggcagaaacaccaggagtatcttaactctatattgcagcatgctaaggactttaaggagtaccaccggtctgtgaccggcaagatacagaaattaaccaaggccgttgccacttaccacgccaacaccgagcgtgaacagaagaaagagaatgaaagaatcgaaaaggagaggatgagacgacttatggctgaggatgaggaggggtacaggaagcttatagaccaaaaaaaggataagcgcctggcttacctgctccagcagactgacgagtacgtggcaaatctgaccgaattggttcggcagcacaaagctgcgcaggttgctaaagagaaaaaaaagaagaagaagaagaaaaaagctgaaaacgccgagggtcagacaccggcgatcggccctgatggcgaaccgctcgacgagacttcccaaatgtcagatctgcccgtgaaggttatacacgtagagagcggcaagatcctgacagggaccgatgcacccaaggcaggacagttagaggcctggctcgaaatgaatcctgggtacgaggtggccccccgcagcgacagcgaagagagcgggtcggaggaggaagaggaggaagaggaggaagaacagccgcaggctgctcagcctcctactctccccgtggaggagaagaagaagattcctgatccggactccgatgacgtgagtgaggtggatgcaagacacatcatcgagaatgccaagcaggacgtcgacgacgaatatggcgtttctcaggcactagcaaggggccttcagagctactacgctgtggctcacgcagtgaccgaacgggtggacaaacagagtgcactcatggtcaatggcgtactgaaacagtaccaaataaagggcctggagtggctggtgagtctctacaacaataacctcaacgggatactcgcagatgagatgggcctcggcaaaactattcaaaccatcgcattgatcacgtatcttatggaacataagaggatcaacggacctttcctaattatagtaccattatccactttgtctaactgggcatacgaatttgacaaatgggctccgagcgttgttaaggtgtcatataagggaagccccgcggcccggcgtgcgtttgtcccacagctccggtctggtaagtttaacgtgctgttgacaacttacgaatacatcatcaaagacaaacacatcctcgccaagatacggtggaaatatatgatcgtcgacgaggggcaccgcatgaagaaccaccattgcaaactgacacaagtgctgaacacacattacgtggcacccagacgtctgctcttaacaggaacccccttgcagaataaactcccggagctgtgggctcttctgaacttcctactgcccacgatatttaagtcctgctctacattcgagcagtggttcaatgcacctttcgccatgaccggagaaaaagtggatttgaacgaggaggaaacaatcctgattattaggagactgcacaaggtgttgcgtccattccttttaaggagactcaagaaggaggttgaggcccaactccctgagaaagtcgagtatgtcattaagtgcgatatgtccgctttgcagagggtactgtacaggcatatgcaggcaaaaggtgtgctgctcacagatgggagcgagaaagataaaaaaggcaaaggaggtacaaagaccctgatgaacacaatcatgcaactccgcaagatctgcaaccatccatatatgttccagcatatcgaggaatccttctccgagcacctcggcttcaccggggggattgtgcagggtctcgacctgtatagagctagtgggaagttcgaacttttggataggattttaccaaaacttagggcaaccaatcataaagtactgttattctgccagatgacctctttgatgaccatcatggaagattatttcgcttaccggggttttaagtacttgagactcgatgggaccacaaaagctgaggatcggggcatgctcctgaagactttcaacgagccaggatctgagtattttattttcctgctatcaacaagggcaggaggactgggactgaatctgcagtcagctgataccgtgataatctttgacagcgactggaatccccatcaagacctgcaagcgcaggatcgcgcccataggatcgggcagcaaaatgaagtccgcgtgctgagactgtgcacagtgaacagcgtcgaagagaaaatcctcgctgccgccaagtataaactgaacgttgaccagaaggtgattcaggctggcatgttcgaccagaaatcaagctctcatgagaggagggccttcctgcaggctattctcgagcatgaagagcaagatgaggaggaagatgaagtccctgatgatgagaccgtgaaccaaatgattgctaggcacgaagaagaattcgacctattcatgcgaatggatttggaccggcgtcgcgaagaagctcgaaatcccaaaaggaaaccacgcctcatggaggaggatgagcttccgtcctggatcatcaaggatgatgccgaagttgagagactcacctgcgaggaggaagaggagaaaatgttcgggcggggaagtaggcacagaaaagaagtggactacagtgactccctgaccgaaaaacagtggcttaagaccctcaaagcaattgaagaaggaaccctcgaggagattgaagaagaggtgcgccaaaagaagagctctcgcaaaaggaagcgggacagcgatgctgggtcgtctaccccaaccacaagcacacgctcacgcgataaagacgacgaatcaaagaagcagaagaaacggggacgcccccccgccgaaaaattgtctcccaaccctcctaacttgaccaagaaaatgaagaagattgtcgacgccgtgatcaaatacaaagacagttcctcaggcaggcagctgagtgaggtcttcatccagctgccctcccgcaaggaattgccagagtattacgagctgattcgcaaacctgtcgacttcaagaagatcaaagaacgcatccgtaaccacaaataccggagcctaaacgaccttgagaaggacgtgatgcttctgtgtcagaatgcacagaccttcaacttggaaggatcactgatttatgaagacagtattgtgctccagtccgttttcacatccgttagacaaaagattgagaaggaagacgactctgaaggagaggaatccgaggaggaggaagagggagaggaagaaggctcagaatctgagtcccgaagtgtcaaagttaagattaagttaggacgcaaagaaaaggcccaggataggttaaaagggggacgccggcgtccctcccgagggagtcgcgcgaaacccgtcgtgagtgacgatgatagtgaagaagagcaagaagaggatcgaagcggctctggctcagaagaagactag

SEQ ID NO: 276440 - DNA, 5046 bp, Artificial Sequence
  derived and/or modified sequence
atgagcacccctgatcctccactgggagggacaccccggcccggaccctccccaggcccaggcccttcaccaggggcgatgttgggccccagccccgggccctccccagggagtgcccatagcatgatgggcccttcacctggtccaccttctgcgggccaccccatcccaacacagggcccaggcggatacccacaggacaacatgcatcagatgcataaaccaatggagtccatgcatgaaaaaggaatgtccgatgatcctcgctacaatcagatgaagggcatgggcatgcgtagcggcggacacgcagggatgggtccaccaccaagccccatggaccagcatagccagggctacccgtccccgctgggaggcagcgaacacgcatcctcccctgtgcccgcctcgggcccaagttctggtcctcagatgtcctccggccctggaggtgcaccgctcgatggggctgatcctcaagctcttgggcagcagaacagaggcccaactccatttaaccaaaatcagctacatcagttgcgggcacagataatggcgtataagatgctggcgcgagggcaacctctccccgatcacctccaaatggctgtgcaagggaaacgacccatgccgggaatgcaacagcagatgcccaccctaccacccccttctgtatctgctacaggtcccggacccggacctggccccggaccagggcccggacccggacccgctccccccaattattcgagaccccacggtatgggaggaccaaatatgccaccaccaggcccctcaggagtgccacccggcatgcccggccagccccctggcgggcccccaaaaccctggcctgagggacccatggcaaacgccgccgcccccactagtactccccagaagttgatccccccacaacctacgggcagacccagcccagctccacctgctgttcctccagcagccagtcccgtcatgcctcctcagactcagagtcccggccagcccgcccagcccgctccaatggtgcccctccatcagaagcagtctcgtattacccccatccagaaaccccggggcctcgatccagtagagatactccaagagcgagagtacagactgcaggctcggatcgctcatagaatccaggagttggagaatttgccaggcagtctcgcgggggacctgagaacaaaagctactatcgagttaaaggccttgaggctgctgaattttcaaagacagctgcggcaggaagttgtcgtgtgcatgcgccgggacaccgcactggagacagcactcaacgcgaaagcctataaacggtccaaacgccagtccctccgagaggcgcggattactgagaagctcgaaaagcagcagaaaatcgagcaggagcggaaacgaaggcaaaagcatcaggaatacctgaactcaattctccaacacgctaaagactttaaggaataccatcggtctgttacaggaaagatccagaagctgacaaaagcagtggcgacttaccatgccaatactgagagagaacaaaaaaaagagaatgagcggatagagaaggaaagaatgaggagacttatgggccagcgagaaaagtcacgccggggactggggtctcagtcatgggccaggatattcgccgacctttcagaccatcagaatgattgcgtcacttcagtcacggagtcccttgttgggcagatcctggccgcttgttctggagaggagggtgaggtggagtggaaaggtcgggatcgcgtccgcagattgcgggctgaggatgaagagggataccgaaagctcatcgatcagaaaaaagacaagcgtctggcatacttactccaacagaccgacgagtatgtcgcaaacttgacggaactggtgcgacagcataaagctgcccaggtcgctaaagaaaagaaaaagaagaagaaaaaaaagaaagcagagaacgcagagggccaaacaccagccatcggccctgacggagaaccgttggacgaaacctcccagatgtctgacctacccgttaaggttattcacgtggagtcaggcaaaatcctcactggaactgacgcacctaaggcaggacagctggaggcatggttagagatgaacccgggttatgaagttgcacccagatccgactcggaggagagcggtagcgaggaggaagaggaagaagaggaggaggaacaaccacaggcggcccagcccccaaccctgccagtggaggagaagaaaaagattcccgaccccgacagtgacgacgtgtccgaggtggatgcccgccacattattgaaaacgctaaacaggacgtggacgacgaatacggcgtttcgcaggccctggcaagaggacttcaatcctattatgccgttgcccatgccgtgactgagagggttgacaagcagtccgctctgatggtgaatggcgtgcttaagcagtatcagatcaaagggctcgaatggctagtcagcttatataataacaatctgaatggcatcctggccgatgagatgggcctcggcaagaccattcagaccatcgccctgattacgtatcttatggagcataaacgtatcaacggccctttcctgataattgtaccattatccaccctgagcaattgggcatacgaattcgataaatgggcgccaagtgttgtaaaagtttcttacaaaggcagcccagctgccaggcgagccttcgttccacagctcaggtctggtaaatttaacgtgctcctgacaacctatgaatatatcattaaggacaaacatatccttgcaaagattaggtggaaatacatgatcgtggacgagggacacaggatgaagaaccatcattgcaagctgacgcaagttttgaacactcactacgtggccccgcgtcggctgctgcttaccggaactcctctgcagaataagttgccagaactgtgggctttactcaatttcctcctgccaactatcttcaagtcatgctcgacttttgaacagtggttcaacgcacccttcgccatgacaggtgaaaaggtcgacctgaatgaggaggagacaattctaatcatccgacgcctgcacaaggtcctgcggccattcctgctgagaagactcaaaaaagaagtggaagcccaattgcctgagaaggtcgagtatgtcataaagtgtgacatgagcgctttgcagagggtgctgtatcggcatatgcaggctaagggcgtgttgctgacagacgggtcagagaaggataaaaaaggtaagggtggtactaaaaccctaatgaacacaatcatgcagctccggaaaatatgcaatcatccatacatgtttcaacacatcgaggaatccttttccgaacacttgggctttactggagggatcgtccaggggcttgacctctacagagccagcggtaagttcgagttgttagaccggattctccccaagttacgcgccacaaatcacaaagtccttctattttgccagatgaccagtctgatgactataatggaagactactttgcctatagaggcttcaagtacctgaggctggacggtaccaccaaggcagaggatcgcggaatgctattaaaaacatttaacgaacccggcagcgaatactttatctttcttttatccacacgggcaggagggctcggtctcaacttacaatccgctgataccgtgatcatcttcgatagcgactggaacccgcatcaggacctgcaggcgcaggatagggctcaccgtattggccagcagaatgaagtgcgcgttctgaggctttgtacagtgaatagcgtagaggagaagatcctggccgctgccaagtacaagttgaatgtggaccagaaagtgattcaggccggaatgttcgaccagaagtcgtcaagccatgaaaggcgagctttccttcaggccatccttgagcacgaggagcaggatgaggaagaggacgaggttccagacgatgagaccgtgaaccaaatgatcgcacgtcacgaggaggaatttgacttgttcatgcgcatggatctcgataggcggcgagaggaggcccgtaatcccaaaaggaagcctaggctgatggaagaggacgaactgcctagttggatcatcaaggatgacgccgaggtcgagagactcacatgtgaggaagaggaagaaaaaatgttcgggcggggatcacggcatcgcaaagaagtagattacagcgactccctgactgaaaagcagtggcttaaaactttaaaagcaattgaagaaggaaccctcgaagagatagaggaagaggttaggcaaaagaaatcaagccgtaaaaggaaacgcgacagcgatgcaggctccagtactccaaccacttcgacccgaagcagggataaggacgacgagagcaagaagcagaaaaagagaggcagacctcccgctgaaaagctgagcccaaaccctcccaacctgacaaaaaagatgaaaaaaatcgtcgacgcggtaataaaatacaaagatagtagttccggacggcagttatcagaagtgttcattcagttgccaagtcgaaaggagctgcccgaatactatgagctgattcggaagcctgtagactttaagaaaattaaagaaagaatacggaatcataagtatcggtcactgaacgatttagagaaggatgtgatgttactctgtcaaaacgcccagactttcaatctggaaggctctctcatttacgaagattcaatcgtgctccaaagcgtattcacttctgtaagacagaagatagaaaaggaggatgactccgagggagaggaaagcgaagaggaagaggagggcgaggaagaaggatcagagtccgaatcccgctccgtgaaagttaagattaaattagggagaaaagaaaaagcccaggatcgccttaaaggaggtagacggagaccaagcagagggagccgggctaaacccgtggtttctgatgatgactcagaggaagaacaagaagaggaccgcagcgggtctggctccgaagaggattag

SEQ ID NO: 276441 - DNA, 4854 bp, Artificial Sequence
  derived and/or modified sequence
atgagcaccccagacccccccctgggcggcaccccccggcccggccccagccctggccctggccccagccctggggccatgctgggccccagccctggccccagccctggcagcgcccacagcatgatgggccccagccctggccccccatctgctggccaccccatccccacccagggccctgggggctacccccaggacaacatgcaccagatgcacaagcccatggagagcatgcatgagaagggcatgtctgatgacccccgctacaaccagatgaagggcatgggcatgaggtctgggggccacgccggcatgggccccccacccagccccatggaccagcacagccagggctaccccagccccctgggcggcagcgagcacgccagcagccctgtgcctgccagcggccccagcagcggcccccagatgagcagcggccctggaggagcccccctggatggagctgacccccaggccctgggccagcagaacagaggccccacccccttcaaccagaaccagctgcaccagctgcgggcccagatcatggcctacaagatgctggcccggggccagcccctgcctgaccacctgcagatggctgtgcagggcaagaggcccatgcctggcatgcagcagcagatgcccaccctgcccccacccagcgtgtctgccaccggccctggccctggccctggccctggccctggccctggccctggccctgccccacccaactacagccggccccacggcatgggcggccccaacatgcctcctcctggccccagcggcgtgcccccaggcatgcctggccagcccccaggcggcccccccaagccctggccagagggccccatggccaatgctgctgcccccaccagcaccccccagaagctgatccccccccagcccaccggccggcccagccctgcccctcctgctgtgcccccagctgccagccctgtgatgccaccccagacccagagccctggccagcctgcccagcctgcccccatggtgcccctgcaccagaagcagagccgcatcacccccatccagaagccccggggcctggaccctgtggagatcctgcaggagcgggagtaccgcctgcaggcccgcatcgcccaccgcatccaggagctggagaacctgcccggcagcctggccggggacctgcggaccaaggccaccatcgagctgaaggccctgcggctgctgaacttccagaggcagctgcggcaggaggtggtggtgtgcatgagaagagacacagccctggagacagccctgaatgccaaggcctacaagaggagcaagaggcagagcctgcgggaggcccgcatcacagagaagctggagaagcagcagaagattgagcaggagaggaagaggcggcagaagcaccaggagtacctgaacagcatcctgcagcacgccaaggacttcaaggagtaccacaggtctgtgacaggcaagatccagaagctgaccaaggctgtggccacctaccacgccaacacagagcgggagcagaagaaggaaaatgaaagaattgagaaggagaggatgaggcggctgatggctgaagatgaggagggctacaggaagctgattgaccagaagaaggacaagaggctggcctacctgctgcagcagacagatgaatatgtggccaacctgacagagctggtgcggcagcacaaggccgcccaggtggccaaggagaagaagaagaagaagaagaagaagaaggccgagaatgctgagggccagaccccagccatcggcccagatggagagcccctggatgagaccagccagatgtctgacctgcctgtgaaggtgattcatgtggagagcggcaagatcctgactggaacagatgcccccaaggccggccagctggaggcctggctggagatgaaccctggctatgaggtggcccccaggagtgacagcgaggagagcggcagcgaggaggaggaggaggaggaggaggaggagcagccccaggccgcccagccccccaccctgcctgtggaggagaagaagaagatcccagaccctgacagtgatgatgtgtctgaggtggatgcccggcacatcattgaaaatgccaagcaggatgtggatgatgaatatggagtgtcccaggccctggcccggggcctgcagagctactatgctgtggcccatgctgtgacagagcgggtggacaagcagagcgccctgatggtgaatggagtgctgaagcagtaccagatcaagggcctggagtggctggtgtccctgtacaacaacaacctgaatggcatcctggctgatgagatgggcctgggcaagaccatccagaccatcgccctgatcacctacctgatggagcacaagaggatcaatggccccttcctgatcatcgtgcccctgagcaccctgagcaactgggcctatgaatttgacaagtgggcccccagcgtggtgaaggtgtcctacaagggcagccctgctgcccggcgggcctttgtgccccagctgcggagcggcaagttcaacgtgctgctgaccacctatgagtacatcatcaaggacaagcacatcctggccaagatccgctggaagtacatgattgtggatgagggccacaggatgaagaaccaccactgcaagctgacccaggtgctgaacacccactacgtggccccccggcggctgctgctgaccggcacccccctgcagaacaagctgcctgagctgtgggccctgctgaacttcctgctgcccaccatcttcaagagctgcagcacctttgagcagtggttcaatgccccctttgccatgaccggggagaaggtggacctgaatgaggaggagaccatcctgatcatccggcggctgcacaaggtgctgcggcccttcctgctgcggcggctgaagaaggaggtggaggcccagctgcctgagaaggtggagtatgtgatcaagtgtgacatgtctgccctgcagagggtgctgtaccgccacatgcaggccaagggcgtgctgctgacagatggcagcgagaaggacaagaagggcaaaggaggcaccaagaccctgatgaacaccatcatgcagctgaggaagatctgcaaccacccctacatgttccagcacatcgaggagagcttcagcgagcacctgggcttcaccggcggcatcgtgcagggcctggacctgtaccgggccagcggcaagtttgagctgctggaccgcatcctgcccaagctgcgggccaccaaccacaaggtgctgctcttctgccagatgaccagcctgatgaccatcatggaggactactttgcctaccggggcttcaagtacctgcggctggatggcaccaccaaggcagaagatcggggcatgctgctgaagaccttcaatgaacctggcagcgagtacttcatcttcctgctgagcacccgggccggcggcctgggcctgaacctgcagagcgctgacaccgtcatcatctttgacagcgactggaacccccaccaggacctgcaggcccaggaccgggcccacagaattggccagcagaatgaggtgcgggtgctgcggctgtgcaccgtgaacagcgtggaggagaagatcctggccgccgccaagtacaagctgaatgtggaccagaaggtgatccaggccggcatgtttgaccagaagagcagcagccatgaaagaagagccttcctgcaggccatcctggagcacgaggagcaggatgaggaggaggatgaggtgcctgatgatgagaccgtgaaccagatgattgcccggcatgaggaggagtttgacctcttcatgaggatggacctggacagaagaagagaggaggccaggaaccccaagaggaagccccggctgatggaggaggatgagctgcccagctggatcatcaaggatgatgctgaggtggagcggctgacctgtgaggaggaggaggagaagatgtttggccggggcagccgccacaggaaggaggtggactacagcgacagcctgacagagaagcagtggctgaagaccctgaaggccatcgaggagggcaccctggaggagattgaggaggaggtgcggcagaagaagagcagcaggaagaggaagagggacagtgatgctggcagcagcacccccaccaccagcaccaggagccgggacaaggatgatgagagcaagaagcagaagaagaggggccggcccccagctgagaagctgagccccaacccccccaacctgaccaagaagatgaagaagatcgtggatgctgtgatcaagtacaaggacagcagcagcggccggcagctgtctgaggtgttcatccagctgcccagcaggaaggagctgcctgagtactatgagctgatcaggaagcctgtggacttcaagaagatcaaggagcgcatccggaaccacaagtaccgcagcctgaatgacctggagaaggatgtgatgctgctgtgccagaatgcccagaccttcaacctggagggcagcctcatctatgaggacagcatcgtgctgcagagcgtcttcacctctgtgcggcagaagattgagaaggaggatgacagcgagggggaggagagcgaggaggaggaggagggggaggaggagggcagcgagagcgagagccgctctgtgaaggtgaagatcaagctgggcaggaaggagaaggcccaggaccggctgaagggcggcagaagaagacccagccggggcagccgggccaagcctgtggtgtctgatgatgattctgaggaggagcaggaggaggacaggagcggcagcggcagcgaggaggactag

SEQ ID NO: 276442 - DNA, 5046 bp, Artificial Sequence
  derived and/or modified sequence
atgagcaccccagacccccccctgggcggcaccccccggcccggccccagccctggccctggccccagccctggggccatgctgggccccagccctggccccagccctggcagcgcccacagcatgatgggccccagccctggccccccatctgctggccaccccatccccacccagggccctgggggctacccccaggacaacatgcaccagatgcacaagcccatggagagcatgcatgagaagggcatgtctgatgacccccgctacaaccagatgaagggcatgggcatgaggtctgggggccacgccggcatgggccccccacccagccccatggaccagcacagccagggctaccccagccccctgggcggcagcgagcacgccagcagccctgtgcctgccagcggccccagcagcggcccccagatgagcagcggccctggaggagcccccctggatggagctgacccccaggccctgggccagcagaacagaggccccacccccttcaaccagaaccagctgcaccagctgcgggcccagatcatggcctacaagatgctggcccggggccagcccctgcctgaccacctgcagatggctgtgcagggcaagaggcccatgcctggcatgcagcagcagatgcccaccctgcccccacccagcgtgtctgccaccggccctggccctggccctggccctggccctggccctggccctggccctgccccacccaactacagccggccccacggcatgggcggccccaacatgcctcctcctggccccagcggcgtgcccccaggcatgcctggccagcccccaggcggcccccccaagccctggccagagggccccatggccaatgctgctgcccccaccagcaccccccagaagctgatccccccccagcccaccggccggcccagccctgcccctcctgctgtgcccccagctgccagccctgtgatgccaccccagacccagagccctggccagcctgcccagcctgcccccatggtgcccctgcaccagaagcagagccgcatcacccccatccagaagccccggggcctggaccctgtggagatcctgcaggagcgggagtaccgcctgcaggcccgcatcgcccaccgcatccaggagctggagaacctgcccggcagcctggccggggacctgcggaccaaggccaccatcgagctgaaggccctgcggctgctgaacttccagaggcagctgcggcaggaggtggtggtgtgcatgagaagagacacagccctggagacagccctgaatgccaaggcctacaagaggagcaagaggcagagcctgcgggaggcccgcatcacagagaagctggagaagcagcagaagattgagcaggagaggaagaggcggcagaagcaccaggagtacctgaacagcatcctgcagcacgccaaggacttcaaggagtaccacaggtctgtgacaggcaagatccagaagctgaccaaggctgtggccacctaccacgccaacacagagcgggagcagaagaaggaaaatgaaagaattgagaaggagaggatgaggcggctgatgggccagcgggagaagagccggcggggcctgggcagccagagctgggcccgcatctttgctgacctgagtgaccaccagaatgactgtgtgacctctgtgacagagagcctggtgggccagatcctggccgcctgcagcggggaggagggggaggtggagtggaagggccgggacagagtgcggcggctgcgggcagaagatgaggagggctacaggaagctgattgaccagaagaaggacaagaggctggcctacctgctgcagcagacagatgaatatgtggccaacctgacagagctggtgcggcagcacaaggccgcccaggtggccaaggagaagaagaagaagaagaagaagaagaaggccgagaatgctgagggccagaccccagccatcggcccagatggagagcccctggatgagaccagccagatgtctgacctgcctgtgaaggtgattcatgtggagagcggcaagatcctgactggaacagatgcccccaaggccggccagctggaggcctggctggagatgaaccctggctatgaggtggcccccaggagtgacagcgaggagagcggcagcgaggaggaggaggaggaggaggaggaggagcagccccaggccgcccagccccccaccctgcctgtggaggagaagaagaagatcccagaccctgacagtgatgatgtgtctgaggtggatgcccggcacatcattgaaaatgccaagcaggatgtggatgatgaatatggagtgtcccaggccctggcccggggcctgcagagctactatgctgtggcccatgctgtgacagagcgggtggacaagcagagcgccctgatggtgaatggagtgctgaagcagtaccagatcaagggcctggagtggctggtgtccctgtacaacaacaacctgaatggcatcctggctgatgagatgggcctgggcaagaccatccagaccatcgccctgatcacctacctgatggagcacaagaggatcaatggccccttcctgatcatcgtgcccctgagcaccctgagcaactgggcctatgaatttgacaagtgggcccccagcgtggtgaaggtgtcctacaagggcagccctgctgcccggcgggcctttgtgccccagctgcggagcggcaagttcaacgtgctgctgaccacctatgagtacatcatcaaggacaagcacatcctggccaagatccgctggaagtacatgattgtggatgagggccacaggatgaagaaccaccactgcaagctgacccaggtgctgaacacccactacgtggccccccggcggctgctgctgaccggcacccccctgcagaacaagctgcctgagctgtgggccctgctgaacttcctgctgcccaccatcttcaagagctgcagcacctttgagcagtggttcaatgccccctttgccatgaccggggagaaggtggacctgaatgaggaggagaccatcctgatcatccggcggctgcacaaggtgctgcggcccttcctgctgcggcggctgaagaaggaggtggaggcccagctgcctgagaaggtggagtatgtgatcaagtgtgacatgtctgccctgcagagggtgctgtaccgccacatgcaggccaagggcgtgctgctgacagatggcagcgagaaggacaagaagggcaaaggaggcaccaagaccctgatgaacaccatcatgcagctgaggaagatctgcaaccacccctacatgttccagcacatcgaggagagcttcagcgagcacctgggcttcaccggcggcatcgtgcagggcctggacctgtaccgggccagcggcaagtttgagctgctggaccgcatcctgcccaagctgcgggccaccaaccacaaggtgctgctcttctgccagatgaccagcctgatgaccatcatggaggactactttgcctaccggggcttcaagtacctgcggctggatggcaccaccaaggcagaagatcggggcatgctgctgaagaccttcaatgaacctggcagcgagtacttcatcttcctgctgagcacccgggccggcggcctgggcctgaacctgcagagcgctgacaccgtcatcatctttgacagcgactggaacccccaccaggacctgcaggcccaggaccgggcccacagaattggccagcagaatgaggtgcgggtgctgcggctgtgcaccgtgaacagcgtggaggagaagatcctggccgccgccaagtacaagctgaatgtggaccagaaggtgatccaggccggcatgtttgaccagaagagcagcagccatgaaagaagagccttcctgcaggccatcctggagcacgaggagcaggatgaggaggaggatgaggtgcctgatgatgagaccgtgaaccagatgattgcccggcatgaggaggagtttgacctcttcatgaggatggacctggacagaagaagagaggaggccaggaaccccaagaggaagccccggctgatggaggaggatgagctgcccagctggatcatcaaggatgatgctgaggtggagcggctgacctgtgaggaggaggaggagaagatgtttggccggggcagccgccacaggaaggaggtggactacagcgacagcctgacagagaagcagtggctgaagaccctgaaggccatcgaggagggcaccctggaggagattgaggaggaggtgcggcagaagaagagcagcaggaagaggaagagggacagtgatgctggcagcagcacccccaccaccagcaccaggagccgggacaaggatgatgagagcaagaagcagaagaagaggggccggcccccagctgagaagctgagccccaacccccccaacctgaccaagaagatgaagaagatcgtggatgctgtgatcaagtacaaggacagcagcagcggccggcagctgtctgaggtgttcatccagctgcccagcaggaaggagctgcctgagtactatgagctgatcaggaagcctgtggacttcaagaagatcaaggagcgcatccggaaccacaagtaccgcagcctgaatgacctggagaaggatgtgatgctgctgtgccagaatgcccagaccttcaacctggagggcagcctcatctatgaggacagcatcgtgctgcagagcgtcttcacctctgtgcggcagaagattgagaaggaggatgacagcgagggggaggagagcgaggaggaggaggagggggaggaggagggcagcgagagcgagagccgctctgtgaaggtgaagatcaagctgggcaggaaggagaaggcccaggaccggctgaagggcggcagaagaagacccagccggggcagccgggccaagcctgtggtgtctgatgatgattctgaggaggagcaggaggaggacaggagcggcagcggcagcgaggaggactag

SEQ ID NO: 276443 - DNA, 4854 bp, Artificial Sequence
  derived and/or modified sequence
atgagcacccccgacccccccctgggcggcaccccccggcccggccctagtcctggcccaggccctagcccaggcgctatgcttggtccttcaccaggccccagccctgggagcgcccattcaatgatggggcccagtccgggcccgccatcagccgggcacccaattcctactcagggacctggaggctatccgcaagataatatgcatcaaatgcataagcccatggaatccatgcatgagaaagggatgagtgacgatccaagatacaatcagatgaagggaatgggtatgcggtcaggaggacacgccgggatggggcctccaccgtcccccatggaccagcactcccaggggtatccatcgccgctcggtggctccgagcatgcgtctagccccgtaccagcctcaggaccatcttcgggtcctcagatgtcatccggtcccggtggggccccccttgatggcgctgacccacaggcccttggccaacaaaatagaggccccacgccatttaatcaaaaccagctgcaccaactaagagcccagatcatggcctacaagatgctggcacgggggcaacccctgcctgaccacctacagatggccgttcagggaaagaggcccatgcctggaatgcagcaacagatgcccactctcccgcctccgtcagtgagtgccactggtcctggccctggcccgggaccgggtcccggaccaggtccagggcccgcgcctcctaattactcaagaccccacggtatgggcgggcccaatatgcctccaccagggccctccggagtcccacccggcatgcctgggcagccaccagggggccctcctaagccttggccagagggcccaatggccaacgcagctgctcctacaagtactccgcagaagctcatcccacctcagcccaccgggcgaccgtctcctgcccctcctgctgtgcccccggcagccagcccagtgatgcccccacagactcaatcccccggccaacccgcccagcctgccccgatggtccctctgcatcagaaacaaagcaggattacgcctatccagaagcctaggggactagaccctgtggagatcctgcaggagagggagtacaggttgcaagcgaggatcgcccatcgaattcaggagcttgaaaacctgccaggttcccttgccggcgatctgaggactaaggctacaattgagctgaaggccctgagactgctcaacttccagagacagctccgtcaggaggtggtggtctgtatgaggcgagatactgctctcgaaaccgcactgaatgctaaagcctacaagagatctaagcggcagtccctgcgtgaagcacggataacggagaagttagagaagcagcaaaagatcgagcaggagaggaaacgtagacagaagcatcaggagtacctgaattccatcctgcagcacgccaaggattttaaagaataccacaggagcgtaacagggaagatacagaaattgactaaagccgttgctacataccacgccaataccgagagagagcaaaaaaaggagaatgagcggattgagaaagaaagaatgcgaagacttatggcggaggatgaagagggatacaggaaactgatcgaccagaaaaaagataagagattggcctatctcctccagcagacagatgagtatgtggccaacttaaccgagctcgtgcgtcagcataaggctgcccaggtggccaaagaaaagaagaaaaagaagaagaagaagaaggcagagaatgcggagggtcagactcccgcaatcggccccgatggtgaaccactggacgagacatctcagatgagtgacctgcctgtgaaggtgatccacgtggaaagtgggaaaatcctcacaggcaccgacgctccaaaagctgggcaacttgaagcctggttagagatgaatcccggctacgaggttgctccacgctcagactccgaagagagtggcagtgaagaagaggaagaggaggaggaggaagagcagccccaggctgcccaacctccgacgcttccagtggaagagaagaagaagattcccgaccctgatagtgatgacgtgtctgaggttgatgcaagacatatcattgagaacgcaaaacaagatgttgacgatgagtatggggtgtcccaagccctggccagaggcctgcaaagctactatgcagttgcgcacgccgtgacggagcgagtagacaagcagagcgcacttatggtcaacggcgtgctgaagcagtaccagattaaagggttggaatggttggtttctttatacaacaataacctaaacggcatcctggccgacgaaatgggattgggaaaaacaattcagacaatcgctctgatcacatacctgatggagcacaaacgaataaatggccccttcctgatcattgtccctttatcaactttgtcaaattgggcctatgagttcgataaatgggcgccttctgtggtcaaagtgtcctataaaggttccccggcagcgcgccgcgcctttgtcccacagctgaggagcgggaagttcaacgtgttacttaccacatacgaatatataatcaaggacaaacacattctggctaaaattcgatggaaatacatgatcgtggacgaaggtcataggatgaaaaaccatcactgcaagctgacccaagtcttaaatacccactatgtggctccacgaagactgctcctgacaggaacaccactgcagaataaattgcctgaactgtgggccctactgaacttcctgcttcctacaatctttaagtcatgttctacatttgagcagtggttcaatgccccattcgcgatgactggagaaaaggtcgacttaaatgaagaggagacaatcttgatcattaggaggctgcacaaggttctccgaccctttctgctgcggaggctgaagaaggaagtggaggctcagctccctgagaaggtcgagtacgtgattaaatgtgatatgagtgctctccagcgagtgctttatagacatatgcaggccaagggagtgttactaaccgacggatcagaaaaggacaaaaagggaaaaggcggcaccaagaccctgatgaataccattatgcagctacgaaagatatgcaaccatccgtatatgttccagcatatagaagagagtttcagcgaacacctaggtttcaccggaggtatcgtgcaaggcctggacttataccgcgcttcgggcaaattcgagctcctggaccgcattctgccaaagctgagggctaccaaccacaaggttttgctgttttgtcagatgacatccctcatgaccataatggaggattactttgcatacagaggatttaagtacctgcggctggacggcactactaaagccgaggaccgagggatgctgctgaaaacattcaacgaacccggctcagagtacttcatcttcctcctttctactcgtgccggcggactgggcttgaacttacaatcagcggatacagtcattatatttgattctgactggaatccccatcaggaccttcaagcacaggatcgggcccaccgtattgggcagcagaatgaagtacgggtcctccgtctttgtaccgtgaacagtgtcgaggagaaaattcttgcagcagcaaagtacaagctgaacgtggatcaaaaggttatccaagccggcatgttcgatcagaagtcttccagtcatgaacgaagggcctttctccaggccattttagaacacgaagagcaggacgaggaagaggatgaggtacccgatgacgaaaccgtgaaccagatgatcgccagacacgaggaggaatttgacttattcatgcgcatggacttagaccggagacgggaggaagcacgtaatccgaagcgaaaaccacgactgatggaggaagacgaattgcccagctggataataaaagacgacgcagaagtggaacgcctcacgtgcgaagaggaagaggagaaaatgttcggcagagggtccagacatagaaaagaggtggactattctgactctctcaccgagaagcaatggctgaagactctcaaggcaattgaggaaggcaccctcgaggaaatcgaagaagaagtgcggcagaagaagtccagtcgaaagagaaaacgcgacagcgacgctgggagcagcacaccaaccaccagcacacgctctcgggataaggatgatgagtccaaaaagcaaaaaaaacgaggaaggccccccgccgagaaattgagcccaaacccgccaaacctgacgaaaaagatgaagaagatagtcgatgctgttatcaaatacaaggactcaagcagtggcagacagctgtcagaggtgttcatacagcttccgtcccggaaagaattgccagaatattatgagctcattaggaagccagtcgatttcaagaagattaaagagaggatcaggaaccacaaatacagaagcctgaacgatctcgaaaaagacgtcatgctgctctgccagaatgctcaaacctttaacctagaagggtcattgatatatgaggactccatagtcttacagagcgtgttcacttcagtccgacagaaaatcgagaaggaagatgactctgaaggagaggaatccgaagaagaagaagagggtgaggaggaaggaagcgaatcagagagcagatctgtgaaagttaagattaaactggggcgcaaggagaaagcacaggacaggctcaaaggaggaaggcgtcggccctctaggggatccagagcgaaacccgttgtcagcgatgacgacagcgaggaagaacaggaagaggaccgcagtgggagcgggtccgaggaagattag

SEQ ID NO: 276444 - DNA, 5046 bp, Artificial Sequence
  derived and/or modified sequence
atgagcacccccgacccccccctgggcggcaccccccggcccggcccatcaccaggccctgggccatctccaggggctatgctggggccatcaccagggccgtccccgggatctgctcactcgatgatgggcccctctcctggtccccccagcgcagggcatcccatcccaactcagggtccaggaggctatccgcaggataacatgcatcaaatgcacaaacccatggaatcaatgcatgaaaagggcatgagtgatgatccccgctataatcagatgaagggtatgggtatgcgctcaggggggcacgccgggatggggcccccccctagtcccatggatcagcactcccagggctacccatccccgcttggtggaagcgagcacgcaagctctccagtccccgctagtggcccttcatcgggaccacagatgtcatccggccccggaggagcacctctagacggtgccgacccccaggctctggggcagcagaatcggggccctacgccatttaaccagaatcagctgcatcagttacgtgctcagattatggcctataagatgcttgctcgaggccagccgttgcctgaccacctccagatggccgtgcagggtaaacgtcccatgccgggtatgcaacagcaaatgcccaccctccctcctccgtctgtgagtgctacagggccagggcctggacctgggccaggacctggcccaggccccggacccgctccccctaattacagccgccctcacgggatggggggcccgaatatgcctccaccaggcccatcaggtgtgccacctggcatgcctggccaacccccaggggggccaccaaaaccgtggcctgagggccctatggcaaacgccgctgcccccacttcgacccctcaaaagctaatcccaccccaacctactggcaggccaagcccagcaccacccgccgttccacccgctgcatcccctgtgatgcctcctcagacgcagagtcctggccagccagcgcaacccgcccccatggtacccttgcatcagaaacagtcacgaatcacacctatacagaaaccccgagggctggatccagtcgaaatcttgcaagaacgtgagtataggctccaggcgaggatcgcccatcgcattcaggagctcgaaaacttgcctggatcactcgccggcgatttgagaactaaggctaccattgaactaaaggccttacgcttactgaacttccaacggcagctaagacaggaggtggtggtgtgcatgcgccgcgatacagctctcgagaccgcactgaacgcgaaagcctacaagcgaagcaaacgacaaagtctcagagaggctcggatcactgagaaactggagaagcaacagaaaatcgaacaggagcgcaagcggaggcagaaacaccaagagtatttgaattccattctgcaacacgcaaaagatttcaaggagtaccataggtctgtaaccggcaaaatccagaagctgactaaagctgtggcaacgtaccatgccaacactgagagggagcaaaagaaggagaacgaaaggattgagaaggaacggatgaggagactaatgggacaacgggaaaaatctaggagaggcttgggctcacagtcctgggctcgcatttttgcagacctgagtgatcatcaaaacgactgcgtgactagcgtaacagagagtttggttggccagattctggcagcatgctccggagaggagggagaggtcgagtggaaagggcgagatagagtaagacgtttacgagcagaagacgaggaaggatatcgcaagctcatcgatcagaagaaagacaagcgtctcgcttatctcctgcagcagaccgacgaatatgtagctaacctgaccgagctggtgagacaacacaaggcagcacaagtcgcgaaggagaaaaagaagaagaaaaaaaaaaaaaaagcagaaaatgctgaagggcagacgcctgccatcggcccagatggagagccactggacgagacatctcagatgagtgatctgcctgtcaaagtgatccacgtggagagcgggaagatcctcactggtacggacgccccaaaggctggccagctcgaggcatggctggagatgaatccaggatatgaagtggccccgcggtcggactcagaggaatccgggtccgaagaggaggaggaggaggaagaagaagaacagccccaagctgctcaaccccctacactgccagtcgaagagaagaaaaagattcctgacccagattctgatgatgtgtctgaggtggatgctcggcatattatcgagaacgcaaagcaggatgtagacgacgaatacggggttagccaggctttggccaggggtttgcagtcgtattatgccgtggcccacgccgtcaccgaaagagtcgacaagcaatctgcccttatggtaaacggtgtactcaaacagtatcagataaagggactcgaatggctggtttccctatacaacaataatctcaatggtatcctcgcagatgaaatgggcctaggcaagacaatccaaacaatcgccttgatcacataccttatggaacacaaaagaataaacggcccatttctgattattgtgcccctgtctacactgtcaaattgggcctatgaatttgataagtgggcaccctctgtcgttaaagtttcctacaaaggtagtcctgccgccaggcgtgcttttgttcctcagctccgctcaggaaaatttaatgttcttctgactacctacgaatacatcataaaagataaacacattctggccaaaattcggtggaaatatatgattgttgacgaagggcatcgcatgaagaaccaccattgcaagctgacacaagtactgaatacccattacgtagcgcctcgtcgcctgctgctgaccgggactcctcttcaaaacaagcttcctgaactgtgggccttactgaacttcttgttacccacaatctttaagagctgctcaaccttcgagcagtggtttaatgctcctttcgcaatgaccggagaaaaggtagatctcaacgaagaggagactatcctgattatcaggcggctgcataaagttctgcgaccattcttgctgagaaggttaaaaaaggaggttgaggcccagctgcccgaaaaagttgagtacgtgattaaatgcgatatgtcagcccttcagcgcgtgctctacagacacatgcaggcaaagggcgtcctgcttactgatgggagcgagaaggacaagaagggcaaggggggcaccaagaccctgatgaacaccatcatgcagctgcgcaagatctgtaatcacccctacatgttccagcacattgaggaatcattctccgaacacctgggctttacaggaggcatcgttcagggcctcgatttatatagggcttctggcaagttcgagcttttagaccggattctgccaaaattgagggctaccaaccacaaggtgcttctgttttgtcagatgacgagtctgatgaccattatggaggattacttcgcctacagaggtttcaagtatctccggttagacggaaccacgaaagcagaagatagaggcatgctgctgaaaacctttaatgagcccggttccgaatatttcatatttctccttagtacaagggctggcggcctcgggctcaaccttcagagcgctgataccgtcattattttcgatagcgactggaatcctcatcaagatcttcaagctcaagaccgcgcccacagaatcggacaacagaacgaagtgcgtgttctgagactgtgtacagtgaactccgtggaagaaaaaatactggccgcggccaagtataagttgaatgtggaccagaaagtcattcaggcagggatgttcgatcagaagagcagctctcacgagcggcgggcgttcctgcaggctatcctggagcacgaggaacaggacgaagaggaggacgaagttccggatgacgaaacggtaaatcaaatgattgctcggcatgaagaagaatttgatttatttatgaggatggatcttgacaggcggcgcgaggaggccaggaatcccaagcgtaaacccagattaatggaggaagacgagttgccgtcctggatcatcaaagatgatgcagaggttgagagattgacctgtgaggaagaggaagagaagatgttcggcaggggcagccgccatcggaaggaggtggactactctgattctttgaccgagaaacaatggcttaaaactttgaaagccattgaggaaggaacgcttgaggagatagaagaagaagtgcgccagaaaaagtcttctagaaaaaggaaaagggattcagatgctggatcatccaccccaaccacatctactcgcagccgtgacaaagacgacgaatccaagaagcagaaaaaacgaggaagaccacccgccgaaaagttaagtcctaaccccccgaatctgaccaagaagatgaaaaagatcgtggacgctgtgattaagtacaaagactccagtagcgggcggcagctttcggaggtctttattcagttaccttcacgaaaagagcttccggagtactatgaactaattaggaagccagtcgattttaagaaaatcaaggagcgaattagaaatcacaaatatcgctcgctgaatgatctcgaaaaggacgtgatgcttctttgccaaaacgcccagacgttcaacctcgaaggaagtctaatctacgaggattcaatcgtactgcagagcgtgtttacttccgtcagacagaagatcgagaaggaagacgattcggagggggaagagtcagaagaggaggaggaaggagaggaggagggatcagaatctgaatctcgttcagtcaaggtcaagattaaattagggcggaaggagaaagcccaggatcgactgaagggtggccgaagaaggccttcacggggcagccgggctaagcctgtggtgtccgatgatgatagtgaggaggaacaagaagaggaccgaagtgggtcgggatcagaagaagactag

SEQ ID NO: 276445 - DNA, 4854 bp, Artificial Sequence
  derived and/or modified sequence
atgtccaccccagaccctcctctggggggaacccctaggcccggaccaagtcccggacctggccctagccctggagctatgttaggacctagccccggtcccagtcccggaagtgctcatagtatgatgggcccatcacctgggccaccctctgcaggacacccaatacccacccagggaccgggagggtatccccaagataacatgcaccagatgcataaacctatggaatctatgcatgagaagggaatgtccgatgatcccaggtataaccagatgaaggggatgggcatgcgcagtggtggtcacgccggaatgggccctccccctagccccatggaccagcattcccaggggtacccttcccccttgggcggaagtgagcatgcttcctctcccgtcccagcctctggaccgagcagcgggcctcaaatgagttcgggacccggtggagctcccctagatggggcagatccacaagccctgggccaacagaaccggggacccacaccattcaatcagaatcagctgcaccagcttagggctcagataatggcttataaaatgttggccaggggacagcctttgcccgaccacctgcagatggcagtacagggtaagagacctatgccaggcatgcagcagcagatgcctacgcttcctcctccatcagtgtctgctactggtccaggccctggccctgggcctggcccagggcctgggcctggtcccgcacctccgaactacagcaggccacatgggatgggcggacctaacatgcctcctccgggacccagtggtgtccctccgggaatgcccggacagcccccagggggtccacccaaaccttggcccgaggggccaatggcgaatgccgctgccccaaccagcacaccccagaaactgatcccacctcaacctaccggcaggccatcgcctgcacctcccgctgtgcccccagcagcctcgcctgtcatgcccccacaaacacagtcaccgggtcagccagcccagccggcacccatggtccctcttcaccagaaacagtcccggattacgcctatccaaaagcccagaggcctcgatccagtggagatcctccaagagagagaatacaggctccaggcccgaattgcccataggattcaggagctggaaaacctgcctggaagtttggctggagacctgcggacgaaagccacaatagaactaaaggcccttcggctgctgaactttcagagacagctccgacaggaggttgtggtgtgtatgaggagggacacagccctcgaaacagcactgaatgctaaagcttacaagagatccaagcgccagtctctgagggaggcacgcattaccgaaaaattagaaaagcaacagaagatcgagcaggagcggaaaaggagacagaaacatcaagagtatctgaattctattctgcaacacgcaaaagatttcaaggagtaccaccgttctgtaactggcaagattcaaaaactgacaaaagccgtggccacatatcacgcgaatacggagcgcgagcagaaaaaggagaacgagcggatcgagaaagagaggatgaggcgacttatggctgaggacgaagagggctaccgaaaactgatcgaccagaaaaaggataaacgcctggcataccttttgcagcagactgacgaatacgtcgctaatctgacagaactcgtacggcagcacaaagctgcacaggtcgcgaaagagaaaaagaagaaaaaaaagaagaagaaagctgagaatgctgaggggcaaacaccagcgatcggtcctgatggagaacctctggacgagacttctcagatgtctgacctccccgttaaggttatacacgttgaatcagggaagattctgacaggcacagatgctcctaaagctggccagctggaagcctggttagagatgaatcccggttacgaagttgcccctaggtccgacagcgaggaaagcgggtctgaggaagaagaagaggaggaagaggaggagcaaccgcaagccgcacaacctcccaccctgcctgtggaggagaaaaagaaaatcccggatccagactctgatgatgtgtctgaggtggatgcaagacacatcattgaaaacgctaaacaagacgtcgacgacgagtatggagtaagtcaggctctagcccgaggcttacagtcctactacgccgtcgctcatgctgtgacggagagagtggataagcaaagcgcgctgatggtgaatggggttttaaagcaatatcagattaagggcctggagtggctggtgtcgctctacaataataacttgaatggaattctggctgatgagatgggcttgggtaagacaatccagacgattgccctaattacctatttgatggaacataagcggatcaatggaccctttctgatcatcgttccactgtcaacactgtccaactgggcctacgagttcgataaatgggctcctagtgtagtgaaagtatcctacaagggaagcccggcagcgaggcgggcttttgtaccacagctgcgatccgggaaatttaatgtgctgctcacgacttacgaatacattatcaaggacaagcacattctagccaagatcagatggaagtacatgatagtggacgagggccatcggatgaaaaatcaccactgtaagttaacccaggtgctgaatactcactatgtggcccctaggaggctgttacttacaggtacaccattgcaaaacaaacttcctgaactgtgggctctgctaaattttctgttgcctacaatcttcaaatcgtgtagtacattcgagcaatggtttaatgctccattcgccatgacaggagagaaggtggatctaaacgaggaagaaacaattctgattatccgtcggctacataaggtgctcagacccttccttctccgcagattgaagaaggaggttgaggctcagctgcccgagaaagtggagtatgtgattaaatgtgacatgagcgctctccagagagtactgtacaggcacatgcaggccaaaggggtgctgctgacagacgggtcagagaaagataagaaaggtaaaggtggcaccaagactctcatgaacacgattatgcagttgaggaaaatctgcaaccacccttacatgttccagcatattgaggagtccttttcagaacatctgggcttcaccggcggtatagtccagggcttagacctgtaccgggcttccggaaaatttgaattgctggatcgaatactgcccaagctcagggcaaccaatcacaaagtgttactgttttgtcagatgaccagcctgatgacaataatggaggactactttgcatacagaggtttcaaatacttgcgtcttgacggaacaacaaaggccgaggatcggggtatgctgctaaagacattcaacgagccgggatctgagtactttatttttctcctgtccacaagagcaggcggactcgggctcaacctccagagtgcggatactgtgatcatttttgacagcgactggaaccctcatcaagatctccaggcccaggaccgcgcacaccgtatcgggcagcagaatgaggttcgggtgctgcggctctgcaccgtgaactctgtagaagagaagattttggctgcagcaaagtataaactgaacgtagaccagaaagtaatccaggccggtatgttcgatcaaaagtcttccagtcatgagaggagggccttcttgcaagccatcttggaacatgaggagcaagacgaggaggaggatgaagtgcctgatgatgaaaccgtgaaccaaatgatcgctaggcacgaggaagaattcgacctctttatgcggatggatttggatagaagacgggaggaggcccgtaatcccaaacgcaagcctaggctgatggaggaagatgagcttcccagttggatcattaaggacgatgccgaggttgaaagactcacctgtgaggaagaggaagagaagatgttcggcagagggtcaagacacagaaaagaggtggattatagtgattctctcaccgaaaagcagtggctaaagaccctgaaggctattgaggaaggaactttggaagaaatagaggaagaggtgcgtcagaagaagtcctcccgcaaacggaagagagactctgacgccggttcctcgacccccacaaccagtacaagatcccgggacaaagacgacgaatccaaaaagcagaagaaaagagggaggccccctgccgaaaagttgagccccaacccacctaatttgaccaagaaaatgaagaagatagtcgacgcagtcattaaatataaggactcctccagtggccgacagctctccgaagtgtttattcagctgccgagtaggaaggagcttccggaatattatgagctgatcaggaaacccgtagacttcaaaaaaattaaggagcggattaggaaccataagtatcgctccctgaacgacttggagaaggatgtgatgttgctgtgccaaaatgctcagacctttaatctggaggggtcccttatatatgaggattctatcgtgcttcagtctgtgttcacatctgtgcggcagaaaatagaaaaggaagatgactccgagggagaagagagcgaagaagaagaagagggagaagaggagggctccgagagcgaatcacgctccgttaaagtaaaaatcaagctcggacgaaaagaaaaagcccaagaccgtctcaaaggcggacgtcgtaggccttctcgaggctctagagccaaacccgttgttagcgacgacgattcagaggaggagcaggaagaagaccggtctggatccggatctgaagaggactag

SEQ ID NO: 276446 - DNA, 5045 bp, Artificial Sequence
  derived and/or modified sequence
atgtccacgcccgaccccccattaggtggaacaccaaggccagggccttcacctggaccgggtccttcccccggagcgatgctgggacctagtcccggtcctagtcccggatcagcacactcaatgatggggcctagtcctgggccacccagcgccggtcaccccatccccacacagggccctggcggatatccccaggataatatgcatcagatgcataagcccatggaatctatgcatgaaaaaggtatgtcagatgatcctagatacaaccagatgaaaggcatggggatgcggtccggagggcatgctgggatgggcccaccacccagtcctatggaccaacactctcagggttacccctctcctctcggtgggtccgaacacgcatcctcaccagtgcctgccagtgggcctagttcagggcctcaaatgagcagcggccctggtggagcaccgttggatggggctgatccacaagcactggggcaacaaaatcgcggtcctacaccattcaaccagaaccaattacatcagcttcgagcacagatcatggcctacaagatgctggccaggggccagcctctgcctgatcaccttcagatggccgtccaggggaagcggcctatgccagggatgcaacagcagatgccgaccttgcctccgccttccgttagtgccacggggcctgggcctggcccagggcctggcccaggacccggacctgggccagcacctccaaactactctcggcctcacggtatggggggacccaatatgcccccaccgggaccttcaggtgtgccacccggtatgccaggtcagcctccgggtggcccaccgaagccttggcccgagggccctatggctaacgctgctgcgccaacaagcacaccacagaagctgattcctccccagcccaccggcagaccttcacctgccccaccagccgtaccaccagccgcaagcccagtgatgcctccacaaacacagtctcctggtcagccagcgcagcccgcaccgatggttccactccatcaaaagcaaagccggattacgcctatccaaaagcccaggggtctcgatccagtggagatccttcaggaacgcgagtatcgcctgcaggcgagaatcgctcaccgaatccaggaattggagaatctacctggttccctggccggtgacctcaggacaaaagccacaattgaacttaaggcactgcggcttctgaacttccagaggcaactcaggcaggaagttgtcgtgtgcatgcgcagagacacggccttggagactgccctgaacgcaaaggcgtacaaacgctctaagcgccagtctctgcgggaggcacgaatcaccgagaaattagaaaagcagcaaaagatagagcaggaaagaaagcgcaggcagaaacatcaggaataccttaattcaatcttgcaacacgcaaaggattttaaagagtatcacaggtccgtaacaggcaaaatccagaaactcaccaaagctgtagccacatatcatgcgaataccgagcgagagcaaaagaaagagaatgaaagaattgagaaggagcgcatgagacgtcttatgggccagagggaaaaatcccgccgaggtctgggatctcagagctgggccaggatcttcgccgaccttagcgaccaccaaaatgattgcgtcacgagtgtcaccgaaagcctggttggtcagattctagcggcttgctcaggagaagagggtgaggtcgagtggaagggacgagatagagtcagacggctcagggccgaagacgaggagggataccgaaaactgattgatcaaaaaaaggataaacggctcgcctatcttctgcagcaaaccgatgagtatgtggctaacctgactgagctcgtccggcaacacaaagctgcacaagtggccaaggaaaaaaaaaagaagaaaaagaaaaagaaagccgaaaacgccgagggccaaactcccgcaataggaccagacggagagccgctggatgaaaccagccagatgtctgacctgcctgtaaaagtgatacatgttgagtccggcaagatacttacaggaacagacgctccgaaggccggacagctcgaggcctggttggagatgaatccaggctacgaggtggcacctagatctgattctgaggagtccgggtcagaagaggaggaagaagaggaagaggaagaacagccccaggccgcacaaccgccaacactgccagtcgaggagaagaagaaaatcccggatcctgatagtgatgacgtgagcgaggttgatgcacggcacataatcgaaaacgctaaacaggatgtagacgatgagtatggagtgagccaggcactggctcgtggcctgcaaagctactacgcagtggctcatgccgttacagagcgcgtagacaaacaatccgccttaatggtcaacggtgtcctgaagcagtaccaaattaaaggactggaatggctggtaagcctctacaataataacttaaacgggattcttgccgacgagatgggcctgggcaaaacaatacagactatcgccctcattacttacctgatggagcataagaggatcaacgggccttttctcatcatcgttccactgagtaccctcagcaactgggcttacgagttcgataagtgggctcctagcgtcgtgaaagtatcatataaaggttctcccgctgctagaagagcattcgtgccccagttgagatcgggaaaatttaacgtactgcttaccacatatgagtatatcattaaggataaacacatcttggctaagatacggtggaaatatatgatcgttgacgaaggccaccgaatgaagaaccaccactgtaagctgacacaagtccttaatacacactacgtcgctccacgccgactattgcttaccggtaccccgctccagaacaagcttcctgaactctgggctctactgaactttctgctcccgactatttttaaatcttgcagtacattcgagcagtggtttaacgctccctttgcaatgaccggcgaaaaggtagacctcaacgaagaggaaaccatccttatcatccgaagactccacaaggtactgaggcctttccttctcaggcgtctcaagaaggaagtagaggcgcaattgcctgagaaggtggagtacgtgatcaagtgcgatatgagcgccctgcaacgcgtactctacaggcatatgcaggccaaaggagtcctgcttacagatggttctgagaaagataagaagggtaagggtgggacaaagacccttatgaacacaatcatgcaactccggaaaatctgtaaccatccttatatgtttcagcacatcgaagagtccttctctgagcacctcggtttcaccggcggaatcgtccagggtcttgacctatatcgcgcaagcggaaaattcgaactgttagaccggattctgcctaaactgcgggcaacgaaccacaaggtccttctcttttgccagatgacgagtctgatgaccatcatggaggactacttcgcctatcgaggatttaaatacttgcgcttggatggcacaaccaaggctgaggataggggcatgcttctcaaaacattcaacgagcccggttcggagtactttatttttctcctgtcaacacgagcaggcggattgggcctcaacttacagtcagccgatacagtcataatcttcgatagtgactggaacccacatcaggatctccaagctcaagatagagctcaccggattgggcaacagaacgaagtgcgcgtccttcgcctctgtacggtcaattccgttgaagaaaagatcctggcagctgccaaatacaagcttaacgtggaccaaaaggtaattcaagctggcatgttcgatcagaagagtagcagccacgagcgcagagccttccttcaggccatactcgaacacgaagaacaggatgaggaagaagacgaagtacctgatgatgaaacagtgaaccagatgattgctcgccatgaagaggaatttgatctgtttatgcgcatggacctggataggagacgcgaggaagcaaggaatcccaagcgtaaaccccgactgatggaggaagatgaactgccaagctggatcataaaggatgatgctgaagttgagcgactaacatgtgaggaggaggaggaaaagatgtttggaagaggttctcgtcataggaaggaggttgactactcggactctttaacggagaagcagtggctgaagaccctcaaagctattgaagaggggacgctggaagaaattgaggaagaggttcgccagaagaaaagctccaggaaacgtaagcgagattctgacgctgggagcagcacccctaccacctccacccggtctcgagacaaagatgacgagtccaagaagcagaagaaaagaggcaggccgcctgccgagaaactctcgccaaatccacccaatcttaccaagaagatgaaaaagatagtagacgctgtgatcaagtacaaggatagcagcagcggcaggcaacttagtgaagtattcatccaattacctagcaggaaagagctgccagaatattacgaactcatcagaaagccagtcgatttcaagaaaattaaggaacgcatccgcaatcataaataccgcagcctcaacgatctggagaaagatgtgatgcttttgtgccaaaacgctcagacttttaaccttgaaggtagcctgatctatgaagatagcatcgtactccagtctgttttcacatcggtccgccagaaaattgagaaggaggatgacagtgagggagaagagagcgaggaagaagaggagggcgaagaagagggcagcgaatccgagtcccgatccgtgaaagtgaaaataaagctaggcaggaaagagaaggctcaagaccgcctcaaaggcggacgaaggcggccttcgagagggagtagagctaagccagtggtctcagatgacgatagcgaagaagagcaggaggaggatagatccgggagtggaagtgaggaggatta

SEQ ID NO: 276447 - DNA, 4854 bp, Artificial Sequence
  derived and/or modified sequence
atgtccactccagacccacccctgggcggaactcctcggccaggtccttccccgggccctggcccttcccctggagccatgctgggccctagcccgggtccctcgccgggctccgcccacagcatgatggggcccagcccagggccgccctcagcaggacaccccatccccacccaggggcctggagggtaccctcaggacaacatgcaccagatgcacaagcccatggagtccatgcatgagaagggcatgtcggacgacccgcgctacaaccagatgaaaggaatggggatgcggtcagggggccatgctgggatggggcccccgcccagccccatggaccagcactcccaaggttacccctcgcccctgggtggctctgagcatgcctctagtccagttccagccagtggcccgtcttcggggccccagatgtcttccgggccaggaggtgccccgctggatggtgctgacccccaggccttggggcagcagaaccggggcccaaccccatttaaccagaaccagctgcaccagctcagagctcagatcatggcctacaagatgctggccagggggcagcccctccccgaccacctgcagatggcggtgcagggcaagcggccgatgcccgggatgcagcagcagatgccaacgctacctccaccctcggtgtccgcaacaggacccggccctggccctggccctggccccggcccgggtcccggcccggcacctccaaattacagcaggcctcatggtatgggagggcccaacatgcctcccccaggaccctcgggcgtgccccccgggatgccaggccagcctcctggagggcctcccaagccctggcctgaaggacccatggcgaatgctgctgcccccacgagcacccctcagaagctgattcccccgcagccaacgggccgcccttcccccgcgccccctgccgtcccacccgccgcctcgcccgtgatgccaccgcagacccagtcccccgggcagccggcccagcccgcgcccatggtgccactgcaccagaagcagagccgcatcacccccatccagaagccgcggggcctcgaccctgtggagatcctgcaggagcgcgagtacaggctgcaggctcgcatcgcacaccgaattcaggaacttgaaaaccttcccgggtccctggccggggatttgcgaaccaaagcgaccattgagctcaaggccctcaggctgctgaacttccagaggcagctgcgccaggaggtggtggtgtgcatgcggagggacacagcgctggagacagccctcaatgctaaggcctacaagcgcagcaagcgccagtccctgcgcgaggcccgcatcactgagaagctggagaagcagcagaagatcgagcaggagcgcaagcgccggcagaagcaccaggaatacctcaatagcattctccagcatgccaaggatttcaaggaatatcacagatccgtcacaggcaaaatccagaagctgaccaaggcagtggccacgtaccatgccaacacggagcgggagcagaagaaagagaacgagcggatcgagaaggagcgcatgcggaggctcatggctgaagatgaggaggggtaccgcaagctcatcgaccagaagaaggacaagcgcctggcctacctcttgcagcagacagacgagtacgtggctaacctcacggagctggtgcggcagcacaaggctgcccaggtcgccaaggagaaaaagaagaaaaagaaaaagaagaaggcagaaaatgcagaaggacagacgcctgccattgggccggatggcgagcctctggacgagaccagccagatgagcgacctcccggtgaaggtgatccacgtggagagtgggaagatcctcacaggcacagatgcccccaaagccgggcagctggaggcctggctcgagatgaacccggggtatgaagtagctccgaggtctgatagtgaagaaagtggctcagaagaagaggaagaggaggaggaggaagagcagccgcaggcagcacagcctcccaccctgcccgtggaggagaagaagaagattccagatccagacagcgatgacgtctctgaggtggacgcgcggcacatcattgagaatgccaagcaagatgtcgatgatgaatatggcgtgtcccaggcccttgcacgtggcctgcagtcctactatgccgtggcccatgctgtcactgagagagtggacaagcagtcagcgcttatggtcaatggtgtcctcaaacagtaccagatcaaaggtttggagtggctggtgtccctgtacaacaacaacctgaacggcatcctggccgacgagatgggcctggggaagaccatccagaccatcgcgctcatcacgtacctcatggagcacaaacgcatcaatgggcccttcctcatcatcgtgcctctctcaacgctgtccaactgggcgtacgagtttgacaagtgggccccctccgtggtgaaggtgtcttacaagggatccccagcagcaagacgggcctttgtcccccagctccggagtgggaagttcaacgtcttgctgacgacgtacgagtacatcatcaaagacaagcacatcctcgccaagatccgttggaagtacatgattgtggacgaaggtcaccgcatgaagaaccaccactgcaagctgacgcaggtgctcaacacgcactatgtggcaccccgccgcctgctgctgacgggcacaccgctgcagaacaagcttcccgagctctgggcgctgctcaacttcctgctgcccaccatcttcaagagctgcagcaccttcgagcagtggtttaacgcaccctttgccatgaccggggaaaaggtggacctgaatgaggaggaaaccattctcatcatccggcgtctccacaaagtgctgcggcccttcttgctccgacgactcaagaaggaagtcgaggcccagttgcccgaaaaggtggagtacgtcatcaagtgcgacatgtctgcgctgcagcgagtgctctaccgccacatgcaggccaagggcgtgctgctgactgatggctccgagaaggacaagaagggcaaaggcggcaccaagaccctgatgaacaccatcatgcagctgcggaagatctgcaaccacccctacatgttccagcacatcgaggagtccttttccgagcacttggggttcactggcggcattgtccaagggctggacctgtaccgagcctcgggtaaatttgagcttcttgatagaattcttcccaaactccgagcaaccaaccacaaagtgctgctgttctgccaaatgacctccctcatgaccatcatggaagattactttgcgtatcgcggctttaaatacctcaggcttgatggaaccacgaaggcggaggaccggggcatgctgctgaaaaccttcaacgagcccggctctgagtacttcatcttcctgctcagcacccgggctggggggctcggcctgaacctccagtcggcagacactgtgatcatttttgacagcgactggaatcctcaccaggacctgcaagcgcaggaccgagcccaccgcatcgggcagcagaacgaggtgcgtgtgctccgcctctgcaccgtcaacagcgtggaggagaagatcctagctgcagccaagtacaagctcaacgtggaccagaaggtgatccaggccggcatgttcgaccagaagtcctccagccatgagcggcgcgccttcctgcaggccatcctggagcacgaggagcaggatgaggaggaagacgaggtgcccgacgacgagaccgtcaaccagatgatcgcccggcacgaggaggagtttgatctgttcatgcgcatggacctggaccgcaggcgcgaggaggcccgcaaccccaagcggaagccgcgcctcatggaggaggacgagctcccctcgtggatcatcaaggacgacgcggaggtggagcggctgacctgtgaggaggaggaggagaagatgttcggccgtggctcccgccaccgcaaggaggtggactacagcgactcactgacggagaagcagtggctcaagaccctgaaggccatcgaggagggcacgctggaggagatcgaagaggaggtccggcagaagaaatcatcacggaagcgcaagcgagacagcgacgccggctcctccaccccgaccaccagcacccgcagccgcgacaaggacgacgagagcaagaagcagaagaagcgcgggcggccgcctgccgagaaactctcccctaacccacccaacctcaccaagaagatgaagaagattgtggatgccgtgatcaagtacaaggacagcagcagtggacgtcagctcagcgaggtcttcatccagctgccctcgcgaaaggagctgcccgagtactacgagctcatccgcaagcccgtggacttcaagaagataaaggagcgcattcgcaaccacaagtaccgcagcctcaacgacctagagaaggacgtcatgctcctgtgccagaacgcacagaccttcaacctggagggctccctgatctatgaagactccatcgtcttgcagtcggtcttcaccagcgtgcggcagaaaatcgagaaggaggatgacagtgaaggcgaggagagtgaggaggaggaagagggcgaggaggaaggctccgaatccgaatctcggtccgtcaaagtgaagatcaagcttggccggaaggagaaggcacaggaccggctgaagggcggccggcggcggccgagccgagggtcccgagccaagccggtcgtgagtgacgatgacagtgaggaggaacaagaggaggaccgctcaggaagtggcagcgaagaagactga

SEQ ID NO: 276448 - DNA, 5796 bp, Artificial Sequence
  derived and/or modified sequence
ggagaggccgccgcggtgctgagggggaggggagccggcgagcgcgcgcgcagcgggggcgcgggtggcgcgcgtgtgtgtgaagggggggcggtggccgaggcgggcgggcgcgcgcgcgaggcttcccctcgtttggcggcggcggcggcttctttgtttcgtgaagagaagcgagacgcccattctgcccccggccccgcgcggaggggcgggggaggcgccgggaagtcgacggcgccggcggctcctgcaggaggccactgtctgcagctcccgtgaagatgtccactccagacccacccctgggcggaactcctcggccaggtccttccccgggccctggcccttcccctggagccatgctgggccctagcccgggtccctcgccgggctccgcccacagcatgatggggcccagcccagggccgccctcagcaggacaccccatccccacccaggggcctggagggtaccctcaggacaacatgcaccagatgcacaagcccatggagtccatgcatgagaagggcatgtcggacgacccgcgctacaaccagatgaaaggaatggggatgcggtcagggggccatgctgggatggggcccccgcccagccccatggaccagcactcccaaggttacccctcgcccctgggtggctctgagcatgcctctagtccagttccagccagtggcccgtcttcggggccccagatgtcttccgggccaggaggtgccccgctggatggtgctgacccccaggccttggggcagcagaaccggggcccaaccccatttaaccagaaccagctgcaccagctcagagctcagatcatggcctacaagatgctggccagggggcagcccctccccgaccacctgcagatggcggtgcagggcaagcggccgatgcccgggatgcagcagcagatgccaacgctacctccaccctcggtgtccgcaacaggacccggccctggccctggccctggccccggcccgggtcccggcccggcacctccaaattacagcaggcctcatggtatgggagggcccaacatgcctcccccaggaccctcgggcgtgccccccgggatgccaggccagcctcctggagggcctcccaagccctggcctgaaggacccatggcgaatgctgctgcccccacgagcacccctcagaagctgattcccccgcagccaacgggccgcccttcccccgcgccccctgccgtcccacccgccgcctcgcccgtgatgccaccgcagacccagtcccccgggcagccggcccagcccgcgcccatggtgccactgcaccagaagcagagccgcatcacccccatccagaagccgcggggcctcgaccctgtggagatcctgcaggagcgcgagtacaggctgcaggctcgcatcgcacaccgaattcaggaacttgaaaaccttcccgggtccctggccggggatttgcgaaccaaagcgaccattgagctcaaggccctcaggctgctgaacttccagaggcagctgcgccaggaggtggtggtgtgcatgcggagggacacagcgctggagacagccctcaatgctaaggcctacaagcgcagcaagcgccagtccctgcgcgaggcccgcatcactgagaagctggagaagcagcagaagatcgagcaggagcgcaagcgccggcagaagcaccaggaatacctcaatagcattctccagcatgccaaggatttcaaggaatatcacagatccgtcacaggcaaaatccagaagctgaccaaggcagtggccacgtaccatgccaacacggagcgggagcagaagaaagagaacgagcggatcgagaaggagcgcatgcggaggctcatgggacagagggaaaagagcaggcgcgggcttgggagtcagtcctgggctcggatatttgctgatctctctgatcatcagaatgactgtgtgacctcagtgactgagtcgctggttgggcagatattggcagcgtgttctggtgaggagggggaagtggagtggaaggggagggacagggtaagaaggcttcgggctgaagatgaggaggggtaccgcaagctcatcgaccagaagaaggacaagcgcctggcctacctcttgcagcagacagacgagtacgtggctaacctcacggagctggtgcggcagcacaaggctgcccaggtcgccaaggagaaaaagaagaaaaagaaaaagaagaaggcagaaaatgcagaaggacagacgcctgccattgggccggatggcgagcctctggacgagaccagccagatgagcgacctcccggtgaaggtgatccacgtggagagtgggaagatcctcacaggcacagatgcccccaaagccgggcagctggaggcctggctcgagatgaacccggggtatgaagtagctccgaggtctgatagtgaagaaagtggctcagaagaagaggaagaggaggaggaggaagagcagccgcaggcagcacagcctcccaccctgcccgtggaggagaagaagaagattccagatccagacagcgatgacgtctctgaggtggacgcgcggcacatcattgagaatgccaagcaagatgtcgatgatgaatatggcgtgtcccaggcccttgcacgtggcctgcagtcctactatgccgtggcccatgctgtcactgagagagtggacaagcagtcagcgcttatggtcaatggtgtcctcaaacagtaccagatcaaaggtttggagtggctggtgtccctgtacaacaacaacctgaacggcatcctggccgacgagatgggcctggggaagaccatccagaccatcgcgctcatcacgtacctcatggagcacaaacgcatcaatgggcccttcctcatcatcgtgcctctctcaacgctgtccaactgggcgtacgagtttgacaagtgggccccctccgtggtgaaggtgtcttacaagggatccccagcagcaagacgggcctttgtcccccagctccggagtgggaagttcaacgtcttgctgacgacgtacgagtacatcatcaaagacaagcacatcctcgccaagatccgttggaagtacatgattgtggacgaaggtcaccgcatgaagaaccaccactgcaagctgacgcaggtgctcaacacgcactatgtggcaccccgccgcctgctgctgacgggcacaccgctgcagaacaagcttcccgagctctgggcgctgctcaacttcctgctgcccaccatcttcaagagctgcagcaccttcgagcagtggtttaacgcaccctttgccatgaccggggaaaaggtggacctgaatgaggaggaaaccattctcatcatccggcgtctccacaaagtgctgcggcccttcttgctccgacgactcaagaaggaagtcgaggcccagttgcccgaaaaggtggagtacgtcatcaagtgcgacatgtctgcgctgcagcgagtgctctaccgccacatgcaggccaagggcgtgctgctgactgatggctccgagaaggacaagaagggcaaaggcggcaccaagaccctgatgaacaccatcatgcagctgcggaagatctgcaaccacccctacatgttccagcacatcgaggagtccttttccgagcacttggggttcactggcggcattgtccaagggctggacctgtaccgagcctcgggtaaatttgagcttcttgatagaattcttcccaaactccgagcaaccaaccacaaagtgctgctgttctgccaaatgacctccctcatgaccatcatggaagattactttgcgtatcgcggctttaaatacctcaggcttgatggaaccacgaaggcggaggaccggggcatgctgctgaaaaccttcaacgagcccggctctgagtacttcatcttcctgctcagcacccgggctggggggctcggcctgaacctccagtcggcagacactgtgatcatttttgacagcgactggaatcctcaccaggacctgcaagcgcaggaccgagcccaccgcatcgggcagcagaacgaggtgcgtgtgctccgcctctgcaccgtcaacagcgtggaggagaagatcctagctgcagccaagtacaagctcaacgtggaccagaaggtgatccaggccggcatgttcgaccagaagtcctccagccatgagcggcgcgccttcctgcaggccatcctggagcacgaggagcaggatgaggaggaagacgaggtgcccgacgacgagaccgtcaaccagatgatcgcccggcacgaggaggagtttgatctgttcatgcgcatggacctggaccgcaggcgcgaggaggcccgcaaccccaagcggaagccgcgcctcatggaggaggacgagctcccctcgtggatcatcaaggacgacgcggaggtggagcggctgacctgtgaggaggaggaggagaagatgttcggccgtggctcccgccaccgcaaggaggtggactacagcgactcactgacggagaagcagtggctcaagaccctgaaggccatcgaggagggcacgctggaggagatcgaagaggaggtccggcagaagaaatcatcacggaagcgcaagcgagacagcgacgccggctcctccaccccgaccaccagcacccgcagccgcgacaaggacgacgagagcaagaagcagaagaagcgcgggcggccgcctgccgagaaactctcccctaacccacccaacctcaccaagaagatgaagaagattgtggatgccgtgatcaagtacaaggacagcagcagtggacgtcagctcagcgaggtcttcatccagctgccctcgcgaaaggagctgcccgagtactacgagctcatccgcaagcccgtggacttcaagaagataaaggagcgcattcgcaaccacaagtaccgcagcctcaacgacctagagaaggacgtcatgctcctgtgccagaacgcacagaccttcaacctggagggctccctgatctatgaagactccatcgtcttgcagtcggtcttcaccagcgtgcggcagaaaatcgagaaggaggatgacagtgaaggcgaggagagtgaggaggaggaagagggcgaggaggaaggctccgaatccgaatctcggtccgtcaaagtgaagatcaagcttggccggaaggagaaggcacaggaccggctgaagggcggccggcggcggccgagccgagggtcccgagccaagccggtcgtgagtgacgatgacagtgaggaggaacaagaggaggaccgctcaggaagtggcagcgaagaagactgagccccgacattccagtctcgaccccgagcccctcgttccagagctgagatggcataggccttagcagtaacgggtagcagcagatgtagtttcagacttggagtaaaactgtataaacaaaagaatcttccatatttatacagcagagaagctgtaggactgtttgtgactggccctgtcctggcatcagtagcatctgtaacagcattaactgtcttaaagagagagagagagaattccgaattggggaacacacgatacctgtttttcttttccgttgctggcagtactgttgcgccgcagtttggagtcactgtagttaagtgtggatgcatgtgcgtcaccgtccactcctcctactgtattttattggacaggtcagactcgccgggggcccggcgagggtatgtcagtgtcactggatgtcaaacagtaataaattaaaccaacaacaaaacgcacagcc

SEQ ID NO: 276449 - protein, 1616 aa, Artificial Sequence
  derived and/or modified sequence
MSTPDPPLGGTPRPGPSPGPGPSPGAMLGPSPGPSPGSAHSMMGPSPGPPSAGHPIPTQGPGGYPQDNMHQMHKPMESMHEKGMSDDPRYNQMKGMGMRSGGHAGMGPPPSPMDQHSQGYPSPLGGSEHASSPVPASGPSSGPQMSSGPGGAPLDGADPQALGQQNRGPTPFNQNQLHQLRAQIMAYKMLARGQPLPDHLQMAVQGKRPMPGMQQQMPTLPPPSVSATGPGPGPGPGPGPGPGPAPPNYSRPHGMGGPNMPPPGPSGVPPGMPGQPPGGPPKPWPEGPMANAAAPTSTPQKLIPPQPTGRPSPAPPAVPPAASPVMPPQTQSPGQPAQPAPMVPLHQKQSRITPIQKPRGLDPVEILQEREYRLQARIAHRIQELENLPGSLAGDLRTKATIELKALRLLNFQRQLRQEVVVCMRRDTALETALNAKAYKRSKRQSLREARITEKLEKQQKIEQERKRRQKHQEYLNSILQHAKDFKEYHRSVTGKIQKLTKAVATYHANTEREQKKENERIEKERMRRLMAEDEEGYRKLIDQKKDKRLAYLLQQTDEYVANLTELVRQHKAAQVAKEKKKKKKKKKAENAEGQTPAIGPDGEPLDETSQMSDLPVKVIHVESGKILTGTDAPKAGQLEAWLEMNPGYEVAPRSDSEESGSEEEEEEEEEEQPQAAQPPTLPVEEKKKIPDPDSDDVSEVDARHIIENAKQDVDDEYGVSQALARGLQSYYAVAHAVTERVDKQSALMVNGVLKQYQIKGLEWLVSLYNNNLNGILADEMGLGKTIQTIALITYLMEHKRINGPFLIIVPLSTLSNWAYEFDKWAPSVVKVSYKGSPAARRAFVPQLRSGKFNVLLTTYEYIIKDKHILAKIRWKYMIVDEGHRMKNHHCKLTQVLNTHYVAPRRLLLTGTPLQNKLPELWALLNFLLPTIFKSCSTFEQWFNAPFAMTGEKVDLNEEETILIIRRLHKVLRPFLLRRLKKEVEAQLPEKVEYVIKCDMSALQRVLYRHMQAKGVLLTDGSEKDKKGKGGTKTLMNTIMQLRKICNHPYMFQHIEESFSEHLGFTGGIVQGLDLYRASGKFELLDRILPKLRATNHKVLLFCQMTSLMTIMEDYFAYRGFKYLRLDGTTKAEDRGMLLKTFNEPGSEYFIFLLSTRAGGLGLNLQSADTVIIFDSDWNPHQDLQAQDRAHRIGQQNEVRVLRLCTVNSVEEKILAAAKYKLNVDQKVIQAGMFDQKSSSHERRAFLQAILEHEEQDEEEDEVPDDETVNQMIARHEEEFDLFMRMDLDRRREEARNPKRKPRLMEEDELPSWIIKDDAEVERLTCEEEEEKMFGRGSRHRKEVDYSDSLTEKQWLKTLKAIEEGTLEEIEEEVRQKKSSRKRKRDSDAGSSTPTTSTRSRDKDDESKKQKKRGRPPAEKLSPNPPNLTKKMKKIVDAVIKYKDSSGRQLSEVFIQLPSRKELPEYYELIRKPVDFKKIKERIRNHKYRSLNDLEKDVMLLCQNAQTFNLEGSLIYEDSIVLQSVFTSVRQKIEKEDDSEGEESEEEEEGEEEGSESESRSVKVKIKLGRKEKAQDRLKGGRRRPSRGSRAKPVVSDDDSEEEQEEDRSGSGSEED

SEQ ID NO: 276450 - DNA, 4851 bp, Artificial Sequence
  derived and/or modified sequence
atgagcacccccgacccccccctgggcggcacccccagacccggccccagccccggccccggccccagccccggcgccatgctgggccccagccccggccccagccccggcagcgcccacagcatgatgggccccagccccggcccccccagcgccggccaccccatccccacccagggccccggcggctacccccaggacaacatgcaccagatgcacaagcccatggagagcatgcacgagaagggcatgagcgacgaccccagatacaaccagatgaagggcatgggcatgagaagcggcggccacgccggcatgggccccccccccagccccatggaccagcacagccagggctaccccagccccctgggcggcagcgagcacgccagcagccccgtgcccgccagcggccccagcagcggcccccagatgagcagcggccccggcggcgcccccctggacggcgccgacccccaggccctgggccagcagaacagaggccccacccccttcaaccagaaccagctgcaccagctgagagcccagatcatggcctacaagatgctggccagaggccagcccctgcccgaccacctgcagatggccgtgcagggcaagagacccatgcccggcatgcagcagcagatgcccaccctgcccccccccagcgtgagcgccaccggccccggccccggccccggccccggccccggccccggccccggccccgccccccccaactacagcagaccccacggcatgggcggccccaacatgcccccccccggccccagcggcgtgccccccggcatgcccggccagccccccggcggcccccccaagccctggcccgagggccccatggccaacgccgccgcccccaccagcaccccccagaagctgatccccccccagcccaccggcagacccagccccgccccccccgccgtgccccccgccgccagccccgtgatgcccccccagacccagagccccggccagcccgcccagcccgcccccatggtgcccctgcaccagaagcagagcagaatcacccccatccagaagcccagaggcctggaccccgtggagatcctgcaggagagagagtacagactgcaggccagaatcgcccacagaatccaggagctggagaacctgcccggcagcctggccggcgacctgagaaccaaggccaccatcgagctgaaggccctgagactgctgaacttccagagacagctgagacaggaggtggtggtgtgcatgagaagagacaccgccctggagaccgccctgaacgccaaggcctacaagagaagcaagagacagagcctgagagaggccagaatcaccgagaagctggagaagcagcagaagatcgagcaggagagaaagagaagacagaagcaccaggagtacctgaacagcatcctgcagcacgccaaggacttcaaggagtaccacagaagcgtgaccggcaagatccagaagctgaccaaggccgtggccacctaccacgccaacaccgagagagagcagaagaaggagaacgagagaatcgagaaggagagaatgagaagactgatggccgaggacgaggagggctacagaaagctgatcgaccagaagaaggacaagagactggcctacctgctgcagcagaccgacgagtacgtggccaacctgaccgagctggtgagacagcacaaggccgcccaggtggccaaggagaagaagaagaagaagaagaagaagaaggccgagaacgccgagggccagacccccgccatcggccccgacggcgagcccctggacgagaccagccagatgagcgacctgcccgtgaaggtgatccacgtggagagcggcaagatcctgaccggcaccgacgcccccaaggccggccagctggaggcctggctggagatgaaccccggctacgaggtggcccccagaagcgacagcgaggagagcggcagcgaggaggaggaggaggaggaggaggaggagcagccccaggccgcccagccccccaccctgcccgtggaggagaagaagaagatccccgaccccgacagcgacgacgtgagcgaggtggacgccagacacatcatcgagaacgccaagcaggacgtggacgacgagtacggcgtgagccaggccctggccagaggcctgcagagctactacgccgtggcccacgccgtgaccgagagagtggacaagcagagcgccctgatggtgaacggcgtgctgaagcagtaccagatcaagggcctggagtggctggtgagcctgtacaacaacaacctgaacggcatcctggccgacgagatgggcctgggcaagaccatccagaccatcgccctgatcacctacctgatggagcacaagagaatcaacggccccttcctgatcatcgtgcccctgagcaccctgagcaactgggcctacgagttcgacaagtgggcccccagcgtggtgaaggtgagctacaagggcagccccgccgccagaagagccttcgtgccccagctgagaagcggcaagttcaacgtgctgctgaccacctacgagtacatcatcaaggacaagcacatcctggccaagatcagatggaagtacatgatcgtggacgagggccacagaatgaagaaccaccactgcaagctgacccaggtgctgaacacccactacgtggcccccagaagactgctgctgaccggcacccccctgcagaacaagctgcccgagctgtgggccctgctgaacttcctgctgcccaccatcttcaagagctgcagcaccttcgagcagtggttcaacgcccccttcgccatgaccggcgagaaggtggacctgaacgaggaggagaccatcctgatcatcagaagactgcacaaggtgctgagacccttcctgctgagaagactgaagaaggaggtggaggcccagctgcccgagaaggtggagtacgtgatcaagtgcgacatgagcgccctgcagagagtgctgtacagacacatgcaggccaagggcgtgctgctgaccgacggcagcgagaaggacaagaagggcaagggcggcaccaagaccctgatgaacaccatcatgcagctgagaaagatctgcaaccacccctacatgttccagcacatcgaggagagcttcagcgagcacctgggcttcaccggcggcatcgtgcagggcctggacctgtacagagccagcggcaagttcgagctgctggacagaatcctgcccaagctgagagccaccaaccacaaggtgctgctgttctgccagatgaccagcctgatgaccatcatggaggactacttcgcctacagaggcttcaagtacctgagactggacggcaccaccaaggccgaggacagaggcatgctgctgaagaccttcaacgagcccggcagcgagtacttcatcttcctgctgagcaccagagccggcggcctgggcctgaacctgcagagcgccgacaccgtgatcatcttcgacagcgactggaacccccaccaggacctgcaggcccaggacagagcccacagaatcggccagcagaacgaggtgagagtgctgagactgtgcaccgtgaacagcgtggaggagaagatcctggccgccgccaagtacaagctgaacgtggaccagaaggtgatccaggccggcatgttcgaccagaagagcagcagccacgagagaagagccttcctgcaggccatcctggagcacgaggagcaggacgaggaggaggacgaggtgcccgacgacgagaccgtgaaccagatgatcgccagacacgaggaggagttcgacctgttcatgagaatggacctggacagaagaagagaggaggccagaaaccccaagagaaagcccagactgatggaggaggacgagctgcccagctggatcatcaaggacgacgccgaggtggagagactgacctgcgaggaggaggaggagaagatgttcggcagaggcagcagacacagaaaggaggtggactacagcgacagcctgaccgagaagcagtggctgaagaccctgaaggccatcgaggagggcaccctggaggagatcgaggaggaggtgagacagaagaagagcagcagaaagagaaagagagacagcgacgccggcagcagcacccccaccaccagcaccagaagcagagacaaggacgacgagagcaagaagcagaagaagagaggcagaccccccgccgagaagctgagccccaacccccccaacctgaccaagaagatgaagaagatcgtggacgccgtgatcaagtacaaggacagcagcggcagacagctgagcgaggtgttcatccagctgcccagcagaaaggagctgcccgagtactacgagctgatcagaaagcccgtggacttcaagaagatcaaggagagaatcagaaaccacaagtacagaagcctgaacgacctggagaaggacgtgatgctgctgtgccagaacgcccagaccttcaacctggagggcagcctgatctacgaggacagcatcgtgctgcagagcgtgttcaccagcgtgagacagaagatcgagaaggaggacgacagcgagggcgaggagagcgaggaggaggaggagggcgaggaggagggcagcgagagcgagagcagaagcgtgaaggtgaagatcaagctgggcagaaaggagaaggcccaggacagactgaagggcggcagaagaagacccagcagaggcagcagagccaagcccgtggtgagcgacgacgacagcgaggaggagcaggaggaggacagaagcggcagcggcagcgaggaggactag

SEQ ID NO: 276451 - DNA, 4851 bp, Artificial Sequence
  derived and/or modified sequence
atgagtactcctgacccaccgctgggagggacgcctagacctggcccaagcccaggacccgggccctctcccggagctatgcttgggcccagcccgggtccctcccccggttccgcccatagtatgatgggaccatcccccggcccacccagcgcaggccacccgatccctacacaaggacccgggggctatccccaggacaacatgcaccaaatgcataaacccatggaatcgatgcatgaaaagggcatgtccgatgaccctagatacaatcagatgaaaggtatggggatgcggtccggtggtcatgctggtatgggcccccctccctctcccatggatcaacactcacaaggctatccctcccccctgggcggtagcgaacacgcgagttccccggtgccagcgagtggaccttcctctggcccacaaatgtctagcggcccagggggagccccactagatggagccgatccacaggcgctcggacagcagaatagggggccaaccccgttcaaccagaaccaactacatcagctgagagcccaaataatggcatacaagatgctggcacgcggtcagccattacctgaccacttacagatggccgtccagggtaaacggcctatgcccggaatgcagcagcaaatgccgacgttacccccacctagtgtcagcgctacaggcccgggtcctggaccaggtccagggccgggccctggcccgggacctgcgccacccaactacagtcgcccccacggaatgggaggccctaatatgccaccgcccggcccaagtggggttccacccggcatgccaggacagccgcccggcggcccccccaaaccttggcccgagggacctatggccaacgctgcagcaccaactagcacaccacagaaactgatcccccctcagccaactggacgtcccagtcctgctccacctgccgtccctccagctgcttctcccgtaatgcctcctcagactcagagcccaggccagccagcacagcctgccccaatggtaccacttcatcagaagcaatccagaatcactcccatacaaaagccaagaggcctggatccggtcgagatccttcaggaaagggagtacaggctgcaggcaagaatcgcacatcggatacaggagctcgagaatctccccggatctctcgccggcgatctcagaaccaaagccacgattgagctgaaagccctacggctcttgaattttcaacggcagctcagacaagaagtggtggtatgcatgcgcagggacaccgcgctcgaaacagcccttaatgcaaaagcttataagagatccaagagacagtctctgcgggaggcacgcatcacagagaaactggagaagcagcagaaaatagagcaagagcggaaaaggagacagaaacaccaggaatatctgaactcaatattgcagcacgcaaaggacttcaaggagtatcaccgatccgtgacaggcaagattcagaagctgacgaaggccgttgccacatatcatgccaacacggaacgggaacagaagaaggagaatgaacggattgaaaaagagagaatgaggcggctcatggccgaggacgaagagggctaccggaaactcattgaccagaaaaaggataaaagactggcctatcttctgcagcagacagacgaatacgttgcaaacctcaccgaactggtcaggcagcacaaagccgcccaagttgctaaggaaaagaaaaagaagaagaagaagaagaaagcagagaacgcagaggggcaaacaccggccataggcccggatggggaacccttggatgagaccagccagatgagcgatctccctgttaaggttatacacgtggagtcggggaaaattctgaccggaacagacgccccaaaagccggacagttggaagcttggcttgagatgaatccaggctatgaggtcgcccctcgcagcgactctgaggagagcggatccgaagaagaggaagaggaagaggaagaggagcagccacaggctgcacagccacccaccctacctgtcgaagagaaaaaaaagatccccgaccctgattctgacgatgtgagcgaggtcgacgctagacatatcatagaaaatgctaaacaggatgtggacgacgagtacggagtgtcgcaagctctggctcgcggcctgcagtcatattatgcggtggcacatgctgtcactgagcgggtagataagcagagtgccctgatggtgaacggagtcctgaaacagtaccagattaagggcctggagtggctggtgagcctctacaataacaacttgaatggcattttggctgacgagatgggcctaggaaaaacaatccagaccatcgcactgatcacctatcttatggagcataagcgaataaacgggccctttttgatcattgtccccctgtccactctatccaattgggcctatgagttcgataaatgggccccttctgttgtgaaagtgtcttacaaagggagtccggccgctaggcgcgcttttgtgccacagctgcggagcgggaaatttaatgtgcttttgacaacctatgagtatatcatcaaagataaacacattctcgcaaagatccgctggaagtatatgattgtggatgagggccatcgaatgaagaatcatcattgtaagctgacacaggtgttgaatacccattacgtcgcgcctagacgcctgctcctcacaggcacaccacttcagaacaaattgccagaactttgggccctcctcaattttctgctgcccaccattttcaaatcttgctccactttcgagcagtggtttaacgctcctttcgctatgactggcgagaaagtagaccttaatgaggaagagactattctcatcatccggaggctccataaggtactccgaccgttcctgttgcgtaggctcaagaaagaggtggaagcacagctcccagagaaggtggagtatgtgattaagtgtgatatgtctgccctacagagagtcctgtaccgtcatatgcaagccaaaggtgtcctgctgacagacggctctgaaaaggacaaaaagggcaaaggcggaacaaaaaccttaatgaacactattatgcagctgcgcaagatctgcaaccacccctacatgttccaacatatagaggagagtttcagcgagcatttagggtttaccggtggcattgtgcagggcctcgacttgtatagggccagtgggaagttcgaactgctggatcgcattctgcccaagcttcgcgcgaccaaccataaggtgcttttgttctgccaaatgaccagcctaatgacgattatggaagactactttgcttaccgcggatttaagtatttaaggctggacgggacaaccaaggcggaggataggggcatgctgctaaaaacattcaacgagccggggagcgaatactttatctttttgctgagcaccagagctggaggtctgggtctgaatttgcagtcagctgataccgtaatcatatttgactctgactggaacccacaccaggatttgcaggctcaggacagagcccaccgtattggccagcagaacgaagtccgggttttgcgactgtgcactgtcaatagcgtggaagaaaagatcctcgccgctgcgaaatataagctgaacgtggaccaaaaagttatccaggccggcatgttcgaccagaagagttcgagccatgagagacgtgcctttctgcaggccattctcgaacatgaagagcaggatgaggaggaagacgaagtgcctgatgatgagacagtcaaccagatgattgcacgccatgaggaggaatttgatctgttcatgaggatggatctggaccgcagaagagaagaagcccgcaatccaaagagaaaacccagactgatggaagaggatgaacttccatcttggattatcaaagacgacgctgaagtggagcgcctcacttgtgaggaggaagaggagaaaatgttcgggagagggagccgacaccgcaaggaagtggactacagcgacagtttgaccgagaagcagtggctcaagacactaaaagcaatagaggagggcacacttgaagaaatcgaggaggaggtgaggcagaaaaaaagttcacgtaagcgtaagcgggacagtgatgctggcagtagcacgccaaccacctccacaaggagtagggataaagatgatgaaagtaaaaagcaaaagaagcgcgggcggcccccagcggaaaaactgtctccgaatccgccgaacctgaccaagaaaatgaaaaagattgtggatgccgtcatcaaatacaaggacagcagtggccgccaactcagcgaagtgttcatccagctcccaagtcgaaaggagctgcctgaatattacgaactcatcaggaaacctgtcgattttaagaaaatcaaggagcggattaggaaccataagtataggagccttaatgaccttgaaaaggacgtcatgctgttatgccagaacgcacaaacctttaacctcgaagggagcctgatctacgaagactccattgtgcttcagtctgtgttcacgagtgtcaggcagaagatcgaaaaagaggacgacagtgaaggcgaggaaagcgaggaggaggaggaaggggaagaagagggcagcgagagtgaatctcggtccgtgaaagtgaagataaaactgggtaggaaggaaaaggcccaggacagactcaagggaggacgtcgccgacctagcaggggctctagagcaaaacctgtggttagcgacgatgactccgaggaggaacaggaagaggatcggtcaggatccggttctgaagaggattag

SEQ ID NO: 276452 - DNA, 4851 bp, Artificial Sequence
  derived and/or modified sequence
atgagcaccccagacccccccctgggcggcaccccccggcccggccccagccctggccctggccccagccctggggccatgctgggccccagccctggccccagccctggcagcgcccacagcatgatgggccccagccctggccccccatctgctggccaccccatccccacccagggccctgggggctacccccaggacaacatgcaccagatgcacaagcccatggagagcatgcatgagaagggcatgtctgatgacccccgctacaaccagatgaagggcatgggcatgaggtctgggggccacgccggcatgggccccccacccagccccatggaccagcacagccagggctaccccagccccctgggcggcagcgagcacgccagcagccctgtgcctgccagcggccccagcagcggcccccagatgagcagcggccctggaggagcccccctggatggagctgacccccaggccctgggccagcagaacagaggccccacccccttcaaccagaaccagctgcaccagctgcgggcccagatcatggcctacaagatgctggcccggggccagcccctgcctgaccacctgcagatggctgtgcagggcaagaggcccatgcctggcatgcagcagcagatgcccaccctgcccccacccagcgtgtctgccaccggccctggccctggccctggccctggccctggccctggccctggccctgccccacccaactacagccggccccacggcatgggcggccccaacatgcctcctcctggccccagcggcgtgcccccaggcatgcctggccagcccccaggcggcccccccaagccctggccagagggccccatggccaatgctgctgcccccaccagcaccccccagaagctgatccccccccagcccaccggccggcccagccctgcccctcctgctgtgcccccagctgccagccctgtgatgccaccccagacccagagccctggccagcctgcccagcctgcccccatggtgcccctgcaccagaagcagagccgcatcacccccatccagaagccccggggcctggaccctgtggagatcctgcaggagcgggagtaccgcctgcaggcccgcatcgcccaccgcatccaggagctggagaacctgcccggcagcctggccggggacctgcggaccaaggccaccatcgagctgaaggccctgcggctgctgaacttccagaggcagctgcggcaggaggtggtggtgtgcatgagaagagacacagccctggagacagccctgaatgccaaggcctacaagaggagcaagaggcagagcctgcgggaggcccgcatcacagagaagctggagaagcagcagaagattgagcaggagaggaagaggcggcagaagcaccaggagtacctgaacagcatcctgcagcacgccaaggacttcaaggagtaccacaggtctgtgacaggcaagatccagaagctgaccaaggctgtggccacctaccacgccaacacagagcgggagcagaagaaggaaaatgaaagaattgagaaggagaggatgaggcggctgatggctgaagatgaggagggctacaggaagctgattgaccagaagaaggacaagaggctggcctacctgctgcagcagacagatgaatatgtggccaacctgacagagctggtgcggcagcacaaggccgcccaggtggccaaggagaagaagaagaagaagaagaagaagaaggccgagaatgctgagggccagaccccagccatcggcccagatggagagcccctggatgagaccagccagatgtctgacctgcctgtgaaggtgattcatgtggagagcggcaagatcctgactggaacagatgcccccaaggccggccagctggaggcctggctggagatgaaccctggctatgaggtggcccccaggagtgacagcgaggagagcggcagcgaggaggaggaggaggaggaggaggaggagcagccccaggccgcccagccccccaccctgcctgtggaggagaagaagaagatcccagaccctgacagtgatgatgtgtctgaggtggatgcccggcacatcattgaaaatgccaagcaggatgtggatgatgaatatggagtgtcccaggccctggcccggggcctgcagagctactatgctgtggcccatgctgtgacagagcgggtggacaagcagagcgccctgatggtgaatggagtgctgaagcagtaccagatcaagggcctggagtggctggtgtccctgtacaacaacaacctgaatggcatcctggctgatgagatgggcctgggcaagaccatccagaccatcgccctgatcacctacctgatggagcacaagaggatcaatggccccttcctgatcatcgtgcccctgagcaccctgagcaactgggcctatgaatttgacaagtgggcccccagcgtggtgaaggtgtcctacaagggcagccctgctgcccggcgggcctttgtgccccagctgcggagcggcaagttcaacgtgctgctgaccacctatgagtacatcatcaaggacaagcacatcctggccaagatccgctggaagtacatgattgtggatgagggccacaggatgaagaaccaccactgcaagctgacccaggtgctgaacacccactacgtggccccccggcggctgctgctgaccggcacccccctgcagaacaagctgcctgagctgtgggccctgctgaacttcctgctgcccaccatcttcaagagctgcagcacctttgagcagtggttcaatgccccctttgccatgaccggggagaaggtggacctgaatgaggaggagaccatcctgatcatccggcggctgcacaaggtgctgcggcccttcctgctgcggcggctgaagaaggaggtggaggcccagctgcctgagaaggtggagtatgtgatcaagtgtgacatgtctgccctgcagagggtgctgtaccgccacatgcaggccaagggcgtgctgctgacagatggcagcgagaaggacaagaagggcaaaggaggcaccaagaccctgatgaacaccatcatgcagctgaggaagatctgcaaccacccctacatgttccagcacatcgaggagagcttcagcgagcacctgggcttcaccggcggcatcgtgcagggcctggacctgtaccgggccagcggcaagtttgagctgctggaccgcatcctgcccaagctgcgggccaccaaccacaaggtgctgctcttctgccagatgaccagcctgatgaccatcatggaggactactttgcctaccggggcttcaagtacctgcggctggatggcaccaccaaggcagaagatcggggcatgctgctgaagaccttcaatgaacctggcagcgagtacttcatcttcctgctgagcacccgggccggcggcctgggcctgaacctgcagagcgctgacaccgtcatcatctttgacagcgactggaacccccaccaggacctgcaggcccaggaccgggcccacagaattggccagcagaatgaggtgcgggtgctgcggctgtgcaccgtgaacagcgtggaggagaagatcctggccgccgccaagtacaagctgaatgtggaccagaaggtgatccaggccggcatgtttgaccagaagagcagcagccatgaaagaagagccttcctgcaggccatcctggagcacgaggagcaggatgaggaggaggatgaggtgcctgatgatgagaccgtgaaccagatgattgcccggcatgaggaggagtttgacctcttcatgaggatggacctggacagaagaagagaggaggccaggaaccccaagaggaagccccggctgatggaggaggatgagctgcccagctggatcatcaaggatgatgctgaggtggagcggctgacctgtgaggaggaggaggagaagatgtttggccggggcagccgccacaggaaggaggtggactacagcgacagcctgacagagaagcagtggctgaagaccctgaaggccatcgaggagggcaccctggaggagattgaggaggaggtgcggcagaagaagagcagcaggaagaggaagagggacagtgatgctggcagcagcacccccaccaccagcaccaggagccgggacaaggatgatgagagcaagaagcagaagaagaggggccggcccccagctgagaagctgagccccaacccccccaacctgaccaagaagatgaagaagatcgtggatgctgtgatcaagtacaaggacagcagcggccggcagctgtctgaggtgttcatccagctgcccagcaggaaggagctgcctgagtactatgagctgatcaggaagcctgtggacttcaagaagatcaaggagcgcatccggaaccacaagtaccgcagcctgaatgacctggagaaggatgtgatgctgctgtgccagaatgcccagaccttcaacctggagggcagcctcatctatgaagattccatcgtgctgcagagcgtcttcacctctgtgcggcagaagattgagaaggaggatgattctgagggggaggagagcgaggaggaggaggagggggaggaggagggcagcgagagcgagagccgctctgtgaaggtgaagatcaagctgggcaggaaggagaaggcccaggaccggctgaagggcggcagaagaagacccagccggggcagccgggccaagcctgtggtgtctgatgatgacagcgaggaggagcaggaggaggacagaagtggcagcggctctgaagaagattag

SEQ ID NO: 276453 - DNA, 4851 bp, Artificial Sequence
  derived and/or modified sequence
atgagcacccccgacccccccctgggcggcaccccccggcccggccccagcccggggcccggtccttctccaggagccatgttgggaccatcgcccggacctagtccaggctccgcccactcaatgatgggtcctagtcccggaccccctagcgcaggacaccctattcctactcagggtccaggtgggtacccccaagataatatgcaccagatgcacaagcctatggagagcatgcatgagaagggtatgtccgacgatcctagatacaatcagatgaaaggaatggggatgcgaagcggagggcatgccggtatgggccctcccccttcaccgatggaccagcattcccagggatacccgtcacccctgggcggctcagagcacgcttctagccctgtgccggcctccggccccagttcaggaccccagatgtcctcagggcctgggggagcccccctggatggggccgacccccaggctctcggtcagcagaatagaggacctaccccgttcaaccaaaatcaactccaccagctacgcgcacagatcatggcatataagatgctcgcccggggacagccgctgcctgatcatctccaaatggccgttcaagggaagagaccaatgcccgggatgcagcaacaaatgcccacactcccccctccaagtgtgtctgccacaggacctgggcccgggccagggcccggacccggcccaggtcccggcccggccccacctaactactctagacctcacgggatgggcggcccaaatatgccacccccaggacccagcggggttcctcccgggatgcctggacaaccacccggagggccccccaagccctggcctgagggaccgatggccaacgctgccgcccccacaagcacaccccaaaaactcattccaccacagcccactggtagaccgtctcccgcgcccccggccgtgccccccgctgcgagcccagtaatgccaccacaaacacagtcaccaggacaaccagctcagcccgcacctatggtgccattgcaccaaaagcagagccgcatcacacccattcagaagccacgggggctggaccccgtggaaatactacaagagagagagtaccggctgcaggcccggatcgcccaccggatccaggagcttgaaaacctcccaggttcactggcaggcgacttgagaactaaggctacaatagagctcaaagccctcagactgttgaattttcaaaggcaattgaggcaggaggtagttgtttgcatgcgaagagacactgctttggagaccgccctgaacgccaaagcttacaagcggtctaaaaggcagtcccttagagaggcgaggatcactgagaaattggagaaacagcagaagattgaacaggagcgcaagaggcggcagaagcaccaagaatacctgaactccatactgcaacacgcgaaagactttaaagaatatcatcgctctgtcaccgggaagattcagaaactgacaaaggccgtggccacatatcatgctaacaccgaaagggaacagaagaaggagaacgaaagaattgagaaagaaaggatgaggaggctaatggccgaggacgaggaaggctatagaaaattgatcgaccagaagaaggataaacggcttgcatatctcctgcagcaaacggacgagtacgttgctaatctgaccgaacttgtcaggcagcataaagcagcgcaggttgccaaagagaagaaaaaaaagaagaagaagaagaaggcagaaaacgccgagggccaaaccccagcgatcggcccggatggggagccgctggacgagacatcacagatgtccgacctgccagtgaaagtcatccatgtagagtctggcaagattctgactggtacagatgcaccaaaggcagggcagctggaagcgtggctggaaatgaaccccggctacgaggtagcaccaaggagtgactctgaagaaagcggatccgaggaagaggaggaagaggaggaggaggagcaacctcaggccgcccagcccccgaccctaccggtggaggagaaaaaaaagatcccagaccctgactctgatgatgtgtctgaggtcgacgcgaggcacatcatagaaaatgcaaaacaggatgtggacgacgaatacggtgtgtctcaggctctggcccgaggcctccagtcctactacgcagtggcccacgccgtgacagaacgcgtggacaagcagtccgcccttatggtgaacggcgttctgaaacaatatcagattaagggcttggaatggctggtctcattgtataacaacaatctgaacgggatcctggctgatgagatgggtctgggcaagaccatccagacaattgcccttataacgtatctgatggagcacaaaaggattaatgggcctttcctcataattgttcctctaagcacactctcaaattgggcctatgaattcgacaaatgggctccatcagtagtgaaagtgtcctataaaggctcccccgccgcacgcagagcattcgtgccccagctgagaagtggaaagtttaatgttctactgacaacctacgaatatattattaaagataagcatatcctggctaagattaggtggaagtatatgatcgtcgacgaggggcacaggatgaaaaaccatcactgtaagctcacacaggtgctgaatacacattacgttgccccacgacgtctcctgctgacggggacaccactgcaaaacaagctgcctgagttgtgggcattgttaaacttcttactgccgaccatcttcaagagctgctcaacttttgaacagtggttcaacgcaccttttgccatgactggcgagaaagttgatcttaatgaagaggagacaatcctcattatcagaagacttcataaagtcctccggccctttctgctgcgcagactgaagaaagaagttgaagcgcagctgccagagaaggtggagtatgtgatcaaatgtgatatgtcagcactgcagcgcgtgctttacaggcatatgcaggccaaaggtgtgcttctaaccgacggcagtgagaaagataagaagggtaaaggcggaactaagaccctgatgaatacaataatgcagttgcggaaaatttgcaaccacccttatatgtttcagcatatagaggagtcattttctgaacaccttgggttcacagggggcatcgttcaaggattagatttataccgagcgtctgggaagttcgagctgttggatcgcatcttgcccaaactgcgagccacgaatcataaagtgttgctgttttgccagatgaccagcctgatgacaatcatggaagactactttgcctatcgcgggttcaagtatctcagactcgatggaacaacaaaggccgaagacaggggaatgctccttaagacctttaacgagcccggatccgaatactttatttttttactgagcacgagagccggcgggcttgggctcaatcttcagagcgccgataccgtaattatctttgactccgactggaatccgcatcaggatctgcaggcccaggatagagcccacagaatcggtcagcagaatgaggtgagagtccttcggctgtgtacagtgaacagcgttgaagaaaagattctcgccgcagcgaaatacaagctcaacgttgatcagaaagtcatacaggccggcatgttcgatcagaagtccagctcccacgagcgacgcgccttcttacaggctatactggagcatgaggaacaggacgaggaggaggatgaggttcccgatgacgagacagtgaaccaaatgattgctcgccacgaggaagagtttgacctgtttatgcggatggacctggacaggcgtcgcgaggaggcccgcaatcccaagagaaaacctcgtctgatggaagaggatgagcttccttcatggattatcaaggatgacgccgaagtagagcgccttacctgtgaggaggaggaggaaaaaatgttcggccggggatcacgccacaggaaagaggttgactatagcgatagccttacggagaaacagtggttgaagacgttgaaagctatcgaggagggcacgctggaggagattgaggaggaagtccggcagaagaagagctcccgaaaacggaagagggactcagatgccggaagctctacccccacaacatccaccaggtcacgcgataaggatgacgagtctaaaaagcaaaaaaaacgaggaaggcctcctgccgaaaagctgagcccaaaccctcccaacctgaccaagaagatgaagaaaatagtggatgcagtcatcaaatacaaggacagttcaggaaggcagcttagtgaggtttttattcagctgccgagtagaaaagagcttcctgagtactacgaattaatcaggaaacccgttgatttcaaaaaaattaaggagaggatacgaaatcataagtacaggtccctaaacgatctcgaaaaagatgtgatgctgttatgtcaaaatgcacaaacttttaacctggaagggtctctaatttatgaggactctattgtgttacagagcgtgtttacaagtgttcgccagaaaatcgagaaggaagacgattctgaaggagaggaaagtgaagaagaggaggagggcgaggaggagggatcagagagcgaatcgaggagtgtgaaggttaaaataaaactagggaggaaggaaaaagcccaagaccggctaaaggggggtcgcaggagaccaagtcgcggatctcgggccaaaccggtggtcagcgatgatgacagtgaggaggagcaggaagaagaccgctcaggcagcgggtccgaggaggattag

SEQ ID NO: 276454 - DNA, 4851 bp, Artificial Sequence
  derived and/or modified sequence
atgtcgacccctgacccgccactcggcggaacccctcggccaggaccgtctcccggaccaggtcctagccctggagccatgctgggaccctccccaggtccgagccccggttctgctcacagtatgatgggaccttcgccaggaccaccctccgccggtcaccccattccaactcagggccctggcggatacccacaggacaatatgcaccagatgcacaagcctatggaaagcatgcacgaaaaaggcatgtctgacgacccgaggtataaccaaatgaagggcatgggtatgcgctcagggggacatgccggtatgggccctcccccaagtcccatggaccagcactcacaggggtacccatctcctctggggggatcggagcacgcatcgtcccccgtgcctgcctctggacctagtagcgggccacagatgtcctcgggtcccggtggcgcaccattggacggagccgacccacaagctctggggcagcaaaatcggggaccaactccattcaaccagaatcagctacaccagctgagggcccagattatggcctacaaaatgctcgctcgaggtcagccactgcccgatcatttacaaatggcggtccaaggaaagagacctatgcccggaatgcagcaacagatgccgactctccccccaccgagtgtgagcgcgactggtcctggtcctggcccagggcctgggccaggacccggaccagggccagcaccacctaactactccaggccacatggcatggggggacctaacatgcccccaccaggcccatcgggtgttccccctggcatgccagggcagccgcctggtgggccacccaaaccctggcccgaagggcctatggccaacgcggctgcccctacgtccacgcctcagaagctgatccccccacagccaactgggaggccgtcccccgctcctccagcagtaccacccgctgcatctcctgtcatgcctccacagacccagagtccgggacaacctgcccagccagcccctatggtgcctttacatcagaagcagtcaaggataacccccattcagaagcctaggggtctcgaccccgtcgaaatcctgcaggagcgggaatatcggctccaagcacgcattgcacatcggatccaggagctggagaacctgcctggctccctggctggagatttgagaacaaaggctaccattgagcttaaggcgcttagactgctgaacttccagcggcaactgaggcaagaagttgtggtgtgcatgcgtcgtgatacagcgctggaaacagcgctcaatgcaaaggcatacaagcggtcaaagagacagtcacttcgggaagccaggattacagaaaaactcgagaagcaacaaaaaattgagcaagaacggaaaaggcggcagaaacaccaggagtacctgaatagtatccttcagcatgctaaagattttaaggagtaccacaggtctgtgaccggcaaaattcaaaagctaaccaaggctgtcgccacatatcacgcaaacactgaacgcgagcagaagaaagagaatgagagaatcgagaaggagcgtatgcggaggctcatggccgaggacgaggaggggtacaggaagttgatcgaccagaaaaaagacaaacgcctcgcctatctgctgcagcaaacagatgaatatgttgcgaatctgactgagctcgtccgccagcataaggcagcccaggtcgcaaaagagaagaaaaagaagaaaaagaagaaaaaggccgaaaatgctgaaggccagactcccgcaatcggaccagacggagagccactggacgagacctctcaaatgagtgatttgccagtgaaggtgatacacgtcgagagtgggaagatcctcaccggcaccgacgcgccaaaagctggacagctggaggcttggttggagatgaaccctgggtatgaggtggccccaagaagcgattctgaggaatccggcagtgaagaagaagaggaggaggaagaggaggagcaaccgcaagcagctcagccaccaaccctacccgttgaggaaaaaaaaaagatacccgacccagactctgacgacgtgtcagaggttgatgctcggcatattatcgagaatgctaagcaggatgtagacgatgagtatggcgtgtcacaagccttagcccgaggcctgcagtcctactacgccgtggcccacgccgtcactgagagggtggacaagcagtccgccctgatggtgaatggtgttctgaaacaatatcagatcaagggattagaatggcttgtctcgctatacaacaataatctgaatggcatcctggcagatgaaatggggctgggaaagacaattcagacgatcgcattgatcacatacttgatggagcacaagaggatcaatgggccatttctgatcatcgtgcccctgagtacactgagcaactgggcgtatgagttcgacaagtgggctcccagtgtggtcaaagtgtcatataaagggtcccccgctgctcgacgagcattcgtcccccagctccgctctgggaagtttaacgtcttgttaacgacttacgagtatattatcaaggacaagcacatactggccaagatacgctggaagtacatgatagtcgatgaggggcatagaatgaagaaccaccactgcaaactgactcaagtgctcaatactcactacgtggcaccaagacgactcctgctcaccggcacacctctacaaaacaaactgccagagctgtgggccctgctaaatttcctcctgcccacaattttcaagagctgctccacattcgagcagtggttcaacgcaccatttgcaatgactggcgaaaaggtagatctaaatgaggaagaaaccatcctgatcatcagacgcttacataaggtcctgaggcctttccttttgcgcagacttaagaaggaagtggaagcacagctgccagagaaggtcgagtacgtgattaaatgtgacatgtccgcattgcagagagttctttacagacacatgcaggccaaaggcgtgctgctcacagacggatccgagaaagataaaaaagggaagggaggtacaaagactctaatgaatacaattatgcagctcaggaaaatttgtaatcacccatatatgttccagcacattgaggagagtttcagcgaacacctcgggttcacgggcggtatcgtccagggactggatctgtaccgggcatccgggaaatttgagctgctggacagaatccttcctaaactcagagctaccaatcacaaggtgttgcttttctgccagatgacttcgttgatgaccatcatggaggattacttcgcttacagaggctttaagtatctgaggttggatggcaccaccaaggccgaggatagagggatgctacttaaaacgttcaacgagccagggagcgagtattttatcttcctgctcagcaccagagccggaggattgggattgaacctacaatctgccgacaccgtgatcatctttgactccgactggaatccccaccaagacttacaggctcaggatcgagcgcaccgcatcgggcagcagaatgaggtccgagttctacgcctctgcacagtgaattccgtcgaagagaagatcttggccgcagctaagtacaagctcaacgttgatcagaaagtcattcaggcaggaatgtttgatcagaagtccagcagccacgaacgacgagcctttctgcaagccatactagagcatgaggagcaagacgaggaggaggatgaggtcccagacgacgagaccgttaatcagatgatagcgcgacacgaagaggaattcgaccttttcatgcgcatggatctggataggcgccgtgaggaggccagaaatccaaaacgtaagccacgcctgatggaagaagacgagttgccgtcgtggataatcaaggacgatgccgaggtagaaagactgacatgcgaggaggaagaggagaaaatgttcggcagaggctcccgccatcgtaaggaagtagattactccgattccctaaccgaaaagcagtggctgaagacgctgaaggctatagaagaggggacactcgaggagattgaggaggaagtgcgccaaaaaaaatccagcaggaagagaaaaagagacagcgatgccggtagctccacacccactacatcaaccaggtcgagagacaaagacgacgaatccaagaagcaaaagaagagagggaggccccctgccgagaaactgtcccccaatccgccaaatctaacaaagaagatgaaaaaaattgtcgatgccgtcatcaagtataaggactcgtcaggacgccagctttcagaggtcttcattcagttgccctcccgcaaggagttgccagaatattacgaactgatcaggaagcccgtggatttcaagaagatcaaggaacgcatccgcaatcacaaatacagatctctgaacgatttggaaaaagatgtaatgctgctgtgtcaaaacgctcagacattcaacctggaaggaagcctaatttacgaggattcgatagtactgcagagtgtcttcactagcgttaggcagaagatagagaaggaagatgacagcgagggcgaggaatctgaagaagaagaggaaggggaggaggagggctccgagtccgaatctcgatctgttaaagtgaagatcaagttaggcagaaaggagaaggcccaggatcggctgaaaggaggacgcaggcgcccttcaagaggttctagggccaaaccagtcgtgagcgacgatgacagtgaagaagaacaagaagaggaccgatccggttcaggatctgaggaggattag

SEQ ID NO: 276455 - DNA, 4851 bp, Artificial Sequence
  derived and/or modified sequence
atgtccactccagacccacccctgggcggaactcctcggccaggtccttccccgggccctggcccttcccctggagccatgctgggccctagcccgggtccctcgccgggctccgcccacagcatgatggggcccagcccagggccgccctcagcaggacaccccatccccacccaggggcctggagggtaccctcaggacaacatgcaccagatgcacaagcccatggagtccatgcatgagaagggcatgtcggacgacccgcgctacaaccagatgaaaggaatggggatgcggtcagggggccatgctgggatggggcccccgcccagccccatggaccagcactcccaaggttacccctcgcccctgggtggctctgagcatgcctctagtccagttccagccagtggcccgtcttcggggccccagatgtcttccgggccaggaggtgccccgctggatggtgctgacccccaggccttggggcagcagaaccggggcccaaccccatttaaccagaaccagctgcaccagctcagagctcagatcatggcctacaagatgctggccagggggcagcccctccccgaccacctgcagatggcggtgcagggcaagcggccgatgcccgggatgcagcagcagatgccaacgctacctccaccctcggtgtccgcaacaggacccggccctggccctggccctggccccggcccgggtcccggcccggcacctccaaattacagcaggcctcatggtatgggagggcccaacatgcctcccccaggaccctcgggcgtgccccccgggatgccaggccagcctcctggagggcctcccaagccctggcctgaaggacccatggcgaatgctgctgcccccacgagcacccctcagaagctgattcccccgcagccaacgggccgcccttcccccgcgccccctgccgtcccacccgccgcctcgcccgtgatgccaccgcagacccagtcccccgggcagccggcccagcccgcgcccatggtgccactgcaccagaagcagagccgcatcacccccatccagaagccgcggggcctcgaccctgtggagatcctgcaggagcgcgagtacaggctgcaggctcgcatcgcacaccgaattcaggaacttgaaaaccttcccgggtccctggccggggatttgcgaaccaaagcgaccattgagctcaaggccctcaggctgctgaacttccagaggcagctgcgccaggaggtggtggtgtgcatgcggagggacacagcgctggagacagccctcaatgctaaggcctacaagcgcagcaagcgccagtccctgcgcgaggcccgcatcactgagaagctggagaagcagcagaagatcgagcaggagcgcaagcgccggcagaagcaccaggaatacctcaatagcattctccagcatgccaaggatttcaaggaatatcacagatccgtcacaggcaaaatccagaagctgaccaaggcagtggccacgtaccatgccaacacggagcgggagcagaagaaagagaacgagcggatcgagaaggagcgcatgcggaggctcatggctgaagatgaggaggggtaccgcaagctcatcgaccagaagaaggacaagcgcctggcctacctcttgcagcagacagacgagtacgtggctaacctcacggagctggtgcggcagcacaaggctgcccaggtcgccaaggagaaaaagaagaaaaagaaaaagaagaaggcagaaaatgcagaaggacagacgcctgccattgggccggatggcgagcctctggacgagaccagccagatgagcgacctcccggtgaaggtgatccacgtggagagtgggaagatcctcacaggcacagatgcccccaaagccgggcagctggaggcctggctcgagatgaacccggggtatgaagtagctccgaggtctgatagtgaagaaagtggctcagaagaagaggaagaggaggaggaggaagagcagccgcaggcagcacagcctcccaccctgcccgtggaggagaagaagaagattccagatccagacagcgatgacgtctctgaggtggacgcgcggcacatcattgagaatgccaagcaagatgtcgatgatgaatatggcgtgtcccaggcccttgcacgtggcctgcagtcctactatgccgtggcccatgctgtcactgagagagtggacaagcagtcagcgcttatggtcaatggtgtcctcaaacagtaccagatcaaaggtttggagtggctggtgtccctgtacaacaacaacctgaacggcatcctggccgacgagatgggcctggggaagaccatccagaccatcgcgctcatcacgtacctcatggagcacaaacgcatcaatgggcccttcctcatcatcgtgcctctctcaacgctgtccaactgggcgtacgagtttgacaagtgggccccctccgtggtgaaggtgtcttacaagggatccccagcagcaagacgggcctttgtcccccagctccggagtgggaagttcaacgtcttgctgacgacgtacgagtacatcatcaaagacaagcacatcctcgccaagatccgttggaagtacatgattgtggacgaaggtcaccgcatgaagaaccaccactgcaagctgacgcaggtgctcaacacgcactatgtggcaccccgccgcctgctgctgacgggcacaccgctgcagaacaagcttcccgagctctgggcgctgctcaacttcctgctgcccaccatcttcaagagctgcagcaccttcgagcagtggtttaacgcaccctttgccatgaccggggaaaaggtggacctgaatgaggaggaaaccattctcatcatccggcgtctccacaaagtgctgcggcccttcttgctccgacgactcaagaaggaagtcgaggcccagttgcccgaaaaggtggagtacgtcatcaagtgcgacatgtctgcgctgcagcgagtgctctaccgccacatgcaggccaagggcgtgctgctgactgatggctccgagaaggacaagaagggcaaaggcggcaccaagaccctgatgaacaccatcatgcagctgcggaagatctgcaaccacccctacatgttccagcacatcgaggagtccttttccgagcacttggggttcactggcggcattgtccaagggctggacctgtaccgagcctcgggtaaatttgagcttcttgatagaattcttcccaaactccgagcaaccaaccacaaagtgctgctgttctgccaaatgacctccctcatgaccatcatggaagattactttgcgtatcgcggctttaaatacctcaggcttgatggaaccacgaaggcggaggaccggggcatgctgctgaaaaccttcaacgagcccggctctgagtacttcatcttcctgctcagcacccgggctggggggctcggcctgaacctccagtcggcagacactgtgatcatttttgacagcgactggaatcctcaccaggacctgcaagcgcaggaccgagcccaccgcatcgggcagcagaacgaggtgcgtgtgctccgcctctgcaccgtcaacagcgtggaggagaagatcctagctgcagccaagtacaagctcaacgtggaccagaaggtgatccaggccggcatgttcgaccagaagtcctccagccatgagcggcgcgccttcctgcaggccatcctggagcacgaggagcaggatgaggaggaagacgaggtgcccgacgacgagaccgtcaaccagatgatcgcccggcacgaggaggagtttgatctgttcatgcgcatggacctggaccgcaggcgcgaggaggcccgcaaccccaagcggaagccgcgcctcatggaggaggacgagctcccctcgtggatcatcaaggacgacgcggaggtggagcggctgacctgtgaggaggaggaggagaagatgttcggccgtggctcccgccaccgcaaggaggtggactacagcgactcactgacggagaagcagtggctcaagaccctgaaggccatcgaggagggcacgctggaggagatcgaagaggaggtccggcagaagaaatcatcacggaagcgcaagcgagacagcgacgccggctcctccaccccgaccaccagcacccgcagccgcgacaaggacgacgagagcaagaagcagaagaagcgcgggcggccgcctgccgagaaactctcccctaacccacccaacctcaccaagaagatgaagaagattgtggatgccgtgatcaagtacaaggacagcagtggacgtcagctcagcgaggtcttcatccagctgccctcgcgaaaggagctgcccgagtactacgagctcatccgcaagcccgtggacttcaagaagataaaggagcgcattcgcaaccacaagtaccgcagcctcaacgacctagagaaggacgtcatgctcctgtgccagaacgcacagaccttcaacctggagggctccctgatctatgaagactccatcgtcttgcagtcggtcttcaccagcgtgcggcagaaaatcgagaaggaggatgacagtgaaggcgaggagagtgaggaggaggaagagggcgaggaggaaggctccgaatccgaatctcggtccgtcaaagtgaagatcaagcttggccggaaggagaaggcacaggaccggctgaagggcggccggcggcggccgagccgagggtcccgagccaagccggtcgtgagtgacgatgacagtgaggaggaacaagaggaggaccgctcaggaagtggcagcgaagaagactga

SEQ ID NO: 276456 - protein, 1614 aa, Artificial Sequence
  derived and/or modified sequence
MSTPDPPLGGTPRPGPSPGPGPSPGAMLGPSPGPSPGSAHSMMGPSPGPPSAGHPIPTQGPGGYPQDNMHQMHKPMESMHEKGMSDDPRYNQMKGMGMRSGGHAGMGPPPSPMDQHSQGYPSPLGGSEHASSPVPASGPSSGPQMSSGPGGAPLDGADPQALGQQNRGPTPFNQNQLHQLRAQIMAYKMLARGQPLPDHLQMAVQGKRPMPGMQQQMPTLPPPSVSATGPGPGPGPGPGPGPGPAPPNYSRPHGMGGPNMPPPGPSGVPPGMPGQPPGGPPKPWPEGPMANAAAPTSTPQKLIPPQPTGRPSPAPPAVPPAASPVMPPQTQSPGQPAQPAPMVPLHQKQSRITPIQKPRGLDPVEILQEREYRLQARIAHRIQELENLPGSLAGDLRTKATIELKALRLLNFQRQLRQEVVVCMRRDTALETALNAKAYKRSKRQSLREARITEKLEKQQKIEQERKRRQKHQEYLNSILQHAKDFKEYHRSVTGKIQKLTKAVATYHANTEREQKKENERIEKERMRRLMAEDEEGYRKLIDQKKDKRLAYLLQQTDEYVANLTELVRQHKAAQVAKEKKKKKKKKKAENAEGQTPAIGPDGEPLDETSQMSDLPVKVIHVESGKILTGTDAPKAGQLEAWLEMNPGYEVAPRSDSEESGSEEEEEEEEEEQPQAAQPPTLPVEEKKKIPDPDSDDVSEVDARHIIENAKQDVDDEYGVSQALARGLQSYYAVAHAVTERVDKQSALMVNGVLKQYQIKGLEWLVSLYNNNLNGILADEMGLGKTIQTIALITYLMEHKRINGPFLIIVPLSTLSNWAYEFDKWAPSVVKVSYKGSPAARRAFVPQLRSGKFNVLLTTYEYIIKDKHILAKIRWKYMIVDEGHRMKNHHCKLTQVLNTHYVAPRRLLLTGTPLQNKLPELWALLNFLLPTIFKSCSTFEQWFNAPFAMTGEKVDLNEEETILIIRRLHKVLRPFLLRRLKKEVEAQLPEKVEYVIKCDMSALQRVLYRHMQAKGVLLTDGSEKDKKGKGGTKTLMNTIMQLRKICNHPYMFQHIEESFSEHLGFTGGIVQGLDLYRASGKFELLDRILPKLRATNHKVLLFCQMTSLMTIMEDYFAYRGFKYLRLDGTTKAEDRGMLLKTFNEPGSEYFIFLLSTRAGGLGLNLQSADTVIIFDSDWNPHQDLQAQDRAHRIGQQNEVRVLRLCTVNSVEEKILAAAKYKLNVDQKVIQAGMFDQKSSSHERRAFLQAILEHEEQDEEEDEVPDDETVNQMIARHEEEFDLFMRMDLDRRREEARNPKRKPRLMEEDELPSWIIKDDAEVERLTCEEEEEKMFGRGSRHRKEVDYSDSLTEKQWLKAIEEGTLEEIEEEVRQKKSSRKRKRDSDAGSSTPTTSTRSRDKDDESKKQKKRGRPPAEKLSPNPPNLTKKMKKIVDAVIKYKDSSSGRQLSEVFIQLPSRKELPEYYELIRKPVDFKKIKERIRNHKYRSLNDLEKDVMLLCQNAQTFNLEGSLIYEDSIVLQSVFTSVRQKIEKEDDSEGEESEEEEEGEEEGSESESRSVKVKIKLGRKEKAQDRLKGGRRRPSRGSRAKPVVSDDDSEEEQEEDRSGSGSEED

SEQ ID NO: 276457 - DNA, 4845 bp, Artificial Sequence
  derived and/or modified sequence
atgagcacccccgacccccccctgggcggcacccccagacccggccccagccccggccccggccccagccccggcgccatgctgggccccagccccggccccagccccggcagcgcccacagcatgatgggccccagccccggcccccccagcgccggccaccccatccccacccagggccccggcggctacccccaggacaacatgcaccagatgcacaagcccatggagagcatgcacgagaagggcatgagcgacgaccccagatacaaccagatgaagggcatgggcatgagaagcggcggccacgccggcatgggccccccccccagccccatggaccagcacagccagggctaccccagccccctgggcggcagcgagcacgccagcagccccgtgcccgccagcggccccagcagcggcccccagatgagcagcggccccggcggcgcccccctggacggcgccgacccccaggccctgggccagcagaacagaggccccacccccttcaaccagaaccagctgcaccagctgagagcccagatcatggcctacaagatgctggccagaggccagcccctgcccgaccacctgcagatggccgtgcagggcaagagacccatgcccggcatgcagcagcagatgcccaccctgcccccccccagcgtgagcgccaccggccccggccccggccccggccccggccccggccccggccccggccccgccccccccaactacagcagaccccacggcatgggcggccccaacatgcccccccccggccccagcggcgtgccccccggcatgcccggccagccccccggcggcccccccaagccctggcccgagggccccatggccaacgccgccgcccccaccagcaccccccagaagctgatccccccccagcccaccggcagacccagccccgccccccccgccgtgccccccgccgccagccccgtgatgcccccccagacccagagccccggccagcccgcccagcccgcccccatggtgcccctgcaccagaagcagagcagaatcacccccatccagaagcccagaggcctggaccccgtggagatcctgcaggagagagagtacagactgcaggccagaatcgcccacagaatccaggagctggagaacctgcccggcagcctggccggcgacctgagaaccaaggccaccatcgagctgaaggccctgagactgctgaacttccagagacagctgagacaggaggtggtggtgtgcatgagaagagacaccgccctggagaccgccctgaacgccaaggcctacaagagaagcaagagacagagcctgagagaggccagaatcaccgagaagctggagaagcagcagaagatcgagcaggagagaaagagaagacagaagcaccaggagtacctgaacagcatcctgcagcacgccaaggacttcaaggagtaccacagaagcgtgaccggcaagatccagaagctgaccaaggccgtggccacctaccacgccaacaccgagagagagcagaagaaggagaacgagagaatcgagaaggagagaatgagaagactgatggccgaggacgaggagggctacagaaagctgatcgaccagaagaaggacaagagactggcctacctgctgcagcagaccgacgagtacgtggccaacctgaccgagctggtgagacagcacaaggccgcccaggtggccaaggagaagaagaagaagaagaagaagaagaaggccgagaacgccgagggccagacccccgccatcggccccgacggcgagcccctggacgagaccagccagatgagcgacctgcccgtgaaggtgatccacgtggagagcggcaagatcctgaccggcaccgacgcccccaaggccggccagctggaggcctggctggagatgaaccccggctacgaggtggcccccagaagcgacagcgaggagagcggcagcgaggaggaggaggaggaggaggaggaggagcagccccaggccgcccagccccccaccctgcccgtggaggagaagaagaagatccccgaccccgacagcgacgacgtgagcgaggtggacgccagacacatcatcgagaacgccaagcaggacgtggacgacgagtacggcgtgagccaggccctggccagaggcctgcagagctactacgccgtggcccacgccgtgaccgagagagtggacaagcagagcgccctgatggtgaacggcgtgctgaagcagtaccagatcaagggcctggagtggctggtgagcctgtacaacaacaacctgaacggcatcctggccgacgagatgggcctgggcaagaccatccagaccatcgccctgatcacctacctgatggagcacaagagaatcaacggccccttcctgatcatcgtgcccctgagcaccctgagcaactgggcctacgagttcgacaagtgggcccccagcgtggtgaaggtgagctacaagggcagccccgccgccagaagagccttcgtgccccagctgagaagcggcaagttcaacgtgctgctgaccacctacgagtacatcatcaaggacaagcacatcctggccaagatcagatggaagtacatgatcgtggacgagggccacagaatgaagaaccaccactgcaagctgacccaggtgctgaacacccactacgtggcccccagaagactgctgctgaccggcacccccctgcagaacaagctgcccgagctgtgggccctgctgaacttcctgctgcccaccatcttcaagagctgcagcaccttcgagcagtggttcaacgcccccttcgccatgaccggcgagaaggtggacctgaacgaggaggagaccatcctgatcatcagaagactgcacaaggtgctgagacccttcctgctgagaagactgaagaaggaggtggaggcccagctgcccgagaaggtggagtacgtgatcaagtgcgacatgagcgccctgcagagagtgctgtacagacacatgcaggccaagggcgtgctgctgaccgacggcagcgagaaggacaagaagggcaagggcggcaccaagaccctgatgaacaccatcatgcagctgagaaagatctgcaaccacccctacatgttccagcacatcgaggagagcttcagcgagcacctgggcttcaccggcggcatcgtgcagggcctggacctgtacagagccagcggcaagttcgagctgctggacagaatcctgcccaagctgagagccaccaaccacaaggtgctgctgttctgccagatgaccagcctgatgaccatcatggaggactacttcgcctacagaggcttcaagtacctgagactggacggcaccaccaaggccgaggacagaggcatgctgctgaagaccttcaacgagcccggcagcgagtacttcatcttcctgctgagcaccagagccggcggcctgggcctgaacctgcagagcgccgacaccgtgatcatcttcgacagcgactggaacccccaccaggacctgcaggcccaggacagagcccacagaatcggccagcagaacgaggtgagagtgctgagactgtgcaccgtgaacagcgtggaggagaagatcctggccgccgccaagtacaagctgaacgtggaccagaaggtgatccaggccggcatgttcgaccagaagagcagcagccacgagagaagagccttcctgcaggccatcctggagcacgaggagcaggacgaggaggaggacgaggtgcccgacgacgagaccgtgaaccagatgatcgccagacacgaggaggagttcgacctgttcatgagaatggacctggacagaagaagagaggaggccagaaaccccaagagaaagcccagactgatggaggaggacgagctgcccagctggatcatcaaggacgacgccgaggtggagagactgacctgcgaggaggaggaggagaagatgttcggcagaggcagcagacacagaaaggaggtggactacagcgacagcctgaccgagaagcagtggctgaaggccatcgaggagggcaccctggaggagatcgaggaggaggtgagacagaagaagagcagcagaaagagaaagagagacagcgacgccggcagcagcacccccaccaccagcaccagaagcagagacaaggacgacgagagcaagaagcagaagaagagaggcagaccccccgccgagaagctgagccccaacccccccaacctgaccaagaagatgaagaagatcgtggacgccgtgatcaagtacaaggacagcagcagcggcagacagctgagcgaggtgttcatccagctgcccagcagaaaggagctgcccgagtactacgagctgatcagaaagcccgtggacttcaagaagatcaaggagagaatcagaaaccacaagtacagaagcctgaacgacctggagaaggacgtgatgctgctgtgccagaacgcccagaccttcaacctggagggcagcctgatctacgaggacagcatcgtgctgcagagcgtgttcaccagcgtgagacagaagatcgagaaggaggacgacagcgagggcgaggagagcgaggaggaggaggagggcgaggaggagggcagcgagagcgagagcagaagcgtgaaggtgaagatcaagctgggcagaaaggagaaggcccaggacagactgaagggcggcagaagaagacccagcagaggcagcagagccaagcccgtggtgagcgacgacgacagcgaggaggagcaggaggaggacagaagcggcagcggcagcgaggaggactag

SEQ ID NO: 276458 - DNA, 4845 bp, Artificial Sequence
  derived and/or modified sequence
atgagtacacctgaccctcccctcggaggaacaccgcggccgggcccttcccctggccctggaccaagcccgggggctatgctcgggccatcacccggaccatcccctgggtctgcacactctatgatgggtccttcgcctggacccccttcggctggacacccaatcccaacacaggggcctgggggctaccctcaggacaacatgcatcaaatgcacaagccaatggagagcatgcacgagaagggcatgtcagatgatccccgctacaatcagatgaagggaatgggcatgcgaagcggtggccacgccgggatgggacctcctccatctcccatggatcagcatagccagggatatccttctccattgggggggtctgagcatgcaagctcgcccgtacccgcttcaggcccatcctcaggcccacagatgtctagtggtcccgggggcgccccccttgatggtgcggatccccaggcactgggacaacagaataggggccccaccccttttaaccagaaccagctacatcagcttcgggctcagatcatggcgtataagatgcttgcaaggggacagccccttcccgatcacctacagatggcagttcagggcaaacgtccaatgcccggaatgcaacaacagatgcccacactccctcctccaagcgtctctgccacaggccccggacctggaccaggccctggaccaggccctggccctggtccagccccccccaattattcccgcccccacggcatgggcggccccaacatgcccccacctggtcctagcggggtgcctcccggtatgcccgggcaaccaccaggcgggccccccaaaccatggcctgaaggacctatggccaatgcagctgcacccaccagcaccccccaaaaacttattccaccacagcccaccgggcggccgagtcctgctccccctgccgttccacctgctgcctctcctgtcatgcctccccagacccagtctcctggccagccagcgcagcccgcaccaatggtgccattgcatcaaaaacagagcaggattaccccaatacagaaaccccgaggcctcgacccagttgagatcctgcaagaaagggaatacagacttcaggcaaggattgctcaccgaattcaggaactggagaacctccccggaagcctagccggcgacttacgaaccaaagcaacaatagagctgaaagcattgagactgctcaatttccagaggcaactgcggcaggaggttgtggtctgcatgcggagggatacagctctcgaaactgccttgaacgcaaaggcatataaaagaagcaagcggcagagcctcagagaagccaggatcaccgagaagttagagaaacagcagaaaattgagcaggagcgcaagagacggcagaaacatcaggaatatttaaattccattctgcagcacgccaaggactttaaagaataccatagaagcgtcacagggaagattcaaaaattgacgaaagccgtggccacctaccacgccaatacagaacgggagcaaaagaaggaaaacgaaaggatcgagaaagagaggatgcggcgcctgatggccgaagacgaggaagggtacaggaagctcattgaccaaaagaaggataagagattagcctacttgctgcagcagaccgatgaatacgtcgccaacctgaccgaactagtgagacagcacaaagctgcccaagtggctaaggagaaaaaaaagaaaaaaaagaagaagaaggccgaaaacgcggagggccagactccagcaatcggaccagacggcgagcctctcgatgaaacgtctcaaatgtcggatttgcctgtgaaagtcatacatgtggagtccggaaagatattgaccggaaccgatgccccaaaagcgggccaactagaggcctggttggagatgaaccccggctatgaagtcgcgccacggtcagattctgaagagtcaggttcagaggaggaggaggaggaagaggaggaagaacaacctcaggccgcccaaccccccacactgcccgtagaggaaaaaaagaaaattccagaccctgacagcgacgatgtttccgaagtcgacgcccgacatatcattgaaaacgcgaaacaagacgtcgacgatgaatacggggtctctcaggccctcgctagagggctacagtcttattatgccgttgcccacgccgtcaccgagcgcgtcgataagcagagtgctttaatggtgaacggggttttgaagcagtaccagataaaaggtctcgagtggttagtgtcactctacaataacaatcttaacggcatcctggcggatgaaatgggcctcggtaagactattcagaccatcgccctgatcacctatctgatggagcataaaaggatcaatggcccctttctgataattgtcccactttcaacactgtccaactgggcatatgagttcgacaaatgggccccaagcgtggttaaggtgagctacaaaggctctccagccgcccgaagggccttcgtcccccagttacggtctggcaaattcaacgtccttttgaccacctatgagtacattatcaaagataaacacattcttgccaaaattcggtggaagtacatgatcgtggacgagggacaccgcatgaagaatcatcattgcaaactgacacaggtccttaatacccactacgtcgcccctcgcagattgctgcttacaggcactcctcttcaaaacaaattgcccgaactctgggccctcctcaattttctgctgcccactatcttcaagtcttgctcaaccttcgagcagtggtttaacgcccccttcgcaatgaccggtgagaaggtcgacctgaatgaagaagaaaccattctgataataaggagactgcacaaagtgttgagaccttttttactgaggagattaaagaaagaagtggaagcccagcttcccgagaaagtcgagtacgttatcaagtgtgatatgtccgccttacaaagggtcctctaccgacacatgcaggccaagggagttctgctgaccgacggttcagaaaaagacaagaagggcaagggtggaaccaagaccctgatgaatactataatgcagctgcggaagatttgcaaccatccatatatgtttcagcatatagaggaatcctttagtgaacacttagggttcactggtggtatcgttcagggcctggatctttatcgtgcttccgggaaattcgagctcctagatcggatcctccccaaacttcgtgccaccaaccataaagtgctgctgttctgtcaaatgacttctttgatgactattatggaggattatttcgcctacagggggtttaaatacctacgcctggatggaacaaccaaagccgaggatcggggtatgctgttgaaaacatttaacgagcccgggtctgaatacttcatattcttgttaagcaccagggccggaggactgggtctgaaccttcagagcgccgatacagtcatcatcttcgattcagactggaatccacatcaggacctccaagcccaagaccgagcccataggattggtcaacagaatgaagttcgagttctcaggctgtgcactgtgaacagcgtagaggagaagatcctggccgccgcgaagtacaagttaaatgtggaccagaaagtgatacaggcaggaatgttcgatcagaagtcttcttcccacgagcgccgcgcatttctccaggccatactcgaacacgaagagcaggatgaagaggaagatgaagtacctgacgacgagaccgttaatcaaatgatcgcaagacacgaagaagaattcgatctcttcatgcggatggatctggaccggaggagggaagaggcacggaatccaaagcggaagcccagattaatggaggaggacgagctcccttcttggatcattaaggatgacgccgaggtggaaaggctgacctgtgaagaagaggaagagaagatgtttgggagaggtagtcggcaccgcaaagaggttgactactccgacagcttgacggaaaagcagtggcttaaggccattgaggagggaacactcgaggaaatcgaggaggaggtgcggcagaaaaaatcttccaggaaaagaaagagagacagtgacgccgggtccagcacccctactacaagcacacgctccagagataaagatgatgagtccaagaagcagaaaaaacgtggccgtcctcccgccgagaaactctcacctaatccgcctaaccttaccaagaagatgaagaagattgttgacgcagtgatcaagtataaggattcatcctccgggaggcagctgtcagaagtattcatccagctgcccagtaggaaggagctgccagaatattatgagctaattcggaagcctgtcgacttcaagaaaattaaagagcgaatacgcaaccataaatatagatctttgaatgatctggaaaaggatgtgatgctgctatgccaaaatgcacagacattcaacctcgaaggctctcttatatatgaagactcaatagtgcttcagtcggtcttcactagcgttcggcagaaaatcgaaaaagaggacgatagtgaaggggaggagtcagaggaggaggaggagggcgaggaagagggctctgagtcagaatccaggtcggtgaaagtcaaaattaaattgggacgaaaagagaaagctcaggaccggctgaagggcgggaggaggcgacctagcagaggtagccgcgctaagcccgtggtgtccgatgatgattctgaggaggagcaggaagaggaccggagtggctccggcagtgaggaagactag

SEQ ID NO: 276459 - DNA, 4845 bp, Artificial Sequence
  derived and/or modified sequence
atgagcaccccagacccccccctgggcggcaccccccggcccggccccagccctggccctggccccagccctggggccatgctgggccccagccctggccccagccctggcagcgcccacagcatgatgggccccagccctggccccccatctgctggccaccccatccccacccagggccctgggggctacccccaggacaacatgcaccagatgcacaagcccatggagagcatgcatgagaagggcatgtctgatgacccccgctacaaccagatgaagggcatgggcatgaggtctgggggccacgccggcatgggccccccacccagccccatggaccagcacagccagggctaccccagccccctgggcggcagcgagcacgccagcagccctgtgcctgccagcggccccagcagcggcccccagatgagcagcggccctggaggagcccccctggatggagctgacccccaggccctgggccagcagaacagaggccccacccccttcaaccagaaccagctgcaccagctgcgggcccagatcatggcctacaagatgctggcccggggccagcccctgcctgaccacctgcagatggctgtgcagggcaagaggcccatgcctggcatgcagcagcagatgcccaccctgcccccacccagcgtgtctgccaccggccctggccctggccctggccctggccctggccctggccctggccctgccccacccaactacagccggccccacggcatgggcggccccaacatgcctcctcctggccccagcggcgtgcccccaggcatgcctggccagcccccaggcggcccccccaagccctggccagagggccccatggccaatgctgctgcccccaccagcaccccccagaagctgatccccccccagcccaccggccggcccagccctgcccctcctgctgtgcccccagctgccagccctgtgatgccaccccagacccagagccctggccagcctgcccagcctgcccccatggtgcccctgcaccagaagcagagccgcatcacccccatccagaagccccggggcctggaccctgtggagatcctgcaggagcgggagtaccgcctgcaggcccgcatcgcccaccgcatccaggagctggagaacctgcccggcagcctggccggggacctgcggaccaaggccaccatcgagctgaaggccctgcggctgctgaacttccagaggcagctgcggcaggaggtggtggtgtgcatgagaagagacacagccctggagacagccctgaatgccaaggcctacaagaggagcaagaggcagagcctgcgggaggcccgcatcacagagaagctggagaagcagcagaagattgagcaggagaggaagaggcggcagaagcaccaggagtacctgaacagcatcctgcagcacgccaaggacttcaaggagtaccacaggtctgtgacaggcaagatccagaagctgaccaaggctgtggccacctaccacgccaacacagagcgggagcagaagaaggaaaatgaaagaattgagaaggagaggatgaggcggctgatggctgaagatgaggagggctacaggaagctgattgaccagaagaaggacaagaggctggcctacctgctgcagcagacagatgaatatgtggccaacctgacagagctggtgcggcagcacaaggccgcccaggtggccaaggagaagaagaagaagaagaagaagaagaaggccgagaatgctgagggccagaccccagccatcggcccagatggagagcccctggatgagaccagccagatgtctgacctgcctgtgaaggtgattcatgtggagagcggcaagatcctgactggaacagatgcccccaaggccggccagctggaggcctggctggagatgaaccctggctatgaggtggcccccaggagtgacagcgaggagagcggcagcgaggaggaggaggaggaggaggaggaggagcagccccaggccgcccagccccccaccctgcctgtggaggagaagaagaagatcccagaccctgacagtgatgatgtgtctgaggtggatgcccggcacatcattgaaaatgccaagcaggatgtggatgatgaatatggagtgtcccaggccctggcccggggcctgcagagctactatgctgtggcccatgctgtgacagagcgggtggacaagcagagcgccctgatggtgaatggagtgctgaagcagtaccagatcaagggcctggagtggctggtgtccctgtacaacaacaacctgaatggcatcctggctgatgagatgggcctgggcaagaccatccagaccatcgccctgatcacctacctgatggagcacaagaggatcaatggccccttcctgatcatcgtgcccctgagcaccctgagcaactgggcctatgaatttgacaagtgggcccccagcgtggtgaaggtgtcctacaagggcagccctgctgcccggcgggcctttgtgccccagctgcggagcggcaagttcaacgtgctgctgaccacctatgagtacatcatcaaggacaagcacatcctggccaagatccgctggaagtacatgattgtggatgagggccacaggatgaagaaccaccactgcaagctgacccaggtgctgaacacccactacgtggccccccggcggctgctgctgaccggcacccccctgcagaacaagctgcctgagctgtgggccctgctgaacttcctgctgcccaccatcttcaagagctgcagcacctttgagcagtggttcaatgccccctttgccatgaccggggagaaggtggacctgaatgaggaggagaccatcctgatcatccggcggctgcacaaggtgctgcggcccttcctgctgcggcggctgaagaaggaggtggaggcccagctgcctgagaaggtggagtatgtgatcaagtgtgacatgtctgccctgcagagggtgctgtaccgccacatgcaggccaagggcgtgctgctgacagatggcagcgagaaggacaagaagggcaaaggaggcaccaagaccctgatgaacaccatcatgcagctgaggaagatctgcaaccacccctacatgttccagcacatcgaggagagcttcagcgagcacctgggcttcaccggcggcatcgtgcagggcctggacctgtaccgggccagcggcaagtttgagctgctggaccgcatcctgcccaagctgcgggccaccaaccacaaggtgctgctcttctgccagatgaccagcctgatgaccatcatggaggactactttgcctaccggggcttcaagtacctgcggctggatggcaccaccaaggcagaagatcggggcatgctgctgaagaccttcaatgaacctggcagcgagtacttcatcttcctgctgagcacccgggccggcggcctgggcctgaacctgcagagcgctgacaccgtcatcatctttgacagcgactggaacccccaccaggacctgcaggcccaggaccgggcccacagaattggccagcagaatgaggtgcgggtgctgcggctgtgcaccgtgaacagcgtggaggagaagatcctggccgccgccaagtacaagctgaatgtggaccagaaggtgatccaggccggcatgtttgaccagaagagcagcagccatgaaagaagagccttcctgcaggccatcctggagcacgaggagcaggatgaggaggaggatgaggtgcctgatgatgagaccgtgaaccagatgattgcccggcatgaggaggagtttgacctcttcatgaggatggacctggacagaagaagagaggaggccaggaaccccaagaggaagccccggctgatggaggaggatgagctgcccagctggatcatcaaggatgatgctgaggtggagcggctgacctgtgaggaggaggaggagaagatgtttggccggggcagccgccacaggaaggaggtggactacagcgacagcctgacagagaagcagtggctgaaggccatcgaggagggcaccctggaggagattgaggaggaggtgcggcagaagaagagcagcaggaagaggaagagggacagtgatgctggcagcagcacccccaccaccagcaccaggagccgggacaaggatgatgagagcaagaagcagaagaagaggggccggcccccagctgagaagctgagccccaacccccccaacctgaccaagaagatgaagaagatcgtggatgctgtgatcaagtacaaggacagcagcagcggccggcagctgtctgaggtgttcatccagctgcccagcaggaaggagctgcctgagtactatgagctgatcaggaagcctgtggacttcaagaagatcaaggagcgcatccggaaccacaagtaccgcagcctgaatgacctggagaaggatgtgatgctgctgtgccagaatgcccagaccttcaacctggagggcagcctcatctatgaagattccatcgtgctgcagagcgtcttcacctctgtgcggcagaagattgagaaggaggatgattctgagggggaggagagcgaggaggaggaggagggggaggaggagggcagcgagagcgagagccgctctgtgaaggtgaagatcaagctgggcaggaaggagaaggcccaggaccggctgaagggcggcagaagaagacccagccggggcagccgggccaagcctgtggtgtctgatgatgacagcgaggaggagcaggaggaggacagaagtggcagcggctctgaagaagattag

SEQ ID NO: 276460 - DNA, 4845 bp, Artificial Sequence
  derived and/or modified sequence
atgagcacccccgacccccccctgggcggcaccccccggcccggccctagccctggccccggaccttcccctggagccatgctcgggccctccccaggtccaagtccaggttctgcccatagcatgatgggcccctcaccaggacctccgtctgccggccaccccatccctacccagggacctggcgggtatccacaggataatatgcatcagatgcacaagcccatggaatccatgcacgaaaaggggatgagcgacgaccctagatacaatcagatgaagggaatgggcatgaggtctggcgggcacgcaggcatgggaccaccgccttcgccaatggatcagcattcccaaggctatccctctcccctgggcgggtcggagcatgcctcttcccctgtccccgcgtcagggcctagcagtggcccccagatgtcttccggacccggtggcgctccactcgacggcgctgatccccaggcccttggacaacaaaatcgggggcctacgccatttaatcagaatcagctgcatcagctcagagctcagatcatggcgtacaagatgctcgcccgcggccaacctcttcccgatcacctgcagatggctgtccagggaaagcgaccaatgccaggaatgcaacagcagatgccgacacttccccctcctagtgtgtcggcaaccggtcctggacctggcccagggccagggcctggtccaggcccaggtccggcaccacccaactactcaagaccacacggcatggggggccctaatatgccgcctccaggacccagtggggtcccacctggaatgcctggccagccacccgggggccctcctaaaccttggcctgaagggccaatggccaacgcggcggctcccacaagtaccccacaaaagctaatcccaccgcaaccaacgggcagacctagtcctgctcctcccgctgtaccccccgccgcttctccagttatgccaccccagactcaaagtcccggtcaacctgcccaacctgcacccatggtcccactgcaccagaagcagagccgcataactcccatccaaaagcccagggggctcgatccggttgaaatcctccaagaacgggaatacaggttgcaggctcggattgcacacagaatccaagagctggaaaatctcccaggcagcctcgctggagacctgaggaccaaggccacaatcgagctgaaagcactgcgcctgctgaactttcaacgtcaacttagacaggaagtcgtcgtctgcatgcgacgtgataccgcactggagactgcactgaatgccaaggcgtacaagcgaagcaaacggcagagcctacgggaggctcggatcaccgagaaactcgagaaacagcagaagattgaacaggaacgtaagcgtcgccagaagcaccaggagtatctgaactccattctgcagcatgctaaagacttcaaggagtaccaccgctccgtaacgggcaaaatccagaaactgaccaaggctgttgcaacctatcatgctaacactgagagagagcagaagaaggagaacgagagaattgagaaagaaaggatgaggcgattgatggcagaagacgaggagggataccggaaactgattgaccagaagaaagacaaacgcctggcctatctactccagcagaccgatgagtatgttgccaaccttactgagctggtcagacagcacaaagctgcgcaggtggcgaaggagaaaaagaaaaagaaaaaaaagaaaaaagccgaaaatgccgaaggccagacccccgcaatcgggcctgatggtgaacccttggatgaaacaagccagatgtccgacttaccggtgaaagtgattcacgtcgagtcaggcaagattttaaccggcacggatgcaccaaaggcgggacagctggaagcatggcttgaaatgaatcccggctacgaggttgccccacggagcgacagtgaagagagcggtagtgaagaagaagaagaagaggaggaagaagaacagccacaagccgcgcagcctccaacattgccggtggaagagaaaaaaaagatccccgatccagatagtgacgatgtgtctgaggtcgatgcgcgccacatcattgagaatgcaaagcaggacgtcgacgacgaatatggcgttagccaggcattggcacgcggtctacagtcatactatgctgtagcccacgctgtgactgaacgggtcgataaacagtctgcgcttatggtcaacggcgttctcaaacagtatcaaattaagggtctcgaatggttagtgtccctctataacaacaatctcaacggaattcttgctgacgaaatgggcctggggaagaccattcagactatcgctctgataacttatctgatggagcacaagaggatcaatggaccctttttgattatcgttcccctttcaaccctaagcaactgggcttacgagttcgacaaatgggctccctctgtggtgaaggtcagctacaaggggtctccagctgcccgacgcgccttcgtgccccagctgagatccggtaagtttaatgttctgcttactacctacgagtacattattaaagacaagcatatcctagctaagatcaggtggaagtacatgatcgtagacgaagggcatcgtatgaaaaatcaccattgtaagctcacacaagtgctgaatacccactatgtggccccgcgtcgtctactgttgactgggactcctttacagaataaactgccagaactttgggcacttctgaatttcctgttaccaaccatttttaaaagctgttccacctttgaacagtggttcaatgcaccctttgctatgacaggcgagaaggtggacctgaatgaggaagagaccattctgattatccgccgcctgcacaaggtgctcagaccatttcttcttagacgtcttaagaaggaggttgaggcacagttgcctgagaaggttgagtacgtgattaagtgtgatatgtcagcactccagcgcgtgctgtatcgtcatatgcaggctaaaggcgtattgctgacagatgggtcagaaaaggacaaaaaaggcaagggggggactaagacattaatgaataccatcatgcagcttcgaaagatttgtaatcacccttacatgtttcagcatatagaagaatcatttagcgaacacctcgggttcacgggagggattgtacaggggctggacttgtacagagctagtgggaaatttgaactcttggacagaatattgccaaaactccgagcaacgaaccataaagtgttgctcttctgccaaatgacttctctgatgactattatggaagattactttgcttatcggggattcaaatacctgcgcctcgacgggactactaaagctgaggaccgcgggatgctcctgaagacttttaatgagcctggatcagaatatttcatctttctgctgtctaccagggccggaggattgggactcaacctgcaaagtgccgataccgtcatcatttttgatagtgattggaacccacaccaagacctgcaagcccaagacagggcacaccgcatcggacagcagaatgaggtcagggtacttcggctgtgcactgtcaactcggtcgaggaaaagattcttgctgcagccaaatacaaactgaatgtcgaccagaaggtcattcaggccgggatgtttgaccaaaaaagctctagtcatgagcgaagagcctttctacaagccatcctcgagcatgaggaacaagacgaagaggaagacgaagttccagatgatgagaccgtaaaccaaatgatcgccaggcatgaagaggagttcgatttgttcatgaggatggatctggatcgccggagagaggaggcccgcaatcctaaacgtaagcctcggctgatggaggaggacgagttacctagctggatcataaaggacgacgccgaggtcgagcggcttacatgcgaggaggaagaagagaaaatgtttggcaggggctctcgccaccggaaggaggtcgactactccgattcattgacggagaagcagtggctgaaggcgattgaggagggaactctggaagagattgaagaagaagttaggcaaaagaagtcctccagaaaacggaagagagattccgatgccggttcttctacccccacgacttcaacaagatcacgggataaggacgacgaatctaagaagcagaagaagcgtggccggccaccagccgagaaactgagtccaaatcccccaaacttgaccaaaaagatgaaaaaaatcgtcgacgcagtgatcaagtataaagactcctcatccggccggcagctgtcggaggtcttcattcagctgcctagtagaaaggaactcccggagtattacgaactgattaggaaaccggttgacttcaagaaaatcaaagagagaattaggaatcataaatatcgctcactgaacgacctggaaaaggacgtgatgctcctatgccagaatgcacagacttttaacctggaaggatcactcatttacgaggacagcatagtgcttcaatccgtgtttacaagcgttaggcagaaaattgagaaagaagacgattccgagggggaggagtctgaagaggaggaggaaggcgaggaggaaggttcagaatccgaatcccggtctgtgaaggtcaagattaagttgggtcgtaaggagaaagcacaggacagactgaagggaggccgccgtcgccctagccgaggttcaagagcaaaaccagttgtttccgacgatgatagcgaagaggaacaggaggaggaccgatccggctcaggcagtgaagaggattag

SEQ ID NO: 276461 - DNA, 4845 bp, Artificial Sequence
  derived and/or modified sequence
atgagtacccccgatcccccactgggtggtacgcctcgacccggaccctcacccggacccggacccagccccggagccatgctgggaccatccccgggtcctagtccagggagtgcccatagcatgatggggccttccccgggacccccaagtgccggacaccctatcccaacacagggtcccggtggataccctcaggacaatatgcaccagatgcataagccaatggagagcatgcatgagaaggggatgtcagatgatccacgatacaaccagatgaagggaatggggatgcgcagtggtggccacgctgggatgggccctcctccatctcctatggaccaacacagtcagggataccccagtcccttggggggatccgagcacgcgtcttcacctgtgcccgcttctggtcccagctctggccctcagatgagtagcggtcctggaggagctccgctggacggggcagatccacaagcactgggccagcagaacaggggtccgacccccttcaatcagaaccagctgcaccaactccgagcccaaatcatggcctacaagatgctcgctagaggtcagcccctcccagatcacctccaaatggccgtgcaggggaaacggccaatgcccggaatgcagcaacagatgccgactttgccaccccctagcgtatctgccacaggccctggacccggacccggacctggaccaggcccaggtccaggcccagcccctcccaattactcaagaccccatggaatgggtggcccaaatatgcccccacccggaccttcgggagtcccccctggaatgcccggacagcccccaggcggacccccaaagccatggcccgaaggacctatggccaatgcggctgctccaacttctacaccacagaagttgatccctccacagccgactggacgtccgtcccctgcacccccagctgtgcctccagctgcatcccccgtcatgccaccccagactcagtcccccggacagccagcacagccagcaccaatggtgcctctacatcaaaagcagtcccggattacccctattcagaagccgaggggattggatcccgtcgagattctccaggagagggagtataggctccaagctaggattgcccacagaatccaagagctggagaatctccccggaagtctggccggtgacctgcgcaccaaagccacaatcgagctgaaagccttacggctgttgaactttcagaggcagctgcgccaggaggtggtagtctgtatgcgtagagacaccgctctggagacagccttaaatgctaaagcttataagcggagcaagcgccaaagccttcgagaagctcggattaccgagaagctcgagaagcagcaaaagattgagcaggaaaggaagcgcaggcagaagcatcaagaatacctgaacagtattctccaacacgccaaagatttcaaagagtatcacagatctgtaaccggcaaaattcagaaactgactaaggccgtggccacttatcacgccaatactgaaagagagcagaagaaggagaatgaacgtatcgaaaaggaacgcatgcgtcgtctcatggcagaggacgaggagggataccgcaaactcattgaccaaaaaaaagataaaaggctggcatacttactgcagcagacggacgagtacgtcgccaatctgacggagctcgttcgccagcataaagcagcacaggtggcgaaggaaaagaagaagaaaaaaaaaaagaaaaaggcagagaacgctgaaggacagacgcccgcaattgggcctgacggcgagcctttggacgaaaccagtcaaatgtccgacctgccggtcaaggtgatccacgtggagtccgggaagatactgactggtacagatgccccaaaggccggacaattggaagcctggcttgagatgaatcccggttacgaggtggcgcctaggtcagactctgaagaatctgggtcagaggaggaagaggaagaggaagaagaggagcagcctcaggcggctcaaccaccgacattgcccgtggaggagaaaaagaagatccccgacccggattctgacgatgttagcgaggtcgacgcaaggcatataatcgagaacgcgaaacaggacgttgacgatgaatatggggtgagccaggccctcgcaagagggcttcaatcatattatgcagtggctcatgccgtaacagaaagagtggataagcaatctgctcttatggtgaatggcgttctgaagcagtatcagatcaagggcctggagtggttggtgagcctgtataataataatcttaatggaatattggctgacgagatgggtctgggaaaaaccatccagaccatcgcactgatcacctacctgatggagcacaagcgaattaatgggccttttctcatcatcgtacccctgagcaccttatctaattgggcctatgagtttgacaagtgggcaccctcagtggtgaaggtcagttacaagggatctcccgctgccagaagagcattcgtgcctcagctgagatcaggcaagtttaatgtccttctcaccacctatgagtatattattaaggataaacacattctcgcgaaaatcagatggaaatacatgattgtggacgaaggacatcgcatgaaaaatcatcattgcaaattgacacaggtgctgaatactcattatgtcgcccctcgtcgccttctcctgaccggtacccctttgcagaacaagctgcctgagttatgggctctgttgaactttctgctgcccaccatttttaaatcctgcagcacctttgagcagtggtttaatgccccattcgccatgaccggcgaaaaggttgatcttaatgaagaggagaccattctaattattaggcgtctccacaaggtgctacggcctttcctcctgcggagacttaaaaaggaagtcgaggcccagttgcccgagaaagttgagtatgtgatcaagtgtgacatgagtgcccttcagagagttctgtatcggcatatgcaagccaagggagtgcttcttacagatgggtcagaaaaggacaagaaaggcaagggcggaacaaagacactgatgaacacgattatgcagctccgcaagatctgtaaccatccctacatgtttcagcatattgaagagtccttctctgagcatcttgggtttaccggcggaattgttcagggactcgacctttaccgggcttcaggcaaattcgagcttctcgataggatattacctaagctgagggcaaccaatcataaggtgctcttattctgccagatgacctcactgatgacaatcatggaggattatttcgcctacaggggcttcaagtatctgagattggacggtaccaccaaggctgaggacagagggatgctgctcaagactttcaacgaacctggctcggagtatttcatatttctcctaagcacccgcgctggcggtctgggtctcaatcttcagagcgccgatactgtgataatctttgacagtgattggaacccgcatcaagatctgcaagctcaggacagggcccacagaatcggccaacagaatgaagttcgggtgctgcgcttgtgtaccgtgaactctgttgaggaaaaaattctggcagccgcaaaatacaagctcaacgtggaccagaaagtgatccaggcaggcatgttcgaccagaaatcttcatcccatgaaagaagagcctttcttcaggctatcctagaacatgaagaacaggatgaggaggaagacgaggtgcccgacgatgaaaccgtcaatcagatgatcgcccgtcacgaagaggaattcgacctgtttatgcgcatggatctcgatagacggcgagaggaggctcgtaatcccaaacgcaagcctcggcttatggaagaggacgaactcccgtcttggattatcaaggatgacgccgaagtggagcgtttgacttgcgaagaggaagaggaaaagatgttcggacgcggaagtagacatcgcaaagaggtggattattccgatagtctgaccgagaaacagtggcttaaggcaattgaagagggaaccctggaggagatagaggaagaagttcgccagaaaaaaagctctagaaagcgaaaaagggattccgatgccggtagttccacaccgaccacatccaccaggagtcgtgataaggacgatgagtcaaaaaagcaaaaaaagcgcggtagaccccctgccgaaaagctgtcccccaatcctcccaacctgacaaagaagatgaaaaaaattgttgatgccgtcatcaaatataaagacagctcttcagggcgacagctctcagaagtattcatccagctccccagccggaaagagctgccggaatattacgagctgattagaaaacctgtggatttcaaaaagatcaaagagcggatccgaaatcataagtaccgaagcttgaatgatctggagaaagacgtgatgttactgtgccagaacgcccagaccttcaacctcgagggttccctaatctatgaggacagcatagttttgcaatcggtttttacctcagtcaggcagaagatcgagaaggaggatgactcagagggggaggagagcgaggaggaggaggaaggcgaggaagaaggcagcgagtccgagagccgcagcgtgaaggttaagatcaagctcggcaggaaggagaaggctcaggataggctgaaggggggacggaggagaccatcccgaggatctcgcgcaaagccagtggttagcgacgacgactccgaagaagaacaggaagaggatagatcaggctctggctctgaggaagattag

SEQ ID NO: 276462 - DNA, 4845 bp, Artificial Sequence
  derived and/or modified sequence
atgtccactccagacccacccctgggcggaactcctcggccaggtccttccccgggccctggcccttcccctggagccatgctgggccctagcccgggtccctcgccgggctccgcccacagcatgatggggcccagcccagggccgccctcagcaggacaccccatccccacccaggggcctggagggtaccctcaggacaacatgcaccagatgcacaagcccatggagtccatgcatgagaagggcatgtcggacgacccgcgctacaaccagatgaaaggaatggggatgcggtcagggggccatgctgggatggggcccccgcccagccccatggaccagcactcccaaggttacccctcgcccctgggtggctctgagcatgcctctagtccagttccagccagtggcccgtcttcggggccccagatgtcttccgggccaggaggtgccccgctggatggtgctgacccccaggccttggggcagcagaaccggggcccaaccccatttaaccagaaccagctgcaccagctcagagctcagatcatggcctacaagatgctggccagggggcagcccctccccgaccacctgcagatggcggtgcagggcaagcggccgatgcccgggatgcagcagcagatgccaacgctacctccaccctcggtgtccgcaacaggacccggccctggccctggccctggccccggcccgggtcccggcccggcacctccaaattacagcaggcctcatggtatgggagggcccaacatgcctcccccaggaccctcgggcgtgccccccgggatgccaggccagcctcctggagggcctcccaagccctggcctgaaggacccatggcgaatgctgctgcccccacgagcacccctcagaagctgattcccccgcagccaacgggccgcccttcccccgcgccccctgccgtcccacccgccgcctcgcccgtgatgccaccgcagacccagtcccccgggcagccggcccagcccgcgcccatggtgccactgcaccagaagcagagccgcatcacccccatccagaagccgcggggcctcgaccctgtggagatcctgcaggagcgcgagtacaggctgcaggctcgcatcgcacaccgaattcaggaacttgaaaaccttcccgggtccctggccggggatttgcgaaccaaagcgaccattgagctcaaggccctcaggctgctgaacttccagaggcagctgcgccaggaggtggtggtgtgcatgcggagggacacagcgctggagacagccctcaatgctaaggcctacaagcgcagcaagcgccagtccctgcgcgaggcccgcatcactgagaagctggagaagcagcagaagatcgagcaggagcgcaagcgccggcagaagcaccaggaatacctcaatagcattctccagcatgccaaggatttcaaggaatatcacagatccgtcacaggcaaaatccagaagctgaccaaggcagtggccacgtaccatgccaacacggagcgggagcagaagaaagagaacgagcggatcgagaaggagcgcatgcggaggctcatggctgaagatgaggaggggtaccgcaagctcatcgaccagaagaaggacaagcgcctggcctacctcttgcagcagacagacgagtacgtggctaacctcacggagctggtgcggcagcacaaggctgcccaggtcgccaaggagaaaaagaagaaaaagaaaaagaagaaggcagaaaatgcagaaggacagacgcctgccattgggccggatggcgagcctctggacgagaccagccagatgagcgacctcccggtgaaggtgatccacgtggagagtgggaagatcctcacaggcacagatgcccccaaagccgggcagctggaggcctggctcgagatgaacccggggtatgaagtagctccgaggtctgatagtgaagaaagtggctcagaagaagaggaagaggaggaggaggaagagcagccgcaggcagcacagcctcccaccctgcccgtggaggagaagaagaagattccagatccagacagcgatgacgtctctgaggtggacgcgcggcacatcattgagaatgccaagcaagatgtcgatgatgaatatggcgtgtcccaggcccttgcacgtggcctgcagtcctactatgccgtggcccatgctgtcactgagagagtggacaagcagtcagcgcttatggtcaatggtgtcctcaaacagtaccagatcaaaggtttggagtggctggtgtccctgtacaacaacaacctgaacggcatcctggccgacgagatgggcctggggaagaccatccagaccatcgcgctcatcacgtacctcatggagcacaaacgcatcaatgggcccttcctcatcatcgtgcctctctcaacgctgtccaactgggcgtacgagtttgacaagtgggccccctccgtggtgaaggtgtcttacaagggatccccagcagcaagacgggcctttgtcccccagctccggagtgggaagttcaacgtcttgctgacgacgtacgagtacatcatcaaagacaagcacatcctcgccaagatccgttggaagtacatgattgtggacgaaggtcaccgcatgaagaaccaccactgcaagctgacgcaggtgctcaacacgcactatgtggcaccccgccgcctgctgctgacgggcacaccgctgcagaacaagcttcccgagctctgggcgctgctcaacttcctgctgcccaccatcttcaagagctgcagcaccttcgagcagtggtttaacgcaccctttgccatgaccggggaaaaggtggacctgaatgaggaggaaaccattctcatcatccggcgtctccacaaagtgctgcggcccttcttgctccgacgactcaagaaggaagtcgaggcccagttgcccgaaaaggtggagtacgtcatcaagtgcgacatgtctgcgctgcagcgagtgctctaccgccacatgcaggccaagggcgtgctgctgactgatggctccgagaaggacaagaagggcaaaggcggcaccaagaccctgatgaacaccatcatgcagctgcggaagatctgcaaccacccctacatgttccagcacatcgaggagtccttttccgagcacttggggttcactggcggcattgtccaagggctggacctgtaccgagcctcgggtaaatttgagcttcttgatagaattcttcccaaactccgagcaaccaaccacaaagtgctgctgttctgccaaatgacctccctcatgaccatcatggaagattactttgcgtatcgcggctttaaatacctcaggcttgatggaaccacgaaggcggaggaccggggcatgctgctgaaaaccttcaacgagcccggctctgagtacttcatcttcctgctcagcacccgggctggggggctcggcctgaacctccagtcggcagacactgtgatcatttttgacagcgactggaatcctcaccaggacctgcaagcgcaggaccgagcccaccgcatcgggcagcagaacgaggtgcgtgtgctccgcctctgcaccgtcaacagcgtggaggagaagatcctagctgcagccaagtacaagctcaacgtggaccagaaggtgatccaggccggcatgttcgaccagaagtcctccagccatgagcggcgcgccttcctgcaggccatcctggagcacgaggagcaggatgaggaggaagacgaggtgcccgacgacgagaccgtcaaccagatgatcgcccggcacgaggaggagtttgatctgttcatgcgcatggacctggaccgcaggcgcgaggaggcccgcaaccccaagcggaagccgcgcctcatggaggaggacgagctcccctcgtggatcatcaaggacgacgcggaggtggagcggctgacctgtgaggaggaggaggagaagatgttcggccgtggctcccgccaccgcaaggaggtggactacagcgactcactgacggagaagcagtggctcaaggccatcgaggagggcacgctggaggagatcgaagaggaggtccggcagaagaaatcatcacggaagcgcaagcgagacagcgacgccggctcctccaccccgaccaccagcacccgcagccgcgacaaggacgacgagagcaagaagcagaagaagcgcgggcggccgcctgccgagaaactctcccctaacccacccaacctcaccaagaagatgaagaagattgtggatgccgtgatcaagtacaaggacagcagcagtggacgtcagctcagcgaggtcttcatccagctgccctcgcgaaaggagctgcccgagtactacgagctcatccgcaagcccgtggacttcaagaagataaaggagcgcattcgcaaccacaagtaccgcagcctcaacgacctagagaaggacgtcatgctcctgtgccagaacgcacagaccttcaacctggagggctccctgatctatgaagactccatcgtcttgcagtcggtcttcaccagcgtgcggcagaaaatcgagaaggaggatgacagtgaaggcgaggagagtgaggaggaggaagagggcgaggaggaaggctccgaatccgaatctcggtccgtcaaagtgaagatcaagcttggccggaaggagaaggcacaggaccggctgaagggcggccggcggcggccgagccgagggtcccgagccaagccggtcgtgagtgacgatgacagtgaggaggaacaagaggaggaccgctcaggaagtggcagcgaagaagactga

SEQ ID NO: 276463 - protein, 1613 aa, Artificial Sequence
  derived and/or modified sequence
MSTPDPPLGGTPRPGPSPGPGPSPGAMLGPSPGPSPGSAHSMMGPSPGPPSAGHPIPTQGPGGYPQDNMHQMHKPMESMHEKGMSDDPRYNQMKGMGMRSGGHAGMGPPPSPMDQHSQGYPSPLGGSEHASSPVPASGPSSGPQMSSGPGGAPLDGADPQALGQQNRGPTPFNQNQLHQLRAQIMAYKMLARGQPLPDHLQMAVQGKRPMPGMQQQMPTLPPPSVSATGPGPGPGPGPGPGPGPAPPNYSRPHGMGGPNMPPPGPSGVPPGMPGQPPGGPPKPWPEGPMANAAAPTSTPQKLIPPQPTGRPSPAPPAVPPAASPVMPPQTQSPGQPAQPAPMVPLHQKQSRITPIQKPRGLDPVEILQEREYRLQARIAHRIQELENLPGSLAGDLRTKATIELKALRLLNFQRQLRQEVVVCMRRDTALETALNAKAYKRSKRQSLREARITEKLEKQQKIEQERKRRQKHQEYLNSILQHAKDFKEYHRSVTGKIQKLTKAVATYHANTEREQKKENERIEKERMRRLMAEDEEGYRKLIDQKKDKRLAYLLQQTDEYVANLTELVRQHKAAQVAKEKKKKKKKKKAENAEGQTPAIGPDGEPLDETSQMSDLPVKVIHVESGKILTGTDAPKAGQLEAWLEMNPGYEVAPRSDSEESGSEEEEEEEEEEQPQAAQPPTLPVEEKKKIPDPDSDDVSEVDARHIIENAKQDVDDEYGVSQALARGLQSYYAVAHAVTERVDKQSALMVNGVLKQYQIKGLEWLVSLYNNNLNGILADEMGLGKTIQTIALITYLMEHKRINGPFLIIVPLSTLSNWAYEFDKWAPSVVKVSYKGSPAARRAFVPQLRSGKFNVLLTTYEYIIKDKHILAKIRWKYMIVDEGHRMKNHHCKLTQVLNTHYVAPRRLLLTGTPLQNKLPELWALLNFLLPTIFKSCSTFEQWFNAPFAMTGEKVDLNEEETILIIRRLHKVLRPFLLRRLKKEVEAQLPEKVEYVIKCDMSALQRVLYRHMQAKGVLLTDGSEKDKKGKGGTKTLMNTIMQLRKICNHPYMFQHIEESFSEHLGFTGGIVQGLDLYRASGKFELLDRILPKLRATNHKVLLFCQMTSLMTIMEDYFAYRGFKYLRLDGTTKAEDRGMLLKTFNEPGSEYFIFLLSTRAGGLGLNLQSADTVIIFDSDWNPHQDLQAQDRAHRIGQQNEVRVLRLCTVNSVEEKILAAAKYKLNVDQKVIQAGMFDQKSSSHERRAFLQAILEHEEQDEEEDEVPDDETVNQMIARHEEEFDLFMRMDLDRRREEARNPKRKPRLMEEDELPSWIIKDDAEVERLTCEEEEEKMFGRGSRHRKEVDYSDSLTEKQWLKAIEEGTLEEIEEEVRQKKSSRKRKRDSDAGSSTPTTSTRSRDKDDESKKQKKRGRPPAEKLSPNPPNLTKKMKKIVDAVIKYKDSSGRQLSEVFIQLPSRKELPEYYELIRKPVDFKKIKERIRNHKYRSLNDLEKDVMLLCQNAQTFNLEGSLIYEDSIVLQSVFTSVRQKIEKEDDSEGEESEEEEEGEEEGSESESRSVKVKIKLGRKEKAQDRLKGGRRRPSRGSRAKPVVSDDDSEEEQEEDRSGSGSEED

SEQ ID NO: 276464 - DNA, 393 bp, Artificial Sequence
  derived and/or modified sequence
atgcccagacccgccagcgagagctggagccccatccagagcagaatccccgcctacaaggccgtgagccacctgagactgctgcccaccgccaacagccccagcggcagcaaccagcccaccaaccccaacagagcccagcaccccgagggcccccagagcagagagggcgccaccagccccgtgctggccagcctggagccccccacccccaccgacctgcccagcgccagagccagacccagagtgcccgccgagagcggccccggctggctgcacaaggccagaagacccaccagaggcatcctgagagacgtgctgagacacagaggcgtgcccgcccagcccagacccgcccccggcgcccaccagctgagcagccccagcagctag

SEQ ID NO: 276465 - DNA, 726 bp, Artificial Sequence
  derived and/or modified sequence
atggcccccgccaccgacaccgcctggctgcccccccaccccgagatccagctgagactgctgtgccccggcgagacctacggcaagctgatgggcggcagccccagcgccggccccaccacccagagccagccccacgccctgagacccggcctgagaggcagaggcggctggtggccccagcccttctggatccacagcccccccctgacccacagcgtgggcaccttcatctgcctggacggcctggtgtgcgccctgaccgcccccggcctgggcgtgggcctgacccccgccccctggagaccccccggccagagcagaatgctggagggccacggcccctggcccacccccggcagcagacccggccccacctgcgtgtgcctgctgacccccgccagcagcagcctgagaccctgcctgagcgacagaggcacctgccccggcgccccccagggcgccgtgggcacctgcagagccagcccccagagcccctgccacagacaccccagcctgagaagcggcctggagtggacccagccccccgaccaggaccagggcctgctgacccccggcagcccccccctggtgagcggcgtgacccagaccccctggaccagccccttctgcccccccagacccaccccctgggtgggcgccgccttcaccgccgccaacccctgcccccccgcccccaccgccagcagcgtgaccggcctgtag

SEQ ID NO: 276466 - DNA, 393 bp, Artificial Sequence
  derived and/or modified sequence
atgccaaggcccgccagtgagagctggagccccatccaaagcaggattcccgcttacaaagctgttagtcatctgagactgctcccgactgcaaacagtcccagcggttcaaatcagcctactaaccccaaccgagcccagcaccctgagggcccacaaagccgcgagggtgccacttcccctgtgctggcctctctggaaccccccactccaactgacctgcccagcgccagggccagacccagggtgccggctgagtccgggcctggctggcttcacaaagctaggcgccctaccagaggcatcctcagagatgtactccgtcacagaggagtgcccgcacagcctagacccgcccctggggcgcaccaactgagtagtccttcaagctag

SEQ ID NO: 276467 - DNA, 726 bp, Artificial Sequence
  derived and/or modified sequence
atggctcccgcgaccgacacggcctggctgcccccacacccagaaatccaacttcgtctgctctgtccgggagagacgtacggaaagctaatgggcggcagcccaagcgccggacccacaacccagtcacagcctcatgccctccgtccggggctgagggggagaggaggctggtggccgcagcccttctggatccattcacctccactgactcacagtgtaggaacatttatctgcttagatggcctcgtgtgtgccctcaccgcccctggcctcggtgtaggactgacgcccgccccctggaggcccccaggccagtcccggatgctcgaaggacatggcccttggccgacccctgggagtagaccaggtccaacgtgcgtgtgtctcttaacccctgcatccagctctctacggccatgcctctctgataggggaacatgcccaggtgccccccagggcgcagtggggacctgtcgggccagtccacagagtccatgtcatcgtcacccttcactgagatcagggctagagtggacgcaacccccagatcaggaccaaggactgctcacgccaggcagtccgcccctggtgagcggcgttactcagaccccatggaccagtccattctgccctcctcgacctactccttgggtaggagcagcctttaccgcggccaatccgtgtccgccagcacccaccgcctcttccgtcaccgggctttag

SEQ ID NO: 276468 - DNA, 393 bp, Artificial Sequence
  derived and/or modified sequence
atgcccaggcctgccagcgagagctggagccccatccagagccgcatcccagcctacaaggctgtgagccacctgcggctgctgcccacagccaacagccccagcggcagcaaccagcccaccaaccccaacagagcccagcaccctgagggcccccagagccgggagggcgccaccagccctgtgctggccagcctggagccccccacccccacagacctgcccagcgcccgggcccggccccgggtgcctgctgagagcggccctggctggctgcacaaggcccggcggcccacccggggcatcctgagagatgtgctgcggcacagaggagtgcctgcccagcccaggcctgcccctggggcccaccagctgagcagccccagcagctag

SEQ ID NO: 276469 - DNA, 372 bp, Artificial Sequence
  derived and/or modified sequence
atgccagatgccagcctgggcagcctgggcatcacctggtgcttcctggagagccccctggaggtgagcagcggccgcttcggcctggcccggctgctgggcagccaggaccatggagatgatcctgctgagcggggccgcacagccacagatgcctggggccccagccgctggggccagagccctggaaatggaggcggctactgtgatgccagccccccatctgccctggcccctggggaccgggcctgggccctgcctgccagccccagcagcggggccccagccagccagcactgctgcctggagaaggccggcaccaggaccaaggccagccctgtgtggggcagagatggcaacacctggaactag

SEQ ID NO: 276470 - DNA, 393 bp, Artificial Sequence
  derived and/or modified sequence
atgccccggcccgccagcgagagctggagccccatccagagccggattcccgcttataaagccgtcagtcatctaaggttacttcccactgctaactcaccctctgggtcaaaccagcctaccaatccaaaccgggcccagcatccagagggccctcaatctagggaaggggccacttcacccgttttagcctccctagaaccacctacaccaactgatttgccctcagccagggcgcgtcctagagtccccgctgagtctgggccagggtggctgcataaggcccgaagacctacgcgtggtattctacgggacgtcctgcgccatcgcggagtgcctgcacagcctcggccggccccaggggcccaccaactgtccagccccagctcttag

SEQ ID NO: 276471 - DNA, 393 bp, Artificial Sequence
  derived and/or modified sequence
atgccccgtcccgcaagcgagtcctggtccccaattcagagtaggattccagcctacaaagccgtgtcccatttgaggctgctgcctacagctaatagcccgtccggcagcaaccagcccaccaatcctaatagggcacaacacccggagggaccccagtccagagaaggggctacatcacccgtgctggctagtttggagccaccgactcccacagacctgcccagcgccagagccagaccacgggtacctgccgagtccggccctggctggctacacaaagctagaaggcccacacggggaattctccgcgatgtgctccggcatcggggtgttccggcacagcctcgccctgcccctggcgctcatcagctgtcatctccttcatcctag

SEQ ID NO: 276472 - DNA, 726 bp, Artificial Sequence
  derived and/or modified sequence
atggcaccggctacagacacagcctggctccctcctcatccagaaattcagctgagactgttatgcccgggtgaaacctacgggaaactcatgggcggatcacccagcgccggacccacaacacagagccagccccatgcattacggccaggcctacgcggacgcggagggtggtggcctcaacctttctggattcattcacccccacttacacattccgtcggcacgtttatttgtctggacgggctggtgtgtgctcttacagcacctgggcttggagtgggcctgacccctgccccttggcggcctccagggcagtccagaatgctcgagggacatggcccatggcccacccctggttcccgacctggacccacctgcgtctgtctgctgactcctgcctcctctagcctgcggccttgcctgtcagacaggggaacatgcccgggtgcacctcagggtgctgtcggtacatgcagagcctccccacagtctccttgccacaggcatcccagcctcagatcggggttggagtggacccaacctcctgaccaggatcaaggcctcctgacacctggatcgccgccactagtctccggagtcacacagaccccttggacttcccctttttgccccccacgcccaacaccttgggtgggcgcagcttttacggcagcgaatccatgcccaccggctccaaccgcatcatctgtcacaggtctttag

SEQ ID NO: 276473 - DNA, 4842 bp, Artificial Sequence
  derived and/or modified sequence
atgagcacccccgacccccccctgggcggcacccccagacccggccccagccccggccccggccccagccccggcgccatgctgggccccagccccggccccagccccggcagcgcccacagcatgatgggccccagccccggcccccccagcgccggccaccccatccccacccagggccccggcggctacccccaggacaacatgcaccagatgcacaagcccatggagagcatgcacgagaagggcatgagcgacgaccccagatacaaccagatgaagggcatgggcatgagaagcggcggccacgccggcatgggccccccccccagccccatggaccagcacagccagggctaccccagccccctgggcggcagcgagcacgccagcagccccgtgcccgccagcggccccagcagcggcccccagatgagcagcggccccggcggcgcccccctggacggcgccgacccccaggccctgggccagcagaacagaggccccacccccttcaaccagaaccagctgcaccagctgagagcccagatcatggcctacaagatgctggccagaggccagcccctgcccgaccacctgcagatggccgtgcagggcaagagacccatgcccggcatgcagcagcagatgcccaccctgcccccccccagcgtgagcgccaccggccccggccccggccccggccccggccccggccccggccccggccccgccccccccaactacagcagaccccacggcatgggcggccccaacatgcccccccccggccccagcggcgtgccccccggcatgcccggccagccccccggcggcccccccaagccctggcccgagggccccatggccaacgccgccgcccccaccagcaccccccagaagctgatccccccccagcccaccggcagacccagccccgccccccccgccgtgccccccgccgccagccccgtgatgcccccccagacccagagccccggccagcccgcccagcccgcccccatggtgcccctgcaccagaagcagagcagaatcacccccatccagaagcccagaggcctggaccccgtggagatcctgcaggagagagagtacagactgcaggccagaatcgcccacagaatccaggagctggagaacctgcccggcagcctggccggcgacctgagaaccaaggccaccatcgagctgaaggccctgagactgctgaacttccagagacagctgagacaggaggtggtggtgtgcatgagaagagacaccgccctggagaccgccctgaacgccaaggcctacaagagaagcaagagacagagcctgagagaggccagaatcaccgagaagctggagaagcagcagaagatcgagcaggagagaaagagaagacagaagcaccaggagtacctgaacagcatcctgcagcacgccaaggacttcaaggagtaccacagaagcgtgaccggcaagatccagaagctgaccaaggccgtggccacctaccacgccaacaccgagagagagcagaagaaggagaacgagagaatcgagaaggagagaatgagaagactgatggccgaggacgaggagggctacagaaagctgatcgaccagaagaaggacaagagactggcctacctgctgcagcagaccgacgagtacgtggccaacctgaccgagctggtgagacagcacaaggccgcccaggtggccaaggagaagaagaagaagaagaagaagaagaaggccgagaacgccgagggccagacccccgccatcggccccgacggcgagcccctggacgagaccagccagatgagcgacctgcccgtgaaggtgatccacgtggagagcggcaagatcctgaccggcaccgacgcccccaaggccggccagctggaggcctggctggagatgaaccccggctacgaggtggcccccagaagcgacagcgaggagagcggcagcgaggaggaggaggaggaggaggaggaggagcagccccaggccgcccagccccccaccctgcccgtggaggagaagaagaagatccccgaccccgacagcgacgacgtgagcgaggtggacgccagacacatcatcgagaacgccaagcaggacgtggacgacgagtacggcgtgagccaggccctggccagaggcctgcagagctactacgccgtggcccacgccgtgaccgagagagtggacaagcagagcgccctgatggtgaacggcgtgctgaagcagtaccagatcaagggcctggagtggctggtgagcctgtacaacaacaacctgaacggcatcctggccgacgagatgggcctgggcaagaccatccagaccatcgccctgatcacctacctgatggagcacaagagaatcaacggccccttcctgatcatcgtgcccctgagcaccctgagcaactgggcctacgagttcgacaagtgggcccccagcgtggtgaaggtgagctacaagggcagccccgccgccagaagagccttcgtgccccagctgagaagcggcaagttcaacgtgctgctgaccacctacgagtacatcatcaaggacaagcacatcctggccaagatcagatggaagtacatgatcgtggacgagggccacagaatgaagaaccaccactgcaagctgacccaggtgctgaacacccactacgtggcccccagaagactgctgctgaccggcacccccctgcagaacaagctgcccgagctgtgggccctgctgaacttcctgctgcccaccatcttcaagagctgcagcaccttcgagcagtggttcaacgcccccttcgccatgaccggcgagaaggtggacctgaacgaggaggagaccatcctgatcatcagaagactgcacaaggtgctgagacccttcctgctgagaagactgaagaaggaggtggaggcccagctgcccgagaaggtggagtacgtgatcaagtgcgacatgagcgccctgcagagagtgctgtacagacacatgcaggccaagggcgtgctgctgaccgacggcagcgagaaggacaagaagggcaagggcggcaccaagaccctgatgaacaccatcatgcagctgagaaagatctgcaaccacccctacatgttccagcacatcgaggagagcttcagcgagcacctgggcttcaccggcggcatcgtgcagggcctggacctgtacagagccagcggcaagttcgagctgctggacagaatcctgcccaagctgagagccaccaaccacaaggtgctgctgttctgccagatgaccagcctgatgaccatcatggaggactacttcgcctacagaggcttcaagtacctgagactggacggcaccaccaaggccgaggacagaggcatgctgctgaagaccttcaacgagcccggcagcgagtacttcatcttcctgctgagcaccagagccggcggcctgggcctgaacctgcagagcgccgacaccgtgatcatcttcgacagcgactggaacccccaccaggacctgcaggcccaggacagagcccacagaatcggccagcagaacgaggtgagagtgctgagactgtgcaccgtgaacagcgtggaggagaagatcctggccgccgccaagtacaagctgaacgtggaccagaaggtgatccaggccggcatgttcgaccagaagagcagcagccacgagagaagagccttcctgcaggccatcctggagcacgaggagcaggacgaggaggaggacgaggtgcccgacgacgagaccgtgaaccagatgatcgccagacacgaggaggagttcgacctgttcatgagaatggacctggacagaagaagagaggaggccagaaaccccaagagaaagcccagactgatggaggaggacgagctgcccagctggatcatcaaggacgacgccgaggtggagagactgacctgcgaggaggaggaggagaagatgttcggcagaggcagcagacacagaaaggaggtggactacagcgacagcctgaccgagaagcagtggctgaaggccatcgaggagggcaccctggaggagatcgaggaggaggtgagacagaagaagagcagcagaaagagaaagagagacagcgacgccggcagcagcacccccaccaccagcaccagaagcagagacaaggacgacgagagcaagaagcagaagaagagaggcagaccccccgccgagaagctgagccccaacccccccaacctgaccaagaagatgaagaagatcgtggacgccgtgatcaagtacaaggacagcagcggcagacagctgagcgaggtgttcatccagctgcccagcagaaaggagctgcccgagtactacgagctgatcagaaagcccgtggacttcaagaagatcaaggagagaatcagaaaccacaagtacagaagcctgaacgacctggagaaggacgtgatgctgctgtgccagaacgcccagaccttcaacctggagggcagcctgatctacgaggacagcatcgtgctgcagagcgtgttcaccagcgtgagacagaagatcgagaaggaggacgacagcgagggcgaggagagcgaggaggaggaggagggcgaggaggagggcagcgagagcgagagcagaagcgtgaaggtgaagatcaagctgggcagaaaggagaaggcccaggacagactgaagggcggcagaagaagacccagcagaggcagcagagccaagcccgtggtgagcgacgacgacagcgaggaggagcaggaggaggacagaagcggcagcggcagcgaggaggactag

SEQ ID NO: 276474 - DNA, 4842 bp, Artificial Sequence
  derived and/or modified sequence
atgtcgacccctgatcccccactgggagggaccccgaggcccggaccctctccaggccccggaccttcgcccggcgctatgctgggaccgtcccccggaccatcgcctggatctgcgcactctatgatggggccaagccccggacctccgagtgccggtcaccctatccccactcaagggcctggcggctacccccaggataatatgcaccagatgcacaagcctatggaatctatgcacgagaaaggtatgagtgatgaccctcgatacaaccagatgaaggggatgggcatgaggagcggtggacatgcaggtatgggtcctccgccctctcccatggaccagcacagtcaagggtatccctcacccctcggtgggagtgagcatgcgagctcccctgtgccagcctcaggccccagcagcggcccacagatgtctagcggtccaggaggcgccccgcttgatggagctgatccccaggcactaggccaacagaaccgaggacccacccctttcaatcagaaccaactgcaccagctccgagcacagattatggcctataagatgctggcgaggggacagccactgccggatcatctacagatggccgtgcagggcaagcggcccatgcctggcatgcagcagcagatgcccaccttgccgcctccaagcgtgtccgcgaccggacccggtcctggcccaggacccgggcctggaccgggacccggtccagccccgccgaattactctagaccccatgggatgggtggccctaacatgccgccgcctggcccatccggagtgcctccagggatgcctggccagccccccggcggaccccctaagccctggccagagggaccaatggcaaatgcagcagcccccacatcgaccccacaaaagctcatcccaccccagccgacgggaaggccctcacccgccccgccagcagttccacccgccgcatcccccgtcatgcctcctcagacacagtccccgggacaaccagcacaacccgctcctatggtccctctccatcagaaacagtcaagaattacacccattcagaagccaagagggctcgatcctgtggagatcttacaagaacgagaataccgccttcaggccagaatcgcccacaggatccaagaattagagaacttgcctggctcactggcaggcgatctccgaacaaaggcaacaatcgaacttaaggccctgcgacttctgaatttccagcgacaactgcgacaggaggttgtcgtttgcatgcgcagagacaccgccctcgagacagcattaaacgccaaagcctataagcggtccaaacggcagtctctccgtgaggcgagaattacagagaaactagagaagcagcagaaaatagagcaagagagaaaaaggcgccagaagcaccaggaataccttaattcaatcctccagcatgcaaaggacttcaaggaatatcataggtccgtgactggaaagattcagaagctgactaaagcagttgcaacctaccatgccaataccgagagggagcagaagaaagagaatgaacggattgagaaggagcgaatgcggcgcctcatggccgaggacgaagaaggatatcgtaagcttatcgatcagaagaaggacaagagactggcttacttactacagcagacagatgagtacgtggccaatctgacagagcttgtgcgccagcataaagccgcgcaggttgcaaaggagaaaaagaaaaaaaagaagaaaaaaaaggctgagaacgctgagggtcagacgcctgctatcgggccagatggggagcctctcgatgagacatcgcagatgtcagacctccccgttaaagtgatccacgttgagagcgggaagatcctcacagggactgatgcgcccaaggcgggccaactggaagcctggctggagatgaacccagggtatgaagtagctcccaggtccgactccgaagagagcggatcagaggaagaggaggaggaagaggaagaagaacagcctcaagcggcccagcctccgacactgcctgtcgaggagaaaaaaaagattcccgatcctgactcagatgatgtgagcgaagtagatgcccgccatattatcgagaacgcgaagcaggacgtggatgacgaatacggagtgtcacaggcgctcgcccgaggcctgcagtcctattatgccgtggctcacgcagtgacagagcgagtagataaacagtcggcactgatggtgaatggagtgctgaaacagtaccagattaagggcctcgagtggctggtaagcttatacaataacaatctgaacggcatcctggcggacgagatgggattggggaagacaatccagacaatcgccctgataacatatttaatggagcacaagaggatcaatggcccctttctcatcatcgtgcccttaagcacactatctaactgggcatacgagttcgataagtgggcaccctccgtggtaaaggtgtcatataagggatcacctgcagcacgacgtgctttcgtccctcaactgcggtccggtaagttcaacgtgcttcttactacctatgaatacatcataaaggacaagcacatcctcgcaaagattcgttggaagtacatgatcgtggatgaaggacatcgaatgaaaaatcatcattgtaagctgacccaggtgctcaatacccactacgtagcaccacgccggctgttgctgaccgggactcctctgcagaataagctccccgaattgtgggccttgctgaatttcttactacctacaatcttcaaatcctgtagtaccttcgaacagtggtttaatgctccgtttgctatgacaggggaaaaggtagacctgaacgaagaggagacaatcctaatcattagaagactccataaggtgctgcgcccctttctgcttcggcggcttaagaaagaggttgaggcccaattgcccgaaaaagtcgagtatgtcatcaaatgcgacatgtccgcactgcaacgagtgctttatcggcacatgcaagctaagggcgtactgttaaccgacggctcggaaaaggataaaaaggggaagggcggcacaaagactctcatgaacacaattatgcagctaagaaagatatgtaaccatccctacatgtttcagcatattgaggaatccttcagtgagcatttaggttttaccggcggcatagtgcagggcctcgatttgtatcgggcgtcaggtaaatttgaactcctggatagaatcctccctaagttgcgggctacaaatcacaaagtcttgttattctgtcaaatgacctcccttatgactatcatggaggattattttgcctaccgaggcttcaagtatttacggctcgatgggaccaccaaagctgaagacaggggcatgctcctaaagactttcaacgagcccgggtccgagtattttattttcctactttcgacacgagcaggcgggctgggcctcaatcttcagtctgccgacacagtgatcatattcgactctgactggaacccacaccaggacctgcaggcacaagatcgcgcacacagaatcgggcagcagaacgaagtgcgcgtcttgaggctttgtacagttaactctgtggaggaaaagattctggcagcggctaaatataaattgaatgttgatcagaaggtgattcaagcaggtatgtttgaccagaaatccagctcccacgagcgacgcgctttcctgcaagcaattctggaacacgaggagcaagacgaggaagaggacgaggtaccagacgatgagacggtcaatcagatgattgctagacacgaggaagaatttgacttgttcatgagaatggatctggatcgaaggcgcgaagaggcaagaaaccccaagagaaagccccgcttaatggaagaggacgaacttcctagttggattatcaaggacgacgccgaagtggagcggttaacctgtgaggaggaggaggagaagatgttcggcagaggctcaaggcacagaaaagaagtagactattctgactctctgacagagaaacagtggctcaaagctatcgaggagggaacgctcgaagaaatagaagaggaagtgcgccagaagaaatcatcccgcaaacgtaagagagactccgatgctggatcctcaacgcccacaacttccacgagatccagggataaggacgacgaaagcaagaagcagaagaagcgcggtaggccccccgcagagaaactcagccctaaccctccgaacctcaccaaaaaaatgaaaaagattgttgatgcagtgatcaagtacaaagatagttctggccgtcagctgtctgaggtgtttatacagctcccgtcccggaaggagctgccagaatattacgagttgatccggaagccagtagacttcaagaaaattaaggagcgcatccgaaatcacaaataccgtagcctcaatgatctagagaaagatgtgatgttactgtgtcagaacgctcagacctttaacctggaaggctcattgatctatgaagattcaatcgtgctccagtccgtttttaccagcgtccgacaaaaaatcgagaaagaggatgatagcgaaggcgaggaatccgaagaagaggaagaaggcgaggaggaaggctccgagtcagagtcccgttctgttaaagtcaaaatcaagctaggcagaaaggaaaaggcccaggaccgacttaaagggggccgcaggcgtcccagccgcgggtcacgggcaaagcccgtagtatccgacgacgatagtgaggaggagcaggaggaggacaggtcgggaagcggttcggaggaggactag

SEQ ID NO: 276475 - DNA, 4842 bp, Artificial Sequence
  derived and/or modified sequence
atgagcaccccagacccccccctgggcggcaccccccggcccggccccagccctggccctggccccagccctggggccatgctgggccccagccctggccccagccctggcagcgcccacagcatgatgggccccagccctggccccccatctgctggccaccccatccccacccagggccctgggggctacccccaggacaacatgcaccagatgcacaagcccatggagagcatgcatgagaagggcatgtctgatgacccccgctacaaccagatgaagggcatgggcatgaggtctgggggccacgccggcatgggccccccacccagccccatggaccagcacagccagggctaccccagccccctgggcggcagcgagcacgccagcagccctgtgcctgccagcggccccagcagcggcccccagatgagcagcggccctggaggagcccccctggatggagctgacccccaggccctgggccagcagaacagaggccccacccccttcaaccagaaccagctgcaccagctgcgggcccagatcatggcctacaagatgctggcccggggccagcccctgcctgaccacctgcagatggctgtgcagggcaagaggcccatgcctggcatgcagcagcagatgcccaccctgcccccacccagcgtgtctgccaccggccctggccctggccctggccctggccctggccctggccctggccctgccccacccaactacagccggccccacggcatgggcggccccaacatgcctcctcctggccccagcggcgtgcccccaggcatgcctggccagcccccaggcggcccccccaagccctggccagagggccccatggccaatgctgctgcccccaccagcaccccccagaagctgatccccccccagcccaccggccggcccagccctgcccctcctgctgtgcccccagctgccagccctgtgatgccaccccagacccagagccctggccagcctgcccagcctgcccccatggtgcccctgcaccagaagcagagccgcatcacccccatccagaagccccggggcctggaccctgtggagatcctgcaggagcgggagtaccgcctgcaggcccgcatcgcccaccgcatccaggagctggagaacctgcccggcagcctggccggggacctgcggaccaaggccaccatcgagctgaaggccctgcggctgctgaacttccagaggcagctgcggcaggaggtggtggtgtgcatgagaagagacacagccctggagacagccctgaatgccaaggcctacaagaggagcaagaggcagagcctgcgggaggcccgcatcacagagaagctggagaagcagcagaagattgagcaggagaggaagaggcggcagaagcaccaggagtacctgaacagcatcctgcagcacgccaaggacttcaaggagtaccacaggtctgtgacaggcaagatccagaagctgaccaaggctgtggccacctaccacgccaacacagagcgggagcagaagaaggaaaatgaaagaattgagaaggagaggatgaggcggctgatggctgaagatgaggagggctacaggaagctgattgaccagaagaaggacaagaggctggcctacctgctgcagcagacagatgaatatgtggccaacctgacagagctggtgcggcagcacaaggccgcccaggtggccaaggagaagaagaagaagaagaagaagaagaaggccgagaatgctgagggccagaccccagccatcggcccagatggagagcccctggatgagaccagccagatgtctgacctgcctgtgaaggtgattcatgtggagagcggcaagatcctgactggaacagatgcccccaaggccggccagctggaggcctggctggagatgaaccctggctatgaggtggcccccaggagtgacagcgaggagagcggcagcgaggaggaggaggaggaggaggaggaggagcagccccaggccgcccagccccccaccctgcctgtggaggagaagaagaagatcccagaccctgacagtgatgatgtgtctgaggtggatgcccggcacatcattgaaaatgccaagcaggatgtggatgatgaatatggagtgtcccaggccctggcccggggcctgcagagctactatgctgtggcccatgctgtgacagagcgggtggacaagcagagcgccctgatggtgaatggagtgctgaagcagtaccagatcaagggcctggagtggctggtgtccctgtacaacaacaacctgaatggcatcctggctgatgagatgggcctgggcaagaccatccagaccatcgccctgatcacctacctgatggagcacaagaggatcaatggccccttcctgatcatcgtgcccctgagcaccctgagcaactgggcctatgaatttgacaagtgggcccccagcgtggtgaaggtgtcctacaagggcagccctgctgcccggcgggcctttgtgccccagctgcggagcggcaagttcaacgtgctgctgaccacctatgagtacatcatcaaggacaagcacatcctggccaagatccgctggaagtacatgattgtggatgagggccacaggatgaagaaccaccactgcaagctgacccaggtgctgaacacccactacgtggccccccggcggctgctgctgaccggcacccccctgcagaacaagctgcctgagctgtgggccctgctgaacttcctgctgcccaccatcttcaagagctgcagcacctttgagcagtggttcaatgccccctttgccatgaccggggagaaggtggacctgaatgaggaggagaccatcctgatcatccggcggctgcacaaggtgctgcggcccttcctgctgcggcggctgaagaaggaggtggaggcccagctgcctgagaaggtggagtatgtgatcaagtgtgacatgtctgccctgcagagggtgctgtaccgccacatgcaggccaagggcgtgctgctgacagatggcagcgagaaggacaagaagggcaaaggaggcaccaagaccctgatgaacaccatcatgcagctgaggaagatctgcaaccacccctacatgttccagcacatcgaggagagcttcagcgagcacctgggcttcaccggcggcatcgtgcagggcctggacctgtaccgggccagcggcaagtttgagctgctggaccgcatcctgcccaagctgcgggccaccaaccacaaggtgctgctcttctgccagatgaccagcctgatgaccatcatggaggactactttgcctaccggggcttcaagtacctgcggctggatggcaccaccaaggcagaagatcggggcatgctgctgaagaccttcaatgaacctggcagcgagtacttcatcttcctgctgagcacccgggccggcggcctgggcctgaacctgcagagcgctgacaccgtcatcatctttgacagcgactggaacccccaccaggacctgcaggcccaggaccgggcccacagaattggccagcagaatgaggtgcgggtgctgcggctgtgcaccgtgaacagcgtggaggagaagatcctggccgccgccaagtacaagctgaatgtggaccagaaggtgatccaggccggcatgtttgaccagaagagcagcagccatgaaagaagagccttcctgcaggccatcctggagcacgaggagcaggatgaggaggaggatgaggtgcctgatgatgagaccgtgaaccagatgattgcccggcatgaggaggagtttgacctcttcatgaggatggacctggacagaagaagagaggaggccaggaaccccaagaggaagccccggctgatggaggaggatgagctgcccagctggatcatcaaggatgatgctgaggtggagcggctgacctgtgaggaggaggaggagaagatgtttggccggggcagccgccacaggaaggaggtggactacagcgacagcctgacagagaagcagtggctgaaggccatcgaggagggcaccctggaggagattgaggaggaggtgcggcagaagaagagcagcaggaagaggaagagggacagtgatgctggcagcagcacccccaccaccagcaccaggagccgggacaaggatgatgagagcaagaagcagaagaagaggggccggcccccagctgagaagctgagccccaacccccccaacctgaccaagaagatgaagaagatcgtggatgctgtgatcaagtacaaggacagcagcggccggcagctgtctgaggtgttcatccagctgcccagcaggaaggagctgcctgagtactatgagctgatcaggaagcctgtggacttcaagaagatcaaggagcgcatccggaaccacaagtaccgcagcctgaatgacctggagaaggatgtgatgctgctgtgccagaatgcccagaccttcaacctggagggcagcctcatctatgaggacagcatcgtgctgcagagcgtcttcacctctgtgcggcagaagattgagaaggaggatgacagcgagggggaggagagcgaggaggaggaggagggggaggaggagggcagcgagagcgagagccgctctgtgaaggtgaagatcaagctgggcaggaaggagaaggcccaggaccggctgaagggcggcagaagaagacccagccggggcagccgggccaagcctgtggtgtctgatgatgattctgaggaggagcaggaggaggacaggagcggcagcggcagcgaggaggactag

SEQ ID NO: 276476 - DNA, 4842 bp, Artificial Sequence
  derived and/or modified sequence
atgagcacccccgacccccccctgggcggcaccccccggcccggccctagtccaggaccgggacccagcccaggggctatgctcggcccctcccctggcccttccccggggagtgcccatagtatgatgggccctagccctggccctccatccgcaggccatcccatcccgacccagggtccaggtggctatcctcaggacaacatgcatcaaatgcacaaacctatggagagtatgcacgagaaaggtatgtccgacgatccgcgctataatcaaatgaaaggaatgggcatgaggagtggggggcatgctggaatgggaccaccaccctctccaatggaccagcattcccaaggttatccttcgccacttgggggtagcgagcacgcaagtagtcctgtgcctgcctcaggcccgagttccggcccccaaatgtcttcaggtccagggggggcccctttggatggggcagatcctcaggccctgggccagcagaacagaggtccaaccccattcaatcagaatcagctccatcagctacgagctcaaatcatggcttataaaatgctcgcccgtggccaacccctccctgatcatctgcaaatggctgtccagggtaagagaccaatgcctggcatgcagcaacagatgcctacactgcccccaccctccgtctcagcaactggccctggcccaggcccagggccaggacccggacctggtcctggccccgctcctcctaactactcccgacctcacggcatggggggaccgaacatgcccccccccgggccaagtggagtcccccccggcatgccggggcagccccccggcgggccccccaaaccttggcctgaggggcctatggcgaacgctgccgcacctacgtctaccccccagaagctcattccccctcagccaacaggcaggcccagtcccgcacccccagccgtgccacccgcagcctcaccagtgatgcccccacagacccagtcacctggacagcctgcacagcccgcgccgatggtcccgctgcaccagaagcagtctcggatcactcctatacaaaaacctcgcggtcttgatcctgtggaaatcctccaggagcgcgagtataggctgcaggcacggatcgctcacagaattcaagagctggaaaatcttccaggctccctggcaggggatttacgcaccaaagcaaccattgagctgaaagccctccgtctgctcaacttccagagacagctgcgacaggaggttgtcgtatgcatgagacgcgacactgctctggaaaccgctctaaacgcaaaagcatacaagagaagcaagcggcaatccctgagagaggctaggataaccgagaaactggagaagcagcaaaagatcgagcaagagagaaagcgcagacaaaagcaccaagaatatctcaacagtatccttcaacatgccaaagattttaaggagtaccatcggtccgtgacaggcaaaatacagaaacttaccaaagccgtggcgacctatcacgctaacactgaacgggagcagaagaaagagaacgaacgcattgaaaaggaaagaatgaggcgtctgatggcagaggacgaggaaggttatcgaaaactgatcgaccagaaaaaagacaaacgacttgcgtacctgctgcaacagacagacgaatatgtggctaacttgaccgaactggttaggcagcacaaagctgcgcaggtcgccaaagaaaaaaagaagaagaagaaaaagaagaaagcggaaaacgctgaaggacaaacacctgctatcggtcctgacggcgagccccttgatgagaccagccagatgagtgacttgccggtgaaagtgatacacgtggagtccggaaaaattctgacaggcaccgacgccccaaaggctggccagctagaggcgtggctggagatgaaccccggatacgaggtagctcctcgctccgacagcgaggagagtggatccgaagaggaggaagaagaggaagaagaggagcaaccacaggccgcacagcctcccaccctcccagtggaagagaagaaaaagattccagaccccgacagcgacgatgtgagcgaagtggatgccaggcatattatcgaaaacgcaaagcaggacgtcgatgacgaatacggcgtcagccaggccctcgcccgaggactgcagtcttattacgcagttgctcacgcagtaactgaacgagtggataagcagtccgccctgatggttaacggcgttctaaaacagtaccagattaagggtctcgagtggttagttagcctttacaataataatctcaatggcatcctggctgacgagatgggcctgggcaagaccattcagacaatcgctctgattacatatctcatggagcacaagcgcattaatggaccgttccttatcatcgtacccttatctactctatctaactgggcttacgagtttgacaaatgggccccttctgtggtgaaagtgtcctataagggttcacccgccgcacgccgggcctttgtgccccagctgcgttccggcaagtttaatgtcctacttacaacatacgagtacatcataaaggacaagcatatacttgccaaaatccggtggaagtatatgatcgtagacgaaggacaccgaatgaaaaatcaccactgtaagctgactcaggtgctgaacacacattacgtcgctcccagacgtctactgctcaccggaacaccgctccagaacaagctgcctgaactctgggccctccttaactttctgcttcctaccattttcaagtcctgcagcacttttgaacaatggttcaatgcgcccttcgccatgaccggcgagaaagttgatctcaatgaggaagaaaccatacttatcataaggaggttgcacaaggtactgaggcctttccttctgcggcgcctgaaaaaggaagttgaggcacagctccctgaaaaggtcgaatacgtgattaaatgcgacatgtcggcactgcagcgggttttgtaccgtcacatgcaggctaagggagtgctcctcactgacgggtcagaaaaagataagaaaggcaagggcggaaccaagacgctcatgaataccattatgcaactgaggaagatttgcaatcacccttacatgtttcagcatatcgaagaatcctttagcgaacacctagggttcactgggggtatcgtgcaagggctggacctgtatagggcttccggcaaatttgagttacttgacaggatcttgcccaaactgcgcgctacaaaccataaggtgcttctgttttgccaaatgacatcactgatgactatcatggaggactacttcgcctatcgagggtttaagtacctgaggcttgatggcacgacaaaggctgaagacaggggtatgcttttaaagacttttaatgagcctggttccgagtacttcatctttctcttgtctacccgtgctggcggcttggggttgaatctccagagtgccgacacagtgataatctttgactcagactggaatcctcatcaggacctccaggcccaggatcgcgcccaccgcattggacagcagaacgaagtgagggtgctgaggctgtgtaccgtcaactcagttgaagaaaaaattctggccgccgcaaagtacaagctcaatgtggatcagaaagtgatccaggccggcatgttcgaccaaaagtctagttctcacgagaggagggcttttctgcaggctattctcgaacatgaagaacaagacgaagaagaggacgaagtacctgatgacgagaccgtcaatcagatgatcgcgaggcatgaagaggagttcgacctgttcatgcgtatggaccttgatcgtaggcgggaagaggctcggaaccccaagagaaagccccggttaatggaggaagacgaactaccaagctggatcattaaggatgacgccgaggtcgagcgtctgacgtgcgaagaggaggaggaaaaaatgttcggtcgcggtagtagacatcggaaagaggttgactatagcgatagccttactgaaaaacaatggctcaaagccatcgaagaagggactttggaggaaattgaggaggaagtccgacagaagaagtcaagccggaagcgaaagagagattcagatgccggctccagcaccccgactacaagtaccaggtctcgagacaaagacgacgagtctaaaaaacaaaagaaacggggaagacctccagcagagaagctgagtcccaatccaccgaacctgaccaagaagatgaagaaaatcgtggacgctgtgatcaaatacaaggacagctccggtaggcagctgtctgaggtgtttatccaactaccatccaggaaggagttgcctgaatactacgagctgatcaggaagccagtggattttaagaaaattaaagagcggattcggaatcacaaatacagatccctcaatgacctcgagaaggacgtgatgttactctgtcagaatgcacagacattcaatctggaaggttctctcatctacgaagatagtattgtcttacaatccgtcttcacttctgtcaggcaaaaaatcgaaaaggaggacgactctgagggagaggaaagtgaggaagaagaagagggcgaggaagagggcagcgagagcgagtcccgctctgtgaaagtcaaaatcaagttgggccgcaaggaaaaggctcaggatagattaaaaggaggcaggcgtaggcccagtagggggtctagagcaaaacccgtcgtttctgacgacgattccgaggaagagcaggaggaggaccgatctgggtcgggcagcgaagaggattag

SEQ ID NO: 276477 - DNA, 4842 bp, Artificial Sequence
  derived and/or modified sequence
atgtcaacaccagaccctccgcttggcggaacaccaaggcctggcccttcacctgggcctgggccttcgccaggcgcaatgttgggacccagtccaggaccttcccctgggagtgcgcactccatgatgggcccttctcctggtccaccctccgcaggtcatcccattccgacacagggcccaggcggatacccccaggacaacatgcaccaaatgcataaacctatggaatcaatgcatgagaaaggcatgagtgatgacccgcgttataatcaaatgaaaggcatgggaatgagatcaggcggacatgccggaatggggcctccaccaagcccaatggaccagcatagccagggctacccttcccccttagggggttctgaacacgccagcagcccagttcccgctagcggcccaagctcgggcccacagatgagctctggacccggtggagcccctctagacggtgccgaccctcaagcactgggccagcagaatagaggcccaactccttttaaccaaaatcagcttcatcagcttagggcgcagatcatggcttacaagatgctcgccagagggcagcccttacctgaccacctgcagatggcagtgcaaggaaagcggccaatgccaggaatgcagcaacagatgccgactctgccccctccctccgtatccgctactggcccaggcccaggtcctggccctggacccggaccaggtcctgggccagcgccaccaaattacagtcgtcctcacggtatgggcggtcctaacatgccgccacccggtccctctggcgtaccccctggaatgcccggtcagcctcccggaggacctccaaagccgtggcctgagggacccatggccaatgcggctgcccctacctctacccctcaaaagttgattcctcctcaacctacaggacgcccttcacctgcgccacccgctgtaccccctgctgcctcccctgtgatgccaccccagacccagtcacccggacagccagcgcagcctgctcctatggttcctctgcatcagaagcaaagccgcataacccccattcagaaaccacgcggtcttgaccccgtcgagattctgcaggagagagaatataggttacaagcccgtatagcgcaccggattcaagagctagagaatctgccgggatcccttgcaggcgatctcaggaccaaggccaccatcgaacttaaggctcttcgcctgctcaacttccagcgccaactgcgccaagaggtcgtggtctgcatgcgacgggacactgccctggagacagccttgaacgccaaagcttataagagatcgaagcgccaaagcctgcgggaggcccgtataactgaaaagctggaaaagcagcagaaaatagagcaggagagaaaacgcaggcagaagcatcaggagtacctgaacagcattctacagcacgctaaggatttcaaagagtaccaccggagcgtgacggggaagattcagaaactcacaaaagctgtcgccacctaccatgccaatactgaaagggaacagaagaaagagaatgaacgcattgagaaggagagaatgagacgccttatggccgaagacgaggaagggtaccgcaaactcatcgaccagaaaaaagataaacgcctggcatatctgctgcagcagaccgatgaatatgtagcgaatctgactgagctagttcgccagcacaaggctgcacaggtggccaaggagaagaagaagaagaaaaagaagaagaaagccgaaaatgccgagggccagacccccgctattggacctgacggcgagcctcttgacgagacgagccagatgagcgacctgccagtgaaggtgattcatgtggaatcaggcaagatccttactggcacagacgctcccaaggccggacagcttgaggcatggctcgagatgaaccccggatacgaggtggcaccgaggtccgattccgaagaatctggcagtgaggaagaggaggaggaagaagaggaagagcagcctcaggccgctcaaccccctactctgcctgttgaagagaaaaaaaagatcccagacccagattccgacgatgttagcgaggtggatgccagacacatcattgaaaacgccaagcaggacgtggacgatgagtacggcgtgtcccaggccttagccaggggcctccagtcctattacgcagttgcccacgctgtcacagagagagtcgataaacagtctgcactcatggtcaatggcgtattgaagcagtatcagattaaaggactggaatggcttgttagcctgtataacaacaacctgaacggcatcctcgccgacgagatgggtctggggaagactatccagaccattgcattaataacctacctcatggaacacaagcgaatcaacggccctttcctgattatcgtgccgctatcaactcttagcaattgggcctacgagtttgataaatgggctccttctgttgtgaaggtgtcctacaagggaagtccagcagcccgacgcgcattcgtgccgcagcttaggtccggcaagttcaacgtgctcctgacgacttatgagtacatcattaaagacaagcatattcttgcaaagattcggtggaagtacatgattgtcgacgaagggcatcggatgaaaaatcaccactgtaagctaacacaggtgctcaacacacactatgtggcccctcggaggttgctacttacaggcacacctctgcaaaataagctgcctgagctgtgggccttgctgaatttcctactcccgacaatctttaagtcctgttctacattcgaacaatggtttaatgcgccattcgcgatgacaggagagaaagtggacttgaatgaggaggaaaccatcctaatcatccgccgattgcacaaggtactgcgcccatttcttctgcgcaggctcaaaaaagaggtagaggcacagctacccgaaaaggtcgagtacgtgattaaatgcgatatgtcagctctacaacgtgtattgtatagacatatgcaggcaaagggggtcctgctcacagatggctcagagaaagacaagaaggggaaagggggaacgaaaacactgatgaatacaattatgcaacttcgcaagatatgcaaccatccctatatgtttcagcatattgaggaaagcttctctgaacacctgggcttcactgggggtattgtacaaggcctggatttgtacagagcctctggtaagttcgaattgctggatcgcattctccctaagttgagggctaccaaccacaaggtccttctgttttgccagatgacgtcgttgatgaccattatggaagactacttcgcttaccgtggttttaaatacctccgcttggatggtaccaccaaagctgaggaccgagggatgctgttgaagactttcaatgagcccggatctgagtactttatctttctgttaagcactcgagcgggaggcctcggactcaaccttcagagcgctgatactgtgattatatttgactctgattggaacccgcaccaggatctgcaggcccaggacagggcccatcgcattgggcagcagaatgaagtgagggttcttcgcctttgtacggttaacagtgttgaggaaaaaatcctagccgcagctaagtacaaactcaatgtggaccagaaggtgatccaagctggcatgttcgatcagaagagctcttcccacgagcgccgagcgttcctgcaagccatcctagaacacgaagaacaggacgaagaagaggacgaagtgcctgatgatgaaaccgtgaaccaaatgattgcacggcatgaagaagaatttgacctgttcatgaggatggatctggaccgcagacgcgaagaagcaaggaaccctaaaaggaagcctcggctgatggaagaggatgaacttccaagctggattatcaaagatgatgctgaggttgaaagactcacttgcgaggaggaagaggaaaaaatgttcggtagaggaagtaggcatcggaaggaggtcgactattctgattctttaacagaaaaacagtggctcaaggctatagaagagggcacactcgaggagattgaggaggaggtacggcagaaaaagagctctagaaagcgcaagcgtgattccgatgccggatccagcacgccgacaacttctacccgtagtcgcgataaggatgacgagtctaaaaagcagaagaaacggggacggccaccagccgagaagctctcccccaaccctcctaacttgacgaaaaagatgaaaaaaatagtagacgcagttatcaaatataaggactcaagcggcagacaactgtctgaggtgttcatccagctgccttctagaaaggagctgcccgaatattatgagctaatccgaaaacctgtcgactttaaaaagatcaaggaacggattcgcaaccacaagtatagaagtttaaacgacctggagaaggatgtgatgttgttatgccagaatgcccagacatttaacctggagggcagtctaatttacgaagacagtatcgtgctccagagcgtgttcaccagtgtcagacagaagatagaaaaagaggacgatagtgagggcgaggagtccgaggaagaagaggagggagaggaggaggggtctgaatcagagtcccgtagcgtgaaagtgaagattaagttagggagaaaggagaaggctcaggatcgtctgaagggcggtagacgccgaccctcccggggatcaagagcgaagcccgtggtgtcagacgacgactcggaagaagagcaggaggaagatcgctccgggtcagggtcggaggaagactag

SEQ ID NO: 276478 - DNA, 4842 bp, Artificial Sequence
  derived and/or modified sequence
atgtccactccagacccacccctgggcggaactcctcggccaggtccttccccgggccctggcccttcccctggagccatgctgggccctagcccgggtccctcgccgggctccgcccacagcatgatggggcccagcccagggccgccctcagcaggacaccccatccccacccaggggcctggagggtaccctcaggacaacatgcaccagatgcacaagcccatggagtccatgcatgagaagggcatgtcggacgacccgcgctacaaccagatgaaaggaatggggatgcggtcagggggccatgctgggatggggcccccgcccagccccatggaccagcactcccaaggttacccctcgcccctgggtggctctgagcatgcctctagtccagttccagccagtggcccgtcttcggggccccagatgtcttccgggccaggaggtgccccgctggatggtgctgacccccaggccttggggcagcagaaccggggcccaaccccatttaaccagaaccagctgcaccagctcagagctcagatcatggcctacaagatgctggccagggggcagcccctccccgaccacctgcagatggcggtgcagggcaagcggccgatgcccgggatgcagcagcagatgccaacgctacctccaccctcggtgtccgcaacaggacccggccctggccctggccctggccccggcccgggtcccggcccggcacctccaaattacagcaggcctcatggtatgggagggcccaacatgcctcccccaggaccctcgggcgtgccccccgggatgccaggccagcctcctggagggcctcccaagccctggcctgaaggacccatggcgaatgctgctgcccccacgagcacccctcagaagctgattcccccgcagccaacgggccgcccttcccccgcgccccctgccgtcccacccgccgcctcgcccgtgatgccaccgcagacccagtcccccgggcagccggcccagcccgcgcccatggtgccactgcaccagaagcagagccgcatcacccccatccagaagccgcggggcctcgaccctgtggagatcctgcaggagcgcgagtacaggctgcaggctcgcatcgcacaccgaattcaggaacttgaaaaccttcccgggtccctggccggggatttgcgaaccaaagcgaccattgagctcaaggccctcaggctgctgaacttccagaggcagctgcgccaggaggtggtggtgtgcatgcggagggacacagcgctggagacagccctcaatgctaaggcctacaagcgcagcaagcgccagtccctgcgcgaggcccgcatcactgagaagctggagaagcagcagaagatcgagcaggagcgcaagcgccggcagaagcaccaggaatacctcaatagcattctccagcatgccaaggatttcaaggaatatcacagatccgtcacaggcaaaatccagaagctgaccaaggcagtggccacgtaccatgccaacacggagcgggagcagaagaaagagaacgagcggatcgagaaggagcgcatgcggaggctcatggctgaagatgaggaggggtaccgcaagctcatcgaccagaagaaggacaagcgcctggcctacctcttgcagcagacagacgagtacgtggctaacctcacggagctggtgcggcagcacaaggctgcccaggtcgccaaggagaaaaagaagaaaaagaaaaagaagaaggcagaaaatgcagaaggacagacgcctgccattgggccggatggcgagcctctggacgagaccagccagatgagcgacctcccggtgaaggtgatccacgtggagagtgggaagatcctcacaggcacagatgcccccaaagccgggcagctggaggcctggctcgagatgaacccggggtatgaagtagctccgaggtctgatagtgaagaaagtggctcagaagaagaggaagaggaggaggaggaagagcagccgcaggcagcacagcctcccaccctgcccgtggaggagaagaagaagattccagatccagacagcgatgacgtctctgaggtggacgcgcggcacatcattgagaatgccaagcaagatgtcgatgatgaatatggcgtgtcccaggcccttgcacgtggcctgcagtcctactatgccgtggcccatgctgtcactgagagagtggacaagcagtcagcgcttatggtcaatggtgtcctcaaacagtaccagatcaaaggtttggagtggctggtgtccctgtacaacaacaacctgaacggcatcctggccgacgagatgggcctggggaagaccatccagaccatcgcgctcatcacgtacctcatggagcacaaacgcatcaatgggcccttcctcatcatcgtgcctctctcaacgctgtccaactgggcgtacgagtttgacaagtgggccccctccgtggtgaaggtgtcttacaagggatccccagcagcaagacgggcctttgtcccccagctccggagtgggaagttcaacgtcttgctgacgacgtacgagtacatcatcaaagacaagcacatcctcgccaagatccgttggaagtacatgattgtggacgaaggtcaccgcatgaagaaccaccactgcaagctgacgcaggtgctcaacacgcactatgtggcaccccgccgcctgctgctgacgggcacaccgctgcagaacaagcttcccgagctctgggcgctgctcaacttcctgctgcccaccatcttcaagagctgcagcaccttcgagcagtggtttaacgcaccctttgccatgaccggggaaaaggtggacctgaatgaggaggaaaccattctcatcatccggcgtctccacaaagtgctgcggcccttcttgctccgacgactcaagaaggaagtcgaggcccagttgcccgaaaaggtggagtacgtcatcaagtgcgacatgtctgcgctgcagcgagtgctctaccgccacatgcaggccaagggcgtgctgctgactgatggctccgagaaggacaagaagggcaaaggcggcaccaagaccctgatgaacaccatcatgcagctgcggaagatctgcaaccacccctacatgttccagcacatcgaggagtccttttccgagcacttggggttcactggcggcattgtccaagggctggacctgtaccgagcctcgggtaaatttgagcttcttgatagaattcttcccaaactccgagcaaccaaccacaaagtgctgctgttctgccaaatgacctccctcatgaccatcatggaagattactttgcgtatcgcggctttaaatacctcaggcttgatggaaccacgaaggcggaggaccggggcatgctgctgaaaaccttcaacgagcccggctctgagtacttcatcttcctgctcagcacccgggctggggggctcggcctgaacctccagtcggcagacactgtgatcatttttgacagcgactggaatcctcaccaggacctgcaagcgcaggaccgagcccaccgcatcgggcagcagaacgaggtgcgtgtgctccgcctctgcaccgtcaacagcgtggaggagaagatcctagctgcagccaagtacaagctcaacgtggaccagaaggtgatccaggccggcatgttcgaccagaagtcctccagccatgagcggcgcgccttcctgcaggccatcctggagcacgaggagcaggatgaggaggaagacgaggtgcccgacgacgagaccgtcaaccagatgatcgcccggcacgaggaggagtttgatctgttcatgcgcatggacctggaccgcaggcgcgaggaggcccgcaaccccaagcggaagccgcgcctcatggaggaggacgagctcccctcgtggatcatcaaggacgacgcggaggtggagcggctgacctgtgaggaggaggaggagaagatgttcggccgtggctcccgccaccgcaaggaggtggactacagcgactcactgacggagaagcagtggctcaaggccatcgaggagggcacgctggaggagatcgaagaggaggtccggcagaagaaatcatcacggaagcgcaagcgagacagcgacgccggctcctccaccccgaccaccagcacccgcagccgcgacaaggacgacgagagcaagaagcagaagaagcgcgggcggccgcctgccgagaaactctcccctaacccacccaacctcaccaagaagatgaagaagattgtggatgccgtgatcaagtacaaggacagcagtggacgtcagctcagcgaggtcttcatccagctgccctcgcgaaaggagctgcccgagtactacgagctcatccgcaagcccgtggacttcaagaagataaaggagcgcattcgcaaccacaagtaccgcagcctcaacgacctagagaaggacgtcatgctcctgtgccagaacgcacagaccttcaacctggagggctccctgatctatgaagactccatcgtcttgcagtcggtcttcaccagcgtgcggcagaaaatcgagaaggaggatgacagtgaaggcgaggagagtgaggaggaggaagagggcgaggaggaaggctccgaatccgaatctcggtccgtcaaagtgaagatcaagcttggccggaaggagaaggcacaggaccggctgaagggcggccggcggcggccgagccgagggtcccgagccaagccggtcgtgagtgacgatgacagtgaggaggaacaagaggaggaccgctcaggaagtggcagcgaagaagactga

SEQ ID NO: 276479 - protein, 483 aa, Artificial Sequence
  derived and/or modified sequence
MTEVEYTQLQHILCSHMEAAADGELETRLNSALLAAAGPGAGAGGFAAGGQGGAAPVYPVLCPSALAADAPCLGHIDFQELRMMLLSEAGAAEKTSGGGDGARARADGAAKEGAGAAAAAAGPDGAPEARAKPAVRVRLEDRFNSIPAEPPPAPRGPEPPEPGGALNNLVTLIRHPSELMNVPLQQQNKCTALVKNKTAATTTALQFTYPLFTTNACSTSGNSNLSQTQSSSNSCSVLEAAKHQDIGLPRAFSFCYQQEIESTKQTLGSRNKVLPEQVWIKVGEAALCKQALKRNRSRMRQLDTNVERRALGEIQNVGEGATATQGAWQSSESSQANLGEQAQSGPQGGRSQRRERHNRMERDRRRRIRICCDELNLLVPFCNAETDKATTLQWTTAFLKYIQERHGDSLKKVLSTNSRYVMLWTCFLKMKSAVDGKNPQHAYRTANHKWLCLHEARSFAFEVSIWAHFQLFRVRIPEGFLSI

SEQ ID NO: 276480 - DNA, 2453 bp, Artificial Sequence
  derived and/or modified sequence
cgggccgggggtcgcctcccgcctcccgcctcccgcctcccgccgcccgccgcccgcgtcgccctcgccgccgttgggccgcgccgcgccgccatgtcgggccccggaccgcgggagccgccgccggaggcaggcgcggcaggcggcgaggcggccgtcgagggcgcgggcggcggggacgcggcgctgggcgagccggggctgagcttcacgaccaccgacctgagcctggtggagatgacggaggtggagtacacgcagctgcagcacatcctctgctcgcacatggaggcggcggctgacggcgagctcgagacgcgcctcaactcggcgctgctggcggcggcgggcccgggcgcaggcgcgggcggcttcgcggcgggcggtcaggggggcgcggcgcccgtgtaccccgtgctgtgcccgtccgcgctggcggccgacgcgccctgcctgggccacatcgacttccaggagctgcgcatgatgctgctaagcgaggcgggcgcggcggagaagacgtcgggcggcggggacggagcgagggcccgggccgacggcgccgccaaggagggcgcgggcgcggctgcggctgcggctggacccgacggcgcgcccgaggcccgggccaagccggccgtgcgcgtccgcctggaggaccgcttcaacagcatccccgccgagccgccgcccgcgccgcgcggccccgagccccccgagccgggcggggcgctcaacaatttggtaactctcattcgacatccatctgaactaatgaatgttcctcttcagcaacaaaacaaatgtacagcattagtgaaaaataaaactgcggctacaactactgctttgcaatttacatacccactgtttactacaaatgcttgctctactagtggaaattctaatctttcacagacacagagttctagtaactcatgttctgtacttgaagctgccaagcaccaggatattggattgcctagagcattttctttctgttatcagcaagaaattgaatccactaaacagacgttaggtagtagaaacaaagttttgcctgagcaagtttggattaaagtgggagaagcagcgctatgcaaacaagcactgaagaggaatcggagtagaatgcgtcagttggacacaaatgtagagcgaagagcccttggagagattcagaatgtgggcgaaggtgccaccgccacacaaggcgcttggcagtcctcggagtcctcacaggcaaacctgggggagcaggcccagagtgggccccagggaggaaggtctcaacgtagggagaggcataaccgaatggaaagagatagaaggcgcagaatccgcatttgctgtgatgagttgaatctcttagtgccgttctgcaatgccgagactgacaaggccacaactctgcagtggaccacagcattcctgaaatacatccaggaaagacatggagattctcttaaaaaggttctaagcacaaactccagatacgtcatgttatggacttgcttcctgaagatgaaatcagcagttgatggaaagaatccacaacacgcctacagaacagcaaatcacaaatggctgtgtctccacgaagccaggagctttgcatttgaagtttctatctgggctcatttccagctgttcagggttcggattcctgaaggcttccttagcatttaactcattctttgttgactgaaggcactggcactgtttctccacacgcaaactgatctttgtcataaatcacttttataatgagagagcagcctggacacattgccacaccttccccattctccagctcttccttggtgatggagaagttatctccgcatgggcagggacagaaatatgtctccgagtcctcgtcatattggaagtcctcgatttccacctcgtcatgaaatactgccatggtcagcgggggttgctgaaggggtgacgccccagcagtccgagaccagctccgagggtctaacttctccggagccggcccaggctctgactttcatttaattgtcctgaaaggtgaattctatcttgccaaataggcaagtgttttttatatgtaggctttaggtgtcagaatataggaaattatcaaaatgtggggtcattttaaattgcatcctaaaaccttttaaaatttgggaagaagctgggcgtcgtagctcacgcctgtaatcccagcactttgggaagctgaggtgggcagattacctgaggtcaggagttcgagaccagcctggccaatacggtgtgacccccgtctctactaaaaatacaaaaattagccgggcgtggtggtacatgcctgtaatcccagctactcaggaggctgaggtgggagaatcagttgaacccaggaggcaaaggttgcagtgagctgagatcgtgccattgcaccccagtctgggcgacaagagtgaaactccatatcc

SEQ ID NO: 276481 - DNA, 1452 bp, Artificial Sequence
  derived and/or modified sequence
atgaccgaggtcgaatacacccagctccagcatattctgtgctctcacatggaagctgctgccgatggtgaactcgagactcggctcaatagcgcccttctggctgccgcggggcctggagctggggcaggtgggttcgccgcaggcggccaaggtggagctgcccctgtgtatcctgtgctatgcccgtctgccttagcggccgatgcaccgtgcctgggccatatcgattttcaggaactgcgcatgatgttattgtcggaggccggagctgctgagaagacaagcggagggggagatggcgctcgggctagggccgacggagcagccaaggaaggcgcaggggccgcagccgccgccgccggcccggatggtgcaccagaagcccgggccaaacctgccgtgcgggtcagactagaagatcgcttcaactccatccccgccgagccgccgccggcacctcgggggcccgagcctccagaacccggcggcgccctgaacaaccttgtgaccctgatcaggcacccttcagagctaatgaatgtccctctgcagcagcagaataaatgtacagctttggtaaaaaataagacagccgctacaactaccgccctccagtttacatatcccctgttcaccacgaatgcctgtagcacctctggcaacagcaacctgtcccagactcagtcatctagcaattcctgcagtgtactcgaggcggccaaacaccaggatattggattgcctcgcgcgttcagcttttgctaccagcaggaaatcgaatccacgaaacagacactcggttcccgcaacaaggtcctgcctgaacaggtttggatcaaggtcggcgaggcagccctgtgtaaacaggcactgaaacgcaatcgctcacgtatgcggcagctggacacaaatgtcgaacggagagccctcggggagatccagaatgtcggggaaggggcgacagccactcagggcgcctggcagtcaagcgagtcgagccaggctaacctcggggagcaggctcagtctggcccacaaggcggaaggtcccagcgcagggagcgccataatcgcatggaaagggatcgccgcagaaggatccggatttgttgtgacgagctgaacctgctggtccctttctgtaatgctgagacagacaaggctactactttgcaatggacaactgcattcttgaagtacattcaggagcgacacggcgacagcctaaagaaggtgctgagcacaaactccaggtacgtaatgctctggacttgtttcctgaaaatgaagtccgcagtggacggaaaaaatccccagcacgcctatcgcactgccaaccataaatggctatgcttgcacgaggccagaagttttgcctttgaggtgtccatatgggcacacttccagctgtttcgcgtgcgcatccctgagggtttcctgagcatatag

SEQ ID NO: 276482 - DNA, 1452 bp, Artificial Sequence
  derived and/or modified sequence
atgacagaggtggagtacacccagctgcagcacatcctgtgcagccacatggaggccgctgctgatggagagctggagacccggctgaacagcgccctgctggccgctgctggccctggagctggagctgggggctttgctgctgggggccagggcggggccgcccctgtgtaccctgtgctgtgccccagcgccctggccgcagatgccccctgcctgggccacatcgacttccaggagctgaggatgatgctgctgtctgaggccggggctgctgagaagaccagcggcggcggagatggagcccgggcccgggcagatggagctgccaaggagggcgctggagctgctgctgctgctgctggcccagatggagcccctgaggcccgggccaagccagctgtgcgggtgcggctggaggaccgcttcaacagcatcccagctgagcccccaccagccccccggggccctgagcccccagagcccggcggggccctgaacaacctggtgaccctcatccgccaccccagcgagctgatgaatgtgcccctgcagcagcagaacaagtgcacagccctggtgaagaacaagacagctgccaccaccacagccctgcagttcacctaccccctcttcaccaccaatgcctgcagcaccagcggcaacagcaacctgagccagacccagagcagcagcaacagctgcagcgtgctggaggccgccaagcaccaggacatcggcctgccccgggccttctccttctgctaccagcaggagattgagagcaccaagcagaccctgggcagcaggaacaaggtgctgcctgagcaggtgtggatcaaggtgggggaggccgccctgtgcaagcaggccctgaagaggaacagaagcaggatgaggcagctggacaccaacgtggagcggcgggccctgggggagatccagaatgtgggggagggcgccacagccacccagggcgcctggcagagcagcgagagcagccaggccaacctgggggagcaggcccagagcggcccccagggcggccgcagccagaggcgggagcggcacaacaggatggagcgggacagaagaagacgcatccgcatctgctgtgatgagctgaacctgctggtgcccttctgcaatgctgagacagacaaggccaccaccctgcagtggaccacagccttcctgaagtacatccaggagcggcacggggacagcctgaagaaggtgctgagcaccaacagccgctacgtgatgctgtggacctgcttcctgaagatgaagtctgctgtggatggcaagaacccccagcacgcctacagaacagccaaccacaagtggctgtgcctgcacgaggcccggagctttgcctttgaggtgtccatctgggcccacttccagctgttccgggtgcgcatccctgagggcttcctgagcatctag

SEQ ID NO: 276483 - DNA, 1452 bp, Artificial Sequence
  derived and/or modified sequence
atgaccgaggtggagtacacccagctgcagcacatcctgtgcagccacatggaagccgcagctgatggggagttggaaactaggcttaacagcgcccttttggcggctgccggccccggagcaggagcgggcgggttcgcagctggggggcaggggggcgcagcccccgtatacccggttctctgcccgagcgcattggccgcagatgcgccttgcctgggccacatcgacttccaggagctgagaatgatgttactgagtgaagcaggcgcagcagaaaaaacctcgggcgggggcgatggcgccagagcgcgggcagacggagcggccaaggaaggggctggggccgctgccgccgccgcaggacctgacggcgctcctgaggctcgggctaaacccgccgtcagggtaaggttagaggaccgatttaactctatcccagcagagcccccacccgcaccgaggggcccggaacccccagaaccagggggtgccttgaacaatctggttaccctaattcgtcatccctccgagctgatgaacgtgccgctgcagcagcagaacaagtgcaccgccttagtgaagaacaaaactgccgcaaccacaaccgctctccagtttacctatccactttttaccacgaacgcttgttctacttcagggaactccaacctgagtcagacgcaatcatcttccaactcctgttctgtcctcgaggccgcaaaacaccaggacataggcctgccccgcgctttctctttctgttatcaacaggaaatagagagcacaaagcaaacgctggggagccgaaacaaagttcttcccgagcaggtatggatcaaggtgggagaggccgccttgtgcaaacaagctctaaaaaggaatagaagtcggatgcgccaactagacacgaatgtcgagaggcgggcactgggggagattcagaatgtcggcgagggtgcaacagccacccagggcgcatggcagtcctctgaatcaagccaggcaaatttaggggagcaggcccagtccggcccccaaggtgggaggtcccagcgacgagagagacacaatcggatggagcgcgaccggaggaggcggattcggatttgctgtgacgaactgaacctgctggttcctttttgcaacgcagagactgacaaggcgaccactttgcagtggaccaccgctttcttaaagtatattcaggagcgccatggggactctctaaagaaagtgctgtcaactaacagtcgctatgtaatgctatggacctgctttttaaagatgaaatctgcggttgacggcaaaaacccacagcacgcttaccggacagcaaatcacaaatggttgtgtctgcacgaagcccggtctttcgctttcgaggtatccatctgggcccattttcagctctttagggtgagaattccagagggatttctgagcatatag

SEQ ID NO: 276484 - DNA, 1452 bp, Artificial Sequence
  derived and/or modified sequence
atgactgaagtagagtacacccagctccaacatattctctgcagtcatatggaggcggctgcggacggcgaattggagactcgattgaacagtgcgctgctcgcagccgctggccctggagctggtgccggaggcttcgctgcagggggacagggaggggctgctcctgtgtatcccgttctttgcccctcagcactggccgcagatgccccttgccttggccatatagatttccaggagctccgcatgatgctgctcagcgaagctggcgctgcggagaaaacttctggcggaggggacggtgctcgggctcgcgcagacggggctgctaaagagggagccggagccgcagcagctgctgctggacccgacggtgcacccgaagcaagggctaaacccgctgtgagggtcagattggaggatagattcaattctatacctgccgagcctccccctgccccaagaggccctgagccccctgagcctggcggagcgctgaataatttagtaaccctcattagacatccttctgaacttatgaacgttcccctgcagcagcagaataaatgcaccgctctggttaagaataagaccgcggctacgaccacagccctacagtttacatatccgctatttacgaccaatgcttgcagcacctctgggaactctaatctcagtcagactcagagctcttcaaattcctgctccgtccttgaagcggcaaagcaccaagatataggcttgcccagggccttctctttttgttatcagcaggagatcgaaagcaccaaacagaccctcgggtccagaaataaagtgcttcctgaacaagtttggattaaagtgggggaagcagcgctttgtaaacaagccctgaaacgtaatagaagccgcatgagacagctggacaccaacgtcgagcggcgagcactgggggaaatccagaacgtgggagagggggcaaccgcaacacagggtgcttggcagtctagcgagagcagccaagcaaacctgggcgagcaggcccagagcggccctcagggtggcaggtcccagcgtagggaacggcataaccggatggaacgagataggaggaggaggatacgaatctgttgtgatgaactgaatttgttggttcctttctgtaacgcagagaccgataaggctactacgctacaatggaccaccgctttcctcaaatatatccaagaaaggcacggcgactcgttgaagaaggtattgtcaacaaacagtcggtatgttatgctttggacatgtttcctgaagatgaagtcagccgtggatggaaagaaccctcagcacgcataccgcacagctaatcacaagtggctttgcctgcacgaggccagatctttcgcattcgaggtgagcatctgggctcactttcagctgtttcgggttcgcatccctgaaggatttcttagtatttag

SEQ ID NO: 276485 - DNA, 1452 bp, Artificial Sequence
  derived and/or modified sequence
atgaccgaggtggagtacacccagctgcagcacatcctgtgcagccacatggaggccgccgccgacggcgagctggagaccagactgaacagcgccctgctggccgccgccggccccggcgccggcgccggcggcttcgccgccggcggccagggcggcgccgcccccgtgtaccccgtgctgtgccccagcgccctggccgccgacgccccctgcctgggccacatcgacttccaggagctgagaatgatgctgctgagcgaggccggcgccgccgagaagaccagcggcggcggcgacggcgccagagccagagccgacggcgccgccaaggagggcgccggcgccgccgccgccgccgccggccccgacggcgcccccgaggccagagccaagcccgccgtgagagtgagactggaggacagattcaacagcatccccgccgagcccccccccgcccccagaggccccgagccccccgagcccggcggcgccctgaacaacctggtgaccctgatcagacaccccagcgagctgatgaacgtgcccctgcagcagcagaacaagtgcaccgccctggtgaagaacaagaccgccgccaccaccaccgccctgcagttcacctaccccctgttcaccaccaacgcctgcagcaccagcggcaacagcaacctgagccagacccagagcagcagcaacagctgcagcgtgctggaggccgccaagcaccaggacatcggcctgcccagagccttcagcttctgctaccagcaggagatcgagagcaccaagcagaccctgggcagcagaaacaaggtgctgcccgagcaggtgtggatcaaggtgggcgaggccgccctgtgcaagcaggccctgaagagaaacagaagcagaatgagacagctggacaccaacgtggagagaagagccctgggcgagatccagaacgtgggcgagggcgccaccgccacccagggcgcctggcagagcagcgagagcagccaggccaacctgggcgagcaggcccagagcggcccccagggcggcagaagccagagaagagagagacacaacagaatggagagagacagaagaagaagaatcagaatctgctgcgacgagctgaacctgctggtgcccttctgcaacgccgagaccgacaaggccaccaccctgcagtggaccaccgccttcctgaagtacatccaggagagacacggcgacagcctgaagaaggtgctgagcaccaacagcagatacgtgatgctgtggacctgcttcctgaagatgaagagcgccgtggacggcaagaacccccagcacgcctacagaaccgccaaccacaagtggctgtgcctgcacgaggccagaagcttcgccttcgaggtgagcatctgggcccacttccagctgttcagagtgagaatccccgagggcttcctgagcatctag

SEQ ID NO: 276486 - protein, 589 aa, Artificial Sequence
  derived and/or modified sequence
MNNRKEDMEITSHYRHLLRELNEQRQHGVLCDVCVVVEGKVFKAHKNVLLGSSRYFKTLYCQVQKTSEQATVTHLDIVTAQGFKAIIDFMYSAHLALTSRNVIEVMSAASFLQMTDIVQACHDFIKAALDISIKSDASDELAEFEIGASSSSSTEALISAVMAGRSISPWLARRTSPANSSGDSAIASCHDGGSSYGKEDQEPKADGPDDVSSQPLWPGDVGYGPLRIKEEQVSPSQYGGSELPSAKDGAVQNSFSEQSAGDAWQPTGRRKNRKNKETVRHITQQVEDDSRASSPVPSFLPTSGWPFSSRDSNADLSVTEASSSDSRGERAELYAQVEEGLLGGEASYLGPPLTPEKDDALHQATAVANLRAALMSKNSLLSLKADVLGDDGSLLFEYLPRGAHSLSLNEFTVIRKKFKCPYCSFSAMHQCILKRHMRSHTGERPYPCEICGKKFTRREHMKRHTLVHSKDKKYVCKVCSRVFMSAASVGIRHGSRRHGVCTDCAGRGMAGPLDHGGGGGEGSPEALFPGDGPYLEDPEDPRGEAEELGEDDEGLAPEDALLADDKDEEDSPRPRSPPGGPDKDFAWLS

SEQ ID NO: 276487 - DNA, 1770 bp, Artificial Sequence
  derived and/or modified sequence
atgaacaacagaaaggaggacatggagatcaccagccactacagacacctgctgagagagctgaacgagcagagacagcacggcgtgctgtgcgacgtgtgcgtggtggtggagggcaaggtgttcaaggcccacaagaacgtgctgctgggcagcagcagatacttcaagaccctgtactgccaggtgcagaagaccagcgagcaggccaccgtgacccacctggacatcgtgaccgcccagggcttcaaggccatcatcgacttcatgtacagcgcccacctggccctgaccagcagaaacgtgatcgaggtgatgagcgccgccagcttcctgcagatgaccgacatcgtgcaggcctgccacgacttcatcaaggccgccctggacatcagcatcaagagcgacgccagcgacgagctggccgagttcgagatcggcgccagcagcagcagcagcaccgaggccctgatcagcgccgtgatggccggcagaagcatcagcccctggctggccagaagaaccagccccgccaacagcagcggcgacagcgccatcgccagctgccacgacggcggcagcagctacggcaaggaggaccaggagcccaaggccgacggccccgacgacgtgagcagccagcccctgtggcccggcgacgtgggctacggccccctgagaatcaaggaggagcaggtgagccccagccagtacggcggcagcgagctgcccagcgccaaggacggcgccgtgcagaacagcttcagcgagcagagcgccggcgacgcctggcagcccaccggcagaagaaagaacagaaagaacaaggagaccgtgagacacatcacccagcaggtggaggacgacagcagagccagcagccccgtgcccagcttcctgcccaccagcggctggcccttcagcagcagagacagcaacgccgacctgagcgtgaccgaggccagcagcagcgacagcagaggcgagagagccgagctgtacgcccaggtggaggagggcctgctgggcggcgaggccagctacctgggcccccccctgacccccgagaaggacgacgccctgcaccaggccaccgccgtggccaacctgagagccgccctgatgagcaagaacagcctgctgagcctgaaggccgacgtgctgggcgacgacggcagcctgctgttcgagtacctgcccagaggcgcccacagcctgagcctgaacgagttcaccgtgatcagaaagaagttcaagtgcccctactgcagcttcagcgccatgcaccagtgcatcctgaagagacacatgagaagccacaccggcgagagaccctacccctgcgagatctgcggcaagaagttcaccagaagagagcacatgaagagacacaccctggtgcacagcaaggacaagaagtacgtgtgcaaggtgtgcagcagagtgttcatgagcgccgccagcgtgggcatcagacacggcagcagaagacacggcgtgtgcaccgactgcgccggcagaggcatggccggccccctggaccacggcggcggcggcggcgagggcagccccgaggccctgttccccggcgacggcccctacctggaggaccccgaggaccccagaggcgaggccgaggagctgggcgaggacgacgagggcctggcccccgaggacgccctgctggccgacgacaaggacgaggaggacagccccagacccagaagcccccccggcggccccgacaaggacttcgcctggctgagctag

SEQ ID NO: 276488 - DNA, 1770 bp, Artificial Sequence
  derived and/or modified sequence
atgaacaacaggaaagaggacatggagatcaccagtcactatagacacctgcttagagagctgaatgagcagcgacagcacggcgtgctctgcgacgtatgcgtggtggttgaggggaaggtgtttaaagctcacaagaatgtccttctcgggagttcgaggtacttcaagaccttgtattgtcaggttcagaaaacttccgagcaagcaacagtcacgcaccttgacatcgtgaccgcccagggattcaaagccattatcgattttatgtactccgctcatctggccctgacaagcaggaacgtgatcgaggtgatgtcagccgctagtttcttgcagatgaccgacatcgttcaagcatgccatgacttcatcaaggctgctctggacatttctattaagtcagacgcctccgacgagctggcagaatttgaaataggcgccagtagtagctcctccaccgaggccctcattagtgctgtgatggcagggcgttcaatctctccttggctcgcacgcagaacgagtccagcaaattcttcaggcgactcagcgatcgcctcatgccatgatgggggaagctcctacggcaaggaggatcaagagccaaaagcagatggtcccgacgacgtttcatcccaacccctatggcctggagatgttggatatgggcctctccgtatcaaggaggaacaggtttccccgagccagtacggcggctccgagctgcccagtgccaaggacggcgcagtgcagaactccttcagcgagcagtctgccggcgacgcttggcagccaaccgggcggaggaaaaaccggaagaataaagaaactgtccggcatatcacacagcaggtggaggacgattcgcgcgcatcttccccggtgccgtctttcctccctacctcaggctggccattctcaagccgggacagcaacgccgatctgtccgtaaccgaggcctcttctagcgatagcaggggcgaacgggcggagctttacgcccaggttgaggagggactgctgggtggagaggctagctacctaggcccacccctcactccagagaaagacgacgcactgcatcaggctactgccgtcgcgaatctgcgcgcagctctcatgtcaaagaacagcctgctcagtcttaaggctgatgtgctgggggacgatggatctcttctcttcgagtacttacccaggggagctcacagtctgtccttaaacgagtttacagtcatccggaagaagtttaaatgcccatactgttcttttagcgctatgcaccaatgtatcctaaagagacacatgaggtcacacactggtgagcgaccttacccatgcgaaatatgtggtaagaagttcactcgcagagaacatatgaaacggcatactctggtccactctaaggataaaaagtatgtgtgcaaagtgtgttctcgtgtgttcatgtctgctgcaagcgtaggaatcaggcatggttcgcggcggcacggagtgtgtacagattgcgctggtagaggcatggccggcccactggaccacggcggggggggaggtgagggttcaccagaagccctcttccctggggacggcccttatctagaggatcccgaagatcctagaggtgaggccgaagaacttggagaagacgacgaagggctggcaccggaggacgcgctcctggcagacgacaaggatgaggaagatagccccagaccccgttcgccgccaggaggcccagacaaggactttgcatggcttagttag

SEQ ID NO: 276489 - DNA, 1770 bp, Artificial Sequence
  derived and/or modified sequence
atgaacaaccggaaagaagacatggagatcacttctcattacaggcacctgctgagggagctgaatgaacagcgtcagcatggcgttctgtgcgatgtgtgtgtggtagtcgagggtaaggttttcaaagctcacaaaaacgtcctcctcggctctagccgttactttaaaaccctctactgtcaggtccagaaaactagtgagcaggcaaccgtcactcaccttgacattgtgaccgctcaggggtttaaggccatcatcgactttatgtactcagcccacctggccctgacctcgcgtaatgtgatcgaagtaatgtctgctgcttccttcctccaaatgaccgatattgttcaggcttgtcatgactttattaaagctgcactcgacatctcaatcaaatcggacgcctctgacgaattagccgagtttgaaatcggggccagttctagctcaagtaccgaggccctgatctccgcagtgatggccggcaggtctatttctccctggctcgcacggcgtacttcccccgctaacagctccggcgattctgccatcgcctcttgccatgacgggggctcttcatacggaaaggaggaccaggagccaaaggctgacgggccggatgacgtgtctagccagcccctctggcccggtgacgtcggatatgggcctctgaggatcaaggaggaacaagtgagtccttctcagtatggcggtagcgaactgccaagcgcaaaggatggcgctgtccaaaattcgttctcagaacagagtgccggtgatgcctggcagccaacaggccggagaaagaacagaaaaaataaggaaacagttcgccatatcacacagcaggtggaggatgacagtcgggcctcatcgcctgtgccttcatttttaccgacctctggctggcctttttcttcaagggatagcaacgcagatctgtcggttacagaagcctcatccagtgattccagaggcgagcgggcagagctatacgctcaagtggaagaaggtctgctgggaggcgaggcgtcctacttaggtcccccccttactccagagaaagatgatgccttacaccaggccaccgctgtcgctaacctgagggcagcgcttatgagcaaaaattccctacttagcttgaaagcagacgtgctgggagacgacgggagcttgctcttcgaatacctgcctcgaggtgctcattcactgagcctcaatgaattcacagtgatccggaaaaagtttaaatgtccatattgctcatttagcgccatgcaccagtgtatactgaagcggcacatgcgtagccataccggggagagaccctacccatgtgaaatctgtggaaaaaagttcacaaggcgggagcatatgaaacgacacaccctcgtgcattccaaagacaaaaagtatgtctgcaaggtctgcagtagggtgttcatgtctgcggcctcagttggtattagacacggctctaggaggcacggcgtttgtacggactgtgccggaagaggaatggcgggaccgctggaccacggggggggaggtggcgaggggtctcccgaggctctgttccccggagacggaccctatctggaagatccggaggaccccaggggcgaggctgaggaactcggtgaggatgatgagggcttagcacccgaagacgcgctgcttgcagacgataaggatgaggaggatagcccaagaccccgatctccacccggggggcccgacaaggattttgcatggctgagttag

SEQ ID NO: 276490 - DNA, 1770 bp, Artificial Sequence
  derived and/or modified sequence
atgaacaaccggaaagaggacatggagatcacgtcgcactacaggcatctcttacgggaactaaacgaacagagacaacacggcgttctgtgtgacgtttgtgttgtcgtagaggggaaggtgttcaaagcacacaagaacgtgctccttggtagttcccgatactttaaaacactgtactgtcaggtgcaaaagacctcagaacaggctactgttacacatcttgacattgttacggctcagggcttcaaagctatcatcgatttcatgtactctgcccatttggcccttaccagcagaaatgtaatcgaggtgatgagcgccgcatcattcctacagatgaccgacattgtccaggcgtgtcatgatttcataaaggccgccctcgacattagtatcaagagcgacgcatccgacgagctggctgaattcgaaataggagcatcctcctcctcatcgaccgaggccttaatttcagccgtcatggcaggcaggtccattagtccttggttagcccgacgaacctctcctgctaactcctctggagacagtgctatcgcttcatgtcacgacggtggttcgtcatatggtaaggaggatcaggaacccaaagccgatgggccagatgacgtgagtagccaacccctttggccgggcgacgtgggttacggccccctgcgcattaaggaagagcaggtgtctccgtcacaatacggaggctctgaactgccatcggcaaaggacggagcagtgcagaacagttttagcgagcagtcggcgggggatgcgtggcagcctacaggccgaagaaaaaacagaaaaaacaaggaaaccgtccggcacatcactcagcaggtcgaagacgacagcagggcctccagtcccgttcccagcttcttacctaccagtggttggcctttcagctctcgagatagtaatgctgacctgagtgtgacagaggccagcagctctgacagccgcggcgaacgcgccgagctctacgctcaggtggaggagggcctcctgggaggcgaagctagctacttgggaccccctctgactcctgaaaaagatgatgccctccaccaggctacggcagtggccaacctgcgggctgcgctcatgtctaagaattccctgctgtcccttaaagctgacgttctcggcgacgacggtagcctgcttttcgagtatctgcccagaggtgcccacagtctgtcgctgaacgaatttacagtcattcgcaaaaagttcaaatgtccctactgctcttttagtgctatgcaccagtgtatcttgaagcggcatatgaggtcacacacaggagagaggccctatccctgcgaaatttgcgggaaaaaatttactcggcgagagcacatgaaaaggcataccctcgtacactctaaggataaaaaatacgtttgtaaagtgtgtagccgtgtttttatgtccgcagcatcggtggggatccgccacggttcaagacgtcacggtgtctgtaccgactgtgctgggagaggcatggctggacccctggaccacgggggaggcggcggggaagggagccccgaagccctcttcccaggagacggaccatatctcgaggaccccgaggacccacgaggagaggccgaggagcttggcgaagatgatgaggggctcgccccagaggatgcgctgctggcagatgacaaggacgaggaggattcccctcggcccagatcgccacctggaggccccgataaagacttcgcttggctgagctag

SEQ ID NO: 276491 - DNA, 1770 bp, Artificial Sequence
  derived and/or modified sequence
atgaacaacaggaaggaggacatggagatcaccagccactaccgccacctgctgcgggagctgaatgagcagaggcagcacggcgtgctgtgtgatgtgtgtgtggtggtggagggcaaggtgttcaaggcccacaagaatgtgctgctgggcagcagccgctacttcaagaccctgtactgccaggtgcagaagaccagcgagcaggccaccgtgacccacctggacatcgtgacagcccagggcttcaaggccatcatcgacttcatgtacagcgcccacctggccctgaccagcagaaatgtgattgaggtgatgtctgctgccagcttcctgcagatgacagacatcgtgcaggcctgccacgacttcatcaaggccgccctggacatcagcatcaagagtgatgccagtgatgagctggccgagtttgagatcggggccagcagcagcagcagcacagaggccctgatctctgctgtgatggccggccgcagcatcagcccctggctggcccggaggaccagccctgccaacagcagcggggacagcgccatcgccagctgccatgatggcggcagcagctatggcaaggaggaccaggagcccaaggcagatggcccagatgatgtgagcagccagcccctgtggccaggagatgtgggctacggccccctgcgcatcaaggaggagcaggtgagccccagccagtatggaggcagcgagctgcccagcgccaaggatggagctgtgcagaacagcttcagcgagcagagcgctggagatgcctggcagcccactggaagaaggaagaacaggaagaacaaggagaccgtgcgccacatcacccagcaggtggaggatgacagccgggccagcagccctgtgcccagcttcctgcccaccagcggctggcccttcagcagccgggacagcaatgctgacctgtctgtgacagaggccagcagcagtgacagcagaggagagagagctgagctgtatgcccaggtggaggagggcctgctgggcggggaggccagctacctgggcccccccctgaccccagagaaggatgatgccctgcaccaggccacagctgtggccaacctgcgggccgccctgatgagcaagaacagcctgctgagcctgaaggcagatgtgctgggagatgatggcagcctgctgtttgagtacctgcccaggggggcccacagcctgagcctgaatgagttcaccgtcatcaggaagaagttcaagtgcccctactgcagcttcagcgccatgcaccagtgcatcctgaagaggcacatgaggagccacactggagagcggccctacccctgtgagatctgtgggaagaagttcacccggcgggagcacatgaagaggcacaccctggtgcacagcaaggacaagaagtatgtgtgcaaggtgtgcagcagggtcttcatgtctgctgcctctgtgggcatcagacatggcagcagaagacatggagtgtgcacagactgtgccggccggggcatggccggccccctggaccatggaggcggcggcggggagggcagccctgaggccctcttccctggagatggcccctacctggaggaccctgaggaccccagaggagaggccgaggagctgggggaggatgatgagggcctggccccagaagatgccctgctggctgatgacaaggatgaggaggacagcccccggcccaggagccccccaggcggccctgacaaggactttgcctggctgtcctag

SEQ ID NO: 276492 - DNA, 1770 bp, Artificial Sequence
  derived and/or modified sequence
atgaacaaccggaaggaggacatggagatcaccagccactaccggcatttgttacgggaacttaatgagcagaggcagcacggtgtgttgtgcgacgtgtgcgtcgtggttgaggggaaagtgtttaaagctcacaaaaacgtactactcgggtcctctcgatatttcaaaactctttattgccaggtacaaaagacaagtgagcaggctacagtgacccatctggacatcgtgacggcgcaggggtttaaagcaataatagacttcatgtactccgcacacttagccctgacctcacggaacgtgatcgaagtaatgagcgctgccagtttccttcagatgacagatattgtgcaggcctgccacgactttatcaaagcggcgctggatataagcataaagtctgatgcaagtgacgagttagccgagttcgaaataggagccagttcgtctagctccacagaggcactgatcagtgctgtgatggccgggagatctatctccccatggttggctcgccgcacgagccctgcgaactcgagtggggatagcgcaatcgcctcatgccacgatggaggatcaagttatggaaaggaagatcaggaaccgaaggcagatggtcctgacgatgtctcatctcagcccttgtggccaggtgatgtcggctatggcccactacgaatcaaggaggaacaggtgtcaccatctcagtacggcggcagtgagctaccttcagcaaaagacggagcggtgcagaacagtttctcagagcaatcagcaggagacgcttggcagcctaccggaagaagaaagaacaggaagaataaggaaacagtccggcatattacccagcaagtcgaagatgacagtagggctagcagtcctgtgccgtccttcctccctaccagtggctggccattctcctcccgggactcgaacgccgatctctccgtcaccgaggcctcttctagcgacagccgcggtgaacgtgccgagctgtatgctcaggtagaggaaggtctgctcgggggtgaggcctcatacctggggcctccactgacccctgagaaggacgacgcgctacaccaggctacagcagtggccaacctgagggccgcattgatgtctaagaacagcctgctgtctctgaaggccgacgtgctgggtgatgatggtagtttgctgtttgagtatctgccccgcggtgctcacagcctgagcctgaatgagtttaccgtgatcaggaagaaattcaagtgcccttattgctccttcagcgccatgcaccagtgtatccttaaaaggcatatgcgtagccacacgggcgagcggccttatccttgtgaaatatgcggaaagaagttcacccgacgagaacacatgaaacggcacactctcgtccatagcaaggataaaaagtatgtgtgtaaggtctgtagccgagtgttcatgagtgccgcatctgtgggaatccgtcatgggagcaggcgccacggggtgtgcacagattgtgctggacggggaatggcaggccctctagaccacggggggggggggggggaaggctcccctgaggcactgttccccggtgatggaccttatctggaagatcccgaggaccctaggggcgaggccgaagagctcggcgaagacgacgagggattggcccccgaggacgctctgctggcggatgacaaagatgaggaggatagcccacgccctcgtagccctccgggtggtcccgataaagacttcgcgtggctgagctag

SEQ ID NO: 276493 - DNA, 1770 bp, Artificial Sequence
  derived and/or modified sequence
atgaacaaccggaaggaggacatggagatcaccagccactaccggcacctgttgcgggagcttaacgaacagcgacagcacggtgtcttatgtgatgtatgcgttgtggtagaagggaaggtcttcaaggctcataagaatgttctgcttggctcttcgagatattttaagaccctgtactgccaggtccagaaaacatcagagcaagctaccgtgacccacctggatatagtgacagctcagggattcaaagctattattgactttatgtatagcgcccatctggcattaacatcaaggaacgttattgaggtcatgtccgcagcaagcttccttcagatgacagacattgtccaggcttgccacgatttcatcaaagcagctctggacatctcaatcaaatccgacgcaagcgatgaactagcggagttcgaaatcggtgcttcaagcagctcctccaccgaagccctcataagtgcagtgatggctgggcggtccatatccccgtggcttgcacggagaacatctccggccaactcttccggagactcagccattgcaagctgccacgacggaggcagctcgtatggaaaggaggatcaggaacccaaagctgacggcccggacgacgtgtcatcacagcctctgtggcctggcgacgtgggatatggcccacttcgcataaaggaagagcaggtgagtccctctcaatacggcggctcagaattgccttccgcaaaggacggcgctgtccagaactcattctccgaacaatccgccggtgatgcatggcagcctacgggacgccggaagaacagaaaaaataaagagactgttaggcatattacgcagcaggtggaagacgactccagagcatccagccccgtccctagcttcctgcctacctcaggctggccgttcagctcccgggacagcaacgcagacctgtcagtgacagaggcatcgtcgtccgactccaggggagaacgagctgagctatatgcccaggtcgaagaaggacttctcggcggtgaagcttcctatctgggccctcctctgaccccagagaaagatgacgccctgcaccaggccaccgctgtggctaatttgagggcagccttaatgtctaaaaactccctcttgtcgctgaaggcagacgtcttgggagatgatggtagtctgctcttcgagtatctccctcgcggcgcacattctctgagtctaaatgaattcacagtgatccggaaaaagtttaagtgcccctactgcagctttagcgcaatgcaccagtgcattttaaaacgccatatgcgctcccataccggagaacgaccttacccctgcgagatctgcggcaaaaagttcacccgtcgagaacatatgaaacgccacaccctcgtgcatagcaaagataaaaagtacgtctgtaaagtgtgcagtcgtgtctttatgagtgccgcgtcagttggcatacggcacggatcccggcgccacggcgtctgcacagattgcgccggcaggggaatggcaggccccctcgaccacggcggaggagggggcgagggctcccccgaggcactcttcccgggggacgggccgtatctggaagaccctgaggaccccagaggcgaggccgaagaactcggcgaagatgatgagggtcttgctcctgaagatgctctgcttgcagatgataaggacgaagaggatagccctcgcccgcggagcccccccggcggacctgataaggatttcgcgtggctatcatag

SEQ ID NO: 276494 - DNA, 1770 bp, Artificial Sequence
  derived and/or modified sequence
atgaacaaccggaaggaggacatggagatcaccagccactaccggcacctcctgcgcgaacttaacgagcaacggcagcacggggttctgtgtgatgtgtgtgtagtcgtcgaaggaaaagtgttcaaggcccataagaacgtcctgttaggttccagtcggtatttcaaaactttgtactgtcaggtccagaaaacttccgagcaggcgactgtcacacacctggatatcgttacggcacaaggcttcaaagccataattgacttcatgtactctgctcatctggctttgacctcgaggaacgtgattgaagttatgtctgcggcctcgtttctgcagatgacggatatagtccaggcttgccatgatttcattaaagcagctctagacatctccatcaagagcgatgcgtcagatgagctggctgaattcgaaattggcgcaagttcctcctcatccactgaggctctgattagcgccgtgatggcagggagatctatatcaccttggttggccaggagaacctcacccgctaactctagcggagattccgctattgcatcctgccacgacgggggctcctcctatgggaaagaggaccaagaaccaaaagctgatggtcctgacgacgtctcatcccagcccctctggcccggggacgtcggctatggacctctacgtattaaggaagagcaggtgtctcctagccagtatggtggatccgaattgccttctgctaaggatggcgccgtacaaaatagcttctctgagcagagtgcgggtgacgcctggcagcccacagggcggagaaagaacaggaaaaataaggagaccgtgaggcacattacccagcaggtggaggacgattctcgagccagtagcccagttccctccttcctgcctacaagtggatggcctttctcttctcgtgatagcaatgcagatcttagtgtgacagaagccagctcttctgacagtcggggagaacgggctgagctgtacgcacaggtggaagagggcctgctggggggcgaagccagttacttgggacctcctctcacaccggagaaagacgacgcactccaccaagccacagccgtcgcaaaccttcgggcagcccttatgagtaaaaactcgctactttccctaaaggctgacgtgctgggtgacgatggaagcctgttgttcgagtacctcccaaggggcgctcacagcctcagccttaatgaattcaccgtgatccgcaaaaagttcaagtgcccttactgctcgtttagcgcgatgcaccagtgtatccttaagagacacatgaggagccatactggggaaaggccatatccttgtgaaatatgtggaaagaagtttacccgcagagagcacatgaagaggcatacactggttcactccaaagataaaaagtacgtgtgtaaggtctgtagccgagtatttatgtccgccgccagtgtcggaatcaggcatgggagtagacgacacggcgtgtgtacagattgtgccggccggggcatggcgggacctctggatcacggaggtgggggaggcgagggctcaccagaggcactgtttccaggcgacggaccttacctcgaggaccccgaggaccccaggggagaagccgaggagttgggcgaggacgacgaggggctcgcacctgaggacgccctcctggcagacgataaggacgaagaagacagtcctcggccacggtctccgcccggaggacctgataaggattttgcctggctctcttag

SEQ ID NO: 276495 - DNA, 1770 bp, Artificial Sequence
  derived and/or modified sequence
atgaataatagaaaagaggatatggagatcactagccattaccgtcacctcctgcgggagttgaatgaacagagacagcacggggtcctctgcgacgtgtgcgtggtcgttgaaggcaaggtgtttaaagcccacaagaacgttctcctgggctcaagtagatattttaaaacattgtactgccaggtccagaagacaagtgagcaagcaacagtgacccacttggacatcgtgaccgcacaaggtttcaaagcgatcatagacttcatgtatagtgctcacttggccctcacatctaggaacgtcatcgaagtcatgtcagccgcttcttttctacaaatgaccgacatcgtacaagcgtgccatgatttcattaaagcagctttggatatcagtatcaagagcgatgcgagcgacgagctggccgagttcgagatcggcgctagttcatcaagtagcactgaagccctgatttccgccgtcatggcagggcgatcaatctcgccatggttggccaggcggacgtcccctgccaattcctccggggacagcgcaatcgcatcttgccatgatgggggttcctcatacggcaaagaggatcaggaacccaaggcagatggcccagacgacgtgtctagtcagccactgtggccgggagacgtaggatacggccctttgaggataaaggaggagcaggtgagcccttcccagtacgggggttctgaattaccatcagcaaaggacggcgctgtccaaaattcattcagcgaacagagcgccggagatgcgtggcaaccgacaggccgtcgaaagaacaggaaaaataaagagaccgtgaggcacattacacagcaggttgaggatgatagtcgcgcttctagcccagttcccagctttctccctacatccgggtggcccttttcgtcgcgggactctaacgcagacctgagcgtaacagaagcttcgagtagtgattctagaggggagagagccgagctctacgcacaggtcgaagagggattactggggggagaagctagttatctcggaccgccactgacccccgagaaagatgacgcactgcaccaggccactgcagtggccaacctgcgcgcagccctgatgtccaaaaacagcctgctaagtctaaaggctgacgtactgggcgacgacggctctcttttgttcgagtacctcccacgcggagcccacagcttgtctttaaatgagtttacagtcatacgcaaaaaattcaaatgtccatattgtagcttttcggccatgcatcagtgtatactcaaacgccacatgaggtcacatacaggagaacgaccttacccttgtgagatctgcgggaagaagtttactagaagagaacatatgaagcgccacaccctggtgcactctaaggataagaaatacgtttgcaaggtttgcagtagagtatttatgtccgctgcgagtgttggtattcgacatggcagtagacgacatggggtgtgcactgattgcgctggcagaggcatggctggaccactggaccatgggggagggggtggggaagggagccccgaggccctgtttcctggagatgggccatatctggaagatccagaggacccaagaggtgaagccgaggagttaggcgaagacgatgagggcctcgctccagaggatgcgcttctagcagacgacaaagacgaagaggatagtccaaggcctagatctccccctgggggtcccgacaaagactttgcttggctttcctag

SEQ ID NO: 276496 - DNA, 1770 bp, Artificial Sequence
  derived and/or modified sequence
atgaacaacagaaaggaggacatggagattaccagtcactacagacacctcctacgcgaactgaacgagcagcggcagcacggcgtgctttgtgacgtttgtgtggtggtcgaaggcaaagtctttaaagcccataagaatgtgttgctagggagctccaggtacttcaagacactgtactgccaggtccagaagacttcggagcaggcgaccgtgacccacctcgatattgtcactgctcagggcttcaaggctatcattgatttcatgtactctgcacacttggccttgacatctagaaatgtgatcgaggtgatgagcgctgcgagcttcttgcagatgactgacatcgtgcaggcttgtcacgattttatcaaggccgcactggatatctcaattaagtctgatgccagcgacgaactggcggagtttgagatcggcgcttccagctctagctccacggaggccctcatttccgccgtcatggcgggacggagcatatcgccgtggttagcgcgacggacgtccccagccaattccagcggggacagcgctatcgcatcctgccacgatgggggttcatcttacggaaaagaggaccaggaacctaaagcagacgggccagatgatgtgtcctcccagccactgtggcccggagacgtagggtacggcccattgaggatcaaggaagaacaggtatccccctcacaatatggcggatccgaactgcctagcgccaaagatggcgctgtgcagaattctttcagcgaacaatctgccggtgacgcctggcagcctaccggaaggcggaagaatcggaagaacaaggagaccgtgagacacatcacccaacaagttgaggacgatagccgcgcatcttctccagtaccgagcttcctgcctacaagtgggtggcccttcagctcacgggattcaaatgccgaccttagtgtgactgaagcttctagttccgactccaggggcgagcgggcagagttatatgcccaagtcgaggagggactgttgggaggggaggcgagttacctcggaccacccctgaccccagagaaagacgatgctttgcatcaggccaccgcagtcgcaaatcttagagcagctctgatgagtaaaaattctttgctgagccttaaagcagacgtccttggcgatgacggcagcctactgttcgagtatttacccaggggagcccacagcctatccttgaatgagtttaccgtaattagaaaaaagtttaagtgcccctactgtagtttcagcgcaatgcatcagtgcatcctgaagcgacatatgcggtctcacaccggtgagagaccatatccatgcgaaatttgcggaaaaaaattcacccgcagagagcatatgaaaagacataccctggtacacagcaaggataagaagtacgtgtgcaaggtatgcagcagagtatttatgtccgctgcctcagtcggaatcaggcacgggtcaagaagacacggcgtgtgtaccgactgtgcaggtagaggaatggccggtccactcgatcacggtggaggaggaggcgaaggcagcccagaggccctcttccctggagacgggccatacttggaggacccagaggaccctcgtggtgaagccgaggaactgggggaggacgacgaagggttggcccctgaagacgcactcctcgccgacgataaagatgaggaggatagccctcggccacgatcacctcccggaggtccagataaagacttcgcctggcttagttag

SEQ ID NO: 276497 - DNA, 1770 bp, Artificial Sequence
  derived and/or modified sequence
atgaataatcgcaaagaggatatggagatcacaagtcactatcgacacctcctgcgggagctgaacgagcagagacagcacggtgtgctgtgtgatgtgtgcgtggtggtggaaggaaaggttttcaaagctcacaaaaatgttctcttgggtagcagccgatatttcaagactctgtactgtcaggtgcaaaagaccagcgaacaggccaccgtgacccatttggatattgtcaccgctcaaggctttaaagcgatcatcgattttatgtatagcgcccatctggctcttacttcacggaacgtcatagaggtcatgtccgccgcatcgttcctccagatgactgacatcgtgcaagcgtgtcacgactttatcaaagccgctcttgatattagcattaaatccgacgccagcgacgagcttgccgaattcgagattggggcatcttcttcatcctctaccgaagcgctgatatctgccgtaatggcagggagaagcatctcaccatggttggccaggaggacatctccagccaattcttctggggacagtgcgattgcatcatgccatgatggtggcagcagctatgggaaagaagaccaagagccaaaagccgatggtcccgatgatgttagtagtcagcccctctggccgggtgatgtaggctatggcccactccggatcaaggaagagcaggtgtccccttcccaatacggaggctccgaactgccaagcgctaaggatggggcagtacagaattctttctccgagcagtccgcgggtgatgcatggcagcccactggtcggagaaagaacaggaaaaataaggagactgttagacatattactcagcaggtggaggacgattctcgggcttcaagccccgtgccttcctttctgcctacatccggctggccattttcctcgagggatagcaatgcagatctgtctgttaccgaagcatccagcagcgactcacgtggcgaacgggcagaactgtatgcccaggttgaggagggcctgctcggcggagaggcctcatacttgggccctccactgactcccgagaaggatgacgcccttcaccaagctaccgctgtcgcaaaccttcgcgcagcattaatgtctaagaacagtttgctctccttgaaggcggacgtgttgggcgatgatggttcactcctgtttgagtacttaccgaggggtgcccacagcctgtcccttaatgaattcactgtgattaggaaaaagtttaaatgcccctactgcagcttctctgcaatgcatcagtgtatccttaaaagacacatgcggtcccatactggcgagcggccttatccttgtgaaatttgcgggaagaaattcacaaggcgggagcacatgaagcggcacacactggtccattccaaggacaaaaagtacgtgtgcaaagtgtgttccagagtgtttatgagcgcagcctcagtgggcattcggcatggaagtcgcaggcacggggtgtgcaccgattgcgctggtaggggaatggcaggaccccttgatcacggtggcggaggaggggaaggatctccagaggctctgtttccaggagatggcccataccttgaggatcctgaggaccctcgcggagaggccgaagagttaggggaagatgatgagggcctggccccagaagacgctctgttggccgatgataaggacgaggaggactccccacgacccaggagtcctccagggggaccggataaagacttcgcatggctgtcatag

SEQ ID NO: 276498 - DNA, 5190 bp, Artificial Sequence
  derived and/or modified sequence
ggcgagcgcgcagctcggacccgcccggacgcagcgccctcccggcggcggcggcgatcaccggcgccggcccggcggccgcggcgcccgccctcgcccgcgccccatggggtcacagcacagagtctgtagaagaggcgacaccagggcttccaaatgaacaaccgaaaggaagatatggaaatcacgtcccactaccggcacctgctgcgggagctcaacgagcagaggcagcacggcgtcctgtgcgacgtctgcgtggtcgtggagggcaaggtcttcaaggcgcacaagaacgtcctgctgggcagcagccgctacttcaagacgctctactgccaggtgcagaagacgtcggagcaggccacggtcacgcacctggacatcgtcacggcccagggcttcaaggccatcatcgacttcatgtactcagcgcacctggcgctcaccagcaggaacgtcatcgaggtgatgtcagccgccagcttcctgcagatgacggacatcgtgcaagcctgccacgacttcatcaaggcggcgctggacatcagcatcaagtcggacgcctcagatgagcttgcggagttcgagatcggcgcctcgtccagcagcagcacggaagctctcatctcggccgtgatggctgggaggagcatctccccgtggctggcacggcgaacgagtcctgccaattcttccggagactcggccatcgccagctgtcacgacggagggagcagctacgggaaagaggatcaggagcccaaggccgatggccctgatgatgtttcttcacagcctctatggcctggagacgtgggctacgggcctctgcgcatcaaggaagagcaggtttcaccgtctcagtacggagggagcgagctgccttctgccaaggacggtgcagtacagaactctttctcagagcagagtgctggtgatgcctggcagcccacgggccgaaggaagaatcggaaaaacaaagagaccgtccggcacatcacacagcaggtggaagatgacagccgggccagctccccggtgccgtccttcctgccgacgtcggggtggccgttcagcagccgagactcaaatgcggacctgtccgtcaccgaagccagcagctccgacagccgaggagagagggccgagctctatgcacaggtggaggagggtctcctgggaggagaagccagctatctgggccctcccctcaccccagagaaggacgacgccctgcatcaggccaccgcggtggccaacctgcgcgcggcgctcatgagtaagaacagcctgctgtcgctgaaggccgacgtgctgggggatgacggctccctgctgttcgagtacctgcccagaggggcccactcgctgtccctgaatgagttcacggtgatcaggaagaagttcaagtgtccgtactgcagcttctcggccatgcaccagtgcatcctcaagcgacacatgcgctcgcacacgggagagcggccctacccctgcgagatctgcgggaagaagttcacgcggcgcgagcacatgaagcgccacacgctggtccacagcaaggacaagaagtatgtgtgcaaggtgtgcagccgcgtcttcatgtccgccgccagcgtgggcatcaggcatggctccaggcgccacggtgtgtgcaccgactgtgctggccgcggcatggccgggcccctggaccatggcggcggaggcggcgagggctctccagaggcgctgttcccaggcgacgggccctatctggaggaccctgaggacccacgaggggaggcggaggagctgggcgaggacgacgagggcctggcccctgaggatgcgctgttggcggacgacaaggatgaggaagactcgccgcggccgcgcagccccccaggaggccctgacaaggacttcgcctggctctcctaggcccgcccgccggcagggtcggtggctgcctcgctccgtccacccgtgtgtgtgtccggtgggtctccactgcggggccagggccacgctcacccctctcgcggcccctcctctgcttccccctgaacccaccccccacggaaaccagccctgcgggctaagcaggtgcgaccccagcaagaggggtgctctgggaccagacatgaagtgagttgggggagggcacagggtgggtttgagtgaagggagagcacggtcctaagtccccagcaggtggtgcgggtgtgtgagtggcccctgtgatggccagcctggcttggacacgtgatgggcctgtggccgggtccagtgggcactgggcggggtggtgtgttcggcccagaggcccctggcctgagcaggtgcagagttttacagacacccggtcagcccggctggagcccgccctcccctcccctagcagccaggtcactgcctgtggctgcagccgtggcccgtggtgcagccgtggcccatggcagcctgtagaatccaggtgcacagagagccctgccaccgtcttacctctgggctttggtgcttaacacacaacacagctgcagaccctgctggaggccgagggctccaggtgctatcttaggtggacacagccctgggggctccttccaggaggggaccctcagccctgtgccccccaccacttcaggccacaccaggttccctctgcaagggcctcggctcagtcgtgtgcacttcctcggagagccttgggctgccacgtccaccccgggctctgcccgtcctgttctgcccatggcccagcccggccgctcctgctgacccctcctggacgggctggagctgggctcctgcctttgctgctaacactggaggcggtgttcctaactgcagtgtgctgcttacacctccccgcgtgggtaaccaaatttttaagtagtcagagacatatcgaggtagttacataaaattattttgtttggcattatttttctcactcgaagaaactatatagggttgtttttcctttagcttgtgctcaagtcctcttgctgtgttttcagaagcactcacatgttctttcttttcctgagtgaaaagcaaaggtcccacggtgtgtgctgtggtgcaccgcctggctttgggggtcccggaggcaggctgcctagactcacagcctcgggaccgttgccacggcctgtcttctcgttcaggcctgcctctgacagcactcaccatgaggacattccatccttcaccccctcctctggcacaggccaccactgcggtgctgtgccttcagatgggaggtgggcgcggtggcctcctccttccctccaggacctgcccgtgtgaagaccccccggagtgctgagcttcagggctgcgtggaaagagtttttactctctttttctagcctgtataccaggcttttccccacattgtcaggtagagcaccagcttccctgaccgctgctgctcggggagggctggggctggccgggggtcctgtggaggagtacatggaggactccaggtacagcgcaggagtcacggcttttgttttttgacattggcccccggttctaccaatgacagggtgccctggctggagctgtcatcacacacacccctcagctcggaggctgtgggctcctcaaagctggagaaagaggccaagatttttctgcacacggagtgtggggataggagccgggccaagcgctggcccctcagcggtgagccctgcccactcttaccgagcaaggtgggtggctctggcacgagtcccccagggggagagcatggctaccagggagctgcagcggagccctccagccctcaccccaggccagccccaccccggcctctttgagaattctcagaactttgtacctttcccctgatttttaaaccctttttctaaacagactgactttcttacaaaatgcatttggaaaccagacctttgctacccaccaatgtctctgggttttgtaccagtccctgctctcaggccaccctgcccaggacccaggcccgcctccccctccacactcaggatgtcctgctccatctggccggctcactccgtgtggcctgcctttgctgaccgttttggggttccccgccggagctacaggggcattttcttccctaaaaccaacagtgtcccactgacctccccaagtgtttgctgcgtggcagatttcctgttcttgttcgcagtttgccgactgaagagtgtgggatttccgaggcccaggtgagcacgtccatctcaggaggcgtggagggaaaagacatgtcatgaagggttttttttatgtgactgatttttttttaaatcgatgttcaaactaataaatatttttttatgaagaggaaaaatgtgtagattacatttcacattttgtatttttgtttgtgtctgtttgtattttggtgtttacaacaccaaagtgggaaatacagtccattggggatggtgttatttgggggcggggagggggcagggacaccacgatttttctgtcaagctctggatcctgaccaggttgtacactggggctctctgagctttgggacacaggacactgccagggctacgtagggaactgactcagaagacgcagcttactgcttccaactttgcacatcttcctctttaaaaaactgagaaaatgcaaaaactggaactttttgcaatattataaaagaagtaatcttattttagctcattctgtgacatgtgcgactcttaagaaagccatacttaatggtggtggttttttttagatcttatattgtgttttgtatgcagcccttttagaactacttgtagtgagggtgctgtgtgtgcttttcttaaatatttatttttttcaacatgctttcaacctgtcaacaaaaacaaaacacacaaaaaaagggcagtgtttgaagattgttgatttttttctggggataatctatattatattgacttcctattacttattataaacctgtgtttgtattggagatgtgtctactattgggggaagaggttctcgtaatcgctcggtgggaaatcatggctctgccgtcctgcctctctgtggccgtgggttcacgtggcctctgcggtgagtctccaagtttctgcctaggcgcctgtgcgtttcctttctgtgacgggattagcttagacatccttgcaaagcgatcactttcaataaattgggaaattgctgctccagcag

SEQ ID NO: 276499 - DNA, 2335 bp, Artificial Sequence
  derived and/or modified sequence
gacggacggacggacggaccgagcagccccggcgagcgcgcagctcggacccgcccggacgcagcgccctcccggcggcggcggcgatcaccggcgccggcccggcggccgcggcgcccgccctcgcccgcgccccatggggtcacagagtctgtagaagaggcgacaccagggcttccaaatgaacaaccgaaaggaagatatggaaatcacgtcccactaccggcacctgctgcgggagctcaacgagcagaggcagcacggcgtcctgtgcgacgtctgcgtggtcgtggagggcaaggtcttcaaggcgcacaagaacgtcctgctgggcagcagccgctacttcaagacgctctactgccaggtgcagaagacgtcggagcaggccacggtcacgcacctggacatcgtcacggcccagggcttcaaggccatcatcgacttcatgtactcagcgcacctggcgctcaccagcaggaacgtcatcgaggtgatgtcagccgccagcttcctgcagatgacggacatcgtgcaagcctgccacgacttcatcaaggcggcgctggacatcagcatcaagtcggacgcctcagatgagcttgcggagttcgagatcggcgcctcgtccagcagcagcacggaagctctcatctcggccgtgatggctgggaggagcatctccccgtggctggcacggcgaacgagtcctgccaattcttccggagactcggccatcgccagctgtcacgacggagggagcagctacgggaaagaggatcaggagcccaaggccgatggccctgatgatgtttcttcacagcctctatggcctggagacgtgggctacgggcctctgcgcatcaaggaagagcaggtttcaccgtctcagtacggagggagcgagctgccttctgccaaggacggtgcagtacagaactctttctcagagcagagtgctggtgatgcctggcagcccacgggccgaaggaagaatcggaaaaacaaagagaccgtccggcacatcacacagcaggtggaagatgacagccgggccagctccccggtgccgtccttcctgccgacgtcggggtggccgttcagcagccgagactcaaatgcggacctgtccgtcaccgaagccagcagctccgacagccgaggagagagggccgagctctatgcacaggtggaggagggtctcctgggaggagaagccagctatctgggccctcccctcaccccagagaaggacgacgccctgcatcaggccaccgcggtggccaacctgcgcgcggcgctcatgagtaagaacagcctgctgtcgctgaaggccgacgtgctgggggatgacggctccctgctgttcgagtacctgcccagaggggcccactcgctgtccctgaatgagttcacggtgatcaggaagaagttcaagtgtccgtactgcagcttctcggccatgcaccagtgcatcctcaagcgacacatgcgctcgcacacgggagagcggccctacccctgcgagatctgcgggaagaagttcacgcggcgcgagcacatgaagcgccacacgctggtccacagcaaggacaagaagtatgtgtgcaaggtgtgcagccgcgtcttcatgtccgccgccagcgtgggcatcaggcatggctccaggcgccacggtgtgtgcaccgactgtgctggccgcggcatggccgggcccctggaccatggcggcggaggcggcgagggctctccagaggcgctgttcccaggcgacgggccctatctggaggaccctgaggacccacgaggggaggcggaggagctgggcgaggacgacgagggcctggcccctgaggatgcgctgttggcggacgacaaggatgaggaagactcgccgcggccgcgcagccccccaggaggccctgacaaggacttcgcctggctctcctaggcccgcccgccggcagggtcggtggctgcctcgctccgtccacccgtgtgtgtgtccgggtgccctggctggagctgtcatcacacacacccctcagctcggaggctgtgggctcctcaaagctggagaaagaggccaagatttttctgcacacggagtgtggggataggagccgggccaagcgctggcccctcagcggtgagccctgcccactcttaccgagcaagtttgccgactgaagagtgtgggatttccgaggcccaggtgagcacgtccatctcaggaggcgtggagggaaaagacatgtcatgaagggttttttttatgtgactgatttttttttaaatcgatgttcaaactaataaatatttttttatgaagagg

SEQ ID NO: 276500 - DNA, 4212 bp, Artificial Sequence
  derived and/or modified sequence
acagagtctgtagaagaggcgacaccagggcttccaaatgaacaaccgaaaggaagatatggaaatcacgtcccactaccggcacctgctgcgggagctcaacgagcagaggcagcacggcgtcctgtgcgacgtctgcgtggtcgtggagggcaaggtcttcaaggcgcacaagaacgtcctgctgggcagcagccgctacttcaagacgctctactgccaggtgcagaagacgtcggagcaggccacggtcacgcacctggacatcgtcacggcccagggcttcaaggccatcatcgacttcatgtactcagcgcacctggcgctcaccagcaggaacgtcatcgaggtgatgtcagccgccagcttcctgcagatgacggacatcgtgcaagcctgccacgacttcatcaaggcggcgctggacatcagcatcaagtcggacgcctcagatgagcttgcggagttcgagatcggcgcctcgtccagcagcagcacggaagctctcatctcggccgtgatggctgggaggagcatctccccgtggctggcacggcgaacgagtcctgccaattcttccggagactcggccatcgccagctgtcacgacggagggagcagctacgggaaagaggatcaggagcccaaggccgatggccctgatgatgtttcttcacagcctctatggcctggagacgtgggctacgggcctctgcgcatcaaggaagagcaggtttcaccgtctcagtacggagggagcgagctgccttctgccaaggacggtgcagtacagaactctttctcagagcagagtgctggtgatgcctggcagcccacgggccgaaggaagaatcggaaaaacaaagagaccgtccggcacatcacacagcaggtggaagatgacagccgggccagctccccggtgccgtccttcctgccgacgtcggggtggccgttcagcagccgagactcaaatgcggacctgtccgtcaccgaagccagcagctccgacagccgaggagagagggccgagctctatgcacaggtggaggagggtctcctgggaggagaagccagctatctgggccctcccctcaccccagagaaggacgacgccctgcatcaggccaccgcggtggccaacctgcgcgcggcgctcatgagtaagaacagcctgctgtcgctgaaggccgacgtgctgggggatgacggctccctgctgttcgagtacctgcccagaggggcccactcgctgtccctgaatgagttcacggtgatcaggaagaagttcaagtgtccgtactgcagcttctcggccatgcaccagtgcatcctcaagcgacacatgcgctcgcacacgggagagcggccctacccctgcgagatctgcgggaagaagttcacgcggcgcgagcacatgaagcgccacacgctggtccacagcaaggacaagaagtatgtgtgcaaggtgtgcagccgcgtcttcatgtccgccgccagcgtgggcatcaggcatggctccaggcgccacggtgtgtgcaccgactgtgctggccgcggcatggccgggcccctggaccatggcggcggaggcggcgagggctctccagaggcgctgttcccaggcgacgggccctatctggaggaccctgaggacccacgaggggaggcggaggagctgggcgaggacgacgagggcctggcccctgaggatgcgctgttggcggacgacaaggatgaggaagactcgccgcggccgcgcagccccccaggaggccctgacaaggacttcgcctggctctcctaggcccgcccgccggcagggtcggtggctgcctcgctccgtccacccgtgtgtgtgtccggtgggtctccactgcggggccagggccacgctcacccctctcgcggcccctcctctgcttccccctgaacccaccccccacggaaaccagccctgcgggctaagcaggtgcgaccccagcaagaggggtgctctgggaccagacatgaagtgagttgggggagggcacagggtgggtttgagtgaagggagagcacggtcctaagtccccagcaggtggtgcgggtgtgtgagtggcccctgtgatggccagcctggcttggacacgtgatgggcctgtggccgggtccagtgggcactgggcggggtggtgtgttcggcccagaggcccctggcctgagcaggtgcagagttttacagacacccggtcagcccggctggagcccgccctcccctcccctagcagccaggtcactgcctgtggctgcagccgtggcccgtggtgcagccgtggcccatggcagcctgtagaatccaggtgcacagagagccctgccaccgtcttacctctgggctttggtgcttaacacacaacacagctgcagaccctgctggaggccgagggctccaggtgctatcttaggtggacacagccctgggggctccttccaggaggggaccctcagccctgtgccccccaccacttcaggccacaccaggttccctctgcaagggcctcggctcagtcgtgtgcacttcctcggagagccttgggctgccacgtccaccccgggctctgcccgtcctgttctgcccatggcccagcccggccgctcctgctgacccctcctggacgggctggagctgggctcctgcctttgctgctaacactggaggcggtgttcctaactgcagtgtgctgcttacacctccccgcgtgggtaaccaaatttttaagtagtcagagacatatcgaggtagttacataaaattattttgtttggcattatttttctcactcgaagaaactatatagggttgtttttcctttagcttgtgctcaagtcctcttgctgtgttttcagaagcactcacatgttctttcttttcctgagtgaaaagcaaaggtcccacggtgtgtgctgtggtgcaccgcctggctttgggggtcccggaggcaggctgcctagactcacagcctcgggaccgttgccacggcctgtcttctcgttcaggcctgcctctgacagcactcaccatgaggacattccatccttcaccccctcctctggcacaggccaccactgcggtgctgtgccttcagatgggaggtgggcgcggtggcctcctccttccctccaggacctgcccgtgtgaagaccccccggagtgctgagcttcagggctgcgtggaaagagtttttactctctttttctagcctgtataccaggcttttccccacattgtcaggtagagcaccagcttccctgaccgctgctgctcggggagggctggggctggccgggggtcctgtggaggagtacatggaggactccaggtacagcgcaggagtcacggcttttgttttttgacattggcccccggttctaccaatgacagggtgccctggctggagctgtcatcacacacacccctcagctcggaggctgtgggctcctcaaagctggagaaagaggccaagatttttctgcacacggagtgtggggataggagccgggccaagcgctggcccctcagcggtgagccctgcccactcttaccgagcaaggtgggtggctctggcacgagtcccccagggggagagcatggctaccagggagctgcagcggagccctccagccctcaccccaggccagccccaccccggcctctttgagaattctcagaactttgtacctttcccctgatttttaaaccctttttctaaacagactgactttcttacaaaatgcatttggaaaccagacctttgctacccaccaatgtctctgggttttgtaccagtccctgctctcaggccaccctgcccaggacccaggcccgcctccccctccacactcaggatgtcctgctccatctggccggctcactccgtgtggcctgcctttgctgaccgttttggggttccccgccggagctacaggggcattttcttccctaaaaccaacagtgtcccactgacctccccaagtgtttgctgcgtggcagatttcctgttcttgttcgcagtttgccgactgaagagtgtgggatttccgaggcccaggtgagcacgtccatctcaggaggcgtggagggaaaagacatgtcatgaagggttttttttatgtgactgatttttttttaaatcgatgttcaaactaataaatatttttttatgaagagg

SEQ ID NO: 276501 - DNA, 1749 bp, Artificial Sequence
  derived and/or modified sequence
atgcccctgcaccagctgggcgacaagcccctgaccttccccagccccaacagcgccatggagaacggcctggaccacaccccccccagcagaagagccagccccggcacccccctgagccccggcagcctgagaagcgccgcccacagccccctggacaccagcaagcagcccctgtgccagctgtgggccgagaagcacggcgccagaggcacccacgaggtgagatacgtgagcgccggccagagcgtggcctgcggctggtgggccttcgcccccccctgcctgcaggtgctgaacacccccaagggcatcctgttcttcctgtgcgccgccgccttcctgcagggcatgaccgtgaacggcttcatcaacaccgtgatcaccagcctggagagaagatacgacctgcacagctaccagagcggcctgatcgccagcagctacgacatcgccgcctgcctgtgcctgaccttcgtgagctacttcggcggcagcggccacaagcccagatggctgggctggggcgtgctgctgatgggcaccggcagcctggtgttcgccctgccccacttcaccgccggcagatacgaggtggagctggacgccggcgtgagaacctgccccgccaaccccggcgccgtgtgcgccgacagcaccagcggcctgagcagataccagctggtgttcatgctgggccagttcctgcacggcgtgggcgccacccccctgtacaccctgggcgtgacctacctgggcatgagcaccttcagccccaagttcctggagagccagttcagcctgagcgccagcgaggccgccaccctgttcggctacctggtggtgcccgccggcggcggcggcaccttcctgggcggcttcttcgtgaacaagctgagactgagaggcagcgccgtgatcaagttctgcctgttctgcaccgtggtgagcctgctgggcatcctggtgttcagcctgcactgccccagcgtgcccatggccggcgtgaccgccagctacggcggcagcctgctgcccgagggccacctgaacctgaccgccccctgcaacgccgcctgcagctgccagcccgagcactacagccccgtgtgcggcagcgacggcctgatgtacttcagcctgtgccacgccggctgccccgccgccaccgagaccaacgtggacggccagaaggtgtacagagactgcagctgcatcccccagaacctgagcagcggcttcggccacgccaccgccggcaagtgcaccagcacctgccagagaaagcccctgctgctggtgttcatcttcgtggtgatcttcttcaccttcctgagcagcatccccgccctgaccgccaccctgagatgcgtgagagacccccagagaagcttcgccctgggcatccagtggatcgtggtgagaatcctgggcggcatccccggccccatcgccttcggctgggtgatcgacaaggcctgcctgctgtggcaggaccagtgcggccagcagggcagctgcctggtgtaccagaacagcgccatgagcagatacatcctgatcatgggcctgctgtacaaggtgctgggcgtgctgttcttcgccatcgccagcagcagagccgccagcgaccacagacccagaccccccggccacggcggccacagcgccttccccgacgacagaaccgtgcccctgggcgacgccatcaccagagagctgctgttcgacctgcagcccagcacctag

SEQ ID NO: 276502 - DNA, 1749 bp, Artificial Sequence
  derived and/or modified sequence
atgcctttgcatcagctgggggacaaacccctaaccttcccctcacctaactctgccatggaaaatggactggatcatactcctcccagccgccgggcctcccctggaacccccctatcccccggaagcctgcggtcagcagctcacagccccttagatacaagtaaacagcccctctgccaactgtgggcagaaaaacatggggccagaggcacacatgaggttaggtatgtgtccgccggacaatcagtggcgtgtgggtggtgggcgtttgccccaccttgcctgcaggtgttaaacactcccaaggggatcctgttcttcctctgcgcagctgcgtttctgcaaggcatgaccgtaaatggcttcatcaacactgtgataacctccctggagagaagatacgatttacattcttatcagtccggactgatcgccagttcttatgatatagcggcttgtctatgtttgacctttgtttcctacttcggcgggagtggtcacaaaccaagatggcttggttggggggtgctgctcatgggtaccggaagcctagtgttcgctttgccacactttaccgcaggaaggtacgaggtggagctggatgccggggtgagaacttgccccgccaatcccggagccgtctgcgctgacagcacctctggattgtccagataccaattagtgttcatgttgggccaatttctccatggagtgggagcaacaccactttacacgctcggagttacctatttggggatgtctactttctcccccaaatttttagaaagtcagttcagtctgtcagctagtgaagccgccaccctattcgggtatctcgttgtacccgccgggggcgggggaacttttctaggcggcttcttcgtcaataaattgaggctcagaggctccgcagtgatcaagttttgcctgttttgcaccgttgtctcgctgctgggcattctggtgttctctctccactgccccagtgtgccaatggctggggttactgcctcctacgggggaagcctgttgcctgagggacacctcaatctgacagcgccctgcaatgctgcgtgctcctgccaaccagagcactactctcccgtgtgcggctcagatgggttaatgtatttcagtctatgtcatgctggatgccctgcagccaccgagactaacgtcgatggacagaaagtctacagagactgttcttgcatcccccagaatttatcctccggatttggccatgcgaccgctggcaagtgtacatccacgtgtcaacggaaaccattactccttgtgttcatatttgttgtcatattcttcaccttcctgagtagtatcccagcccttaccgctaccctgcgctgcgtacgagaccctcaaaggagttttgccctcggcatccagtggatagtcgtgagaattctgggtgggatcccgggtcccatcgcgtttggctgggtgatcgataaagcctgcttgctgtggcaggatcagtgtgggcaacagggtagctgcctggtttaccagaacagcgccatgtccagatacattttgatcatgggtctcttgtacaaggttcttggcgtgctgtttttcgccatcgcctcaagcagggctgcttccgatcaccgccctcggccgcctggacacggtggccatagcgcctttccagacgatcgtaccgttccactaggggatgcgatcactagagagctgctctttgacctccagcctagcacctag

SEQ ID NO: 276503 - DNA, 1749 bp, Artificial Sequence
  derived and/or modified sequence
atgcccctgcaccagctgggggacaagcccctgaccttccccagccccaacagcgccatggagaatggcctggaccacaccccacccagcagaagagccagccctggcacccccctgagccctggcagcctgcggtctgctgcccacagccccctggacaccagcaagcagcccctgtgccagctgtgggccgagaagcatggagcccggggcacccatgaggtgcgctacgtgtctgctggccagagcgtggcctgtggctggtgggcctttgccccaccctgcctgcaggtgctgaacacccccaagggcatcctcttcttcctgtgtgccgccgccttcctgcagggcatgacagtgaatggcttcatcaacacagtcatcaccagcctggagaggagatatgacctgcacagctaccagagcggcctgattgccagcagctatgacattgctgcctgcctgtgcctgacctttgtgtcctactttggaggcagcggccacaagccccgctggctgggctggggcgtgctgctgatgggcaccggcagcctggtgtttgccctgccccacttcaccgctggccgctatgaggtggagctggatgctggggtgaggacctgcccagccaaccctggagctgtgtgtgccgacagcaccagcggcctgagccgctaccagctggtgttcatgctgggccagttcctgcatggagtgggcgccacccccctgtacaccctgggcgtgacctacctgggcatgagcaccttcagccccaagttcctggagagccagttcagcctgagcgccagcgaggccgccaccctgtttggctacctggtggtgcctgctgggggcggcggcaccttcctgggcggcttctttgtgaacaagctgcggctgcggggcagcgctgtgatcaagttctgcctcttctgcaccgtggtgtccctgctgggcatcctggtgttcagcctgcactgccccagcgtgcccatggccggcgtgacagccagctatggaggcagcctgctgcctgagggccacctgaacctgacagccccctgcaatgctgcctgcagctgccagcctgagcactacagccctgtgtgtggcagtgatggcctgatgtacttcagcctgtgccacgccggctgcccagctgccacagagaccaacgtggatggccagaaggtgtacagagactgcagctgcatcccccagaacctgagcagcggcttcggccacgccacagctgggaagtgcaccagcacctgccagaggaagcccctgctgctggtgttcatctttgtggtgatcttcttcaccttcctgagcagcatcccagccctgacagccaccctgcgctgtgtgcgggacccccagaggagctttgccctgggcatccagtggatcgtggtgcgcatcctgggcggcatccctggccccatcgccttcggctgggtgattgacaaggcctgcctgctgtggcaggaccagtgtggccagcagggcagctgcctggtgtaccagaacagcgccatgagccgctacatcctgatcatgggcctgctgtacaaggtgctgggcgtgctcttctttgccatcgccagcagcagagctgccagtgaccaccggcccaggcctcctggccacggcggccacagcgccttcccagatgacagaacagtgcccctgggagatgccatcacccgggagctgctgtttgacctgcagcccagcacctag

SEQ ID NO: 276504 - DNA, 1749 bp, Artificial Sequence
  derived and/or modified sequence
atgcccctgcaccagctgggcgacaagcccctgaccttccccagcccaaactctgcgatggagaatggtctggaccacactcccccttcacgtagggcgtcgcccggaacccctctttctccaggtagcctgcgcagcgccgctcactctcctttagatacatcgaagcaaccactctgccaactgtgggcagagaagcatggagcgaggggaacacatgaagtacgctacgtgtcagccggacagtctgtggcctgcggctggtgggcattcgccccgccttgtctccaagttttgaatacaccaaaaggcatcttgttctttctgtgcgcggctgcgttcctgcagggaatgaccgtgaatggtttcattaacacagttatcacatccctggagagacgatacgacctccactcttaccagagcgggcttatcgcctccagctatgatattgccgcttgcttgtgtctcacctttgtttcctatttcggaggcagcggacacaaacctcggtggctggggtggggggtgttattaatgggaacaggatctttggtcttcgcactacctcattttacagctggacgttacgaggtcgaattggatgccggggtcagaacatgtcccgctaaccctggtgccgtgtgcgccgacagcactagcgggcttagtcggtatcagcttgtctttatgctcggtcaattcttgcacggggtaggtgctacccctctttatacactgggtgtcacatatctgggaatgagcacctttagccctaagttcttggagagccaattttctttatccgccagcgaggccgcaacactctttggctatcttgttgtgccggcaggcggcggaggaactttcttgggaggattctttgttaataagttacgactgagggggtccgctgtgatcaagttttgcctcttctgtaccgttgtgagtttattgggcatcctggtcttttctcttcattgcccctcggtgcccatggccggcgtgacagcctcctatggaggctccctgttgcccgagggccacttgaacctgactgccccatgtaatgcagcatgttcctgtcagcctgaacactattcacctgtctgcgggtctgatggcttaatgtatttcagtctgtgccacgcaggctgtcctgccgctaccgaaactaatgttgacggacagaaagtgtacagggactgtagttgcatcccacagaatctatccagtggctttggacacgccaccgccgggaaatgtaccagtacatgtcagcggaagcccctgcttttagtcttcatcttcgtagtgatctttttcacatttctctcctccattcctgctctgacagctacgctgaggtgcgtgagggatccccagcgctccttcgcactcgggattcagtggatagtcgtgcgtatactcggcggtattccaggccccatagcttttggctgggtcatcgacaaagcttgtttactatggcaggaccaatgcgggcagcaaggctcatgcctagtttatcagaactctgctatgtcccgatatatcctgatcatggggctgctttacaaggtactcggagtgcttttctttgctatcgcctcaagccgggcggcctccgatcacagacctcgcccccctggccacggaggtcactccgcatttcccgacgaccgaactgtgccgctgggagacgccattacaagagagctgctcttcgatttgcagccttctacatag

SEQ ID NO: 276505 - DNA, 1749 bp, Artificial Sequence
  derived and/or modified sequence
atgcccctccaccagttgggcgataaaccgctcacatttccttccccaaacagcgcgatggagaacggtctagatcacaccccgccttctcggagggcctccccaggcacccccctttcgccaggtagcctccgcagcgccgctcattccccattggatacctccaagcaacctctttgccagttgtgggctgagaagcacggcgctcggggtacccacgaggttcgttatgtgtcggcgggtcaatctgtggcatgtggttggtgggctttcgccccaccttgcctccaagtactaaataccccaaaggggattctgttttttctgtgcgccgctgctttcttacagggaatgaccgtcaacgggttcataaacacggttattactagcctggagcggaggtacgacctgcattcctaccagtccggactgattgcaagcagttacgacatcgctgcctgcctctgtctgacatttgtcagctatttcggcggatccggtcataaacctcgctggttagggtggggcgtgctcctgatgggtactggtagtttggtgttcgctctgccacatttcacggcagggaggtacgaggtcgagctggatgcaggtgtgcgaacctgcccagcgaaccccggagctgtgtgtgccgacagcacatccggactgtctaggtatcagctggtttttatgctggggcagtttcttcatggcgtgggtgcaacccccctttacacccttggggtcacctatcttggaatgtctacgttctctccgaagttcctggagtcacagtttagcctgtcagcaagcgaagcggctacactattcggttatctagttgtgccagcaggcggtggaggcacgttcctcgggggtttttttgtgaataagctcaggctcagaggaagcgccgtgattaagttttgccttttctgcacagtcgtaagcctgctgggcatcttggtcttctctttgcactgccctagtgtgcctatggctggcgttacagccagttatggcggaagcctgctgcccgaggggcacctgaatctgacggctccttgtaatgctgcctgctcttgtcagccagagcactatagtcctgtatgcggcagtgacggactaatgtatttcagcctgtgccacgccggatgcccagctgccaccgagactaatgtcgacggccaaaaagtgtatagagactgtagctgcataccccagaacctcagttcaggttttgggcatgcgactgcaggaaaatgcacatctacatgccagaggaagcccctgcttctagtgtttatttttgtcgttatctttttcacattcttatcaagcatccctgcactcactgctacactgcgctgcgtgagggacccccagcggtcttttgcgctggggattcagtggatcgtggtgagaatattaggtggtatcccaggccctattgcgttcgggtgggttatcgataaggcatgtttattgtggcaggatcaatgcggccaacaaggaagttgcctggtttaccagaacagcgccatgtcacggtacatcctaatcatgggcctgctatacaaagttcttggagtcctgtttttcgctatcgccagctcccgggcagcctctgatcaccgcccacgacccccagggcatgggggacacagcgctttccccgacgaccgaacggtcccactgggggacgccatcactagggagctcctctttgatttgcagccatcaacctag

SEQ ID NO: 276506 - DNA, 1749 bp, Artificial Sequence
  derived and/or modified sequence
atgcccctgcatcagctgggggacaagccgctcaccttccccagccccaactcagccatggaaaacgggcttgaccacaccccacccagcaggagggcatccccgggcacacccctgagccccggctccctccgctccgctgcccatagccccctggacaccagcaagcagcccctctgccagctctgggccgagaagcatggcgcccgggggacccatgaggtgcggtacgtctcggccgggcagagcgtggcgtgcggctggtgggccttcgcaccgccgtgcctgcaggtcctcaacacgcccaagggcatcctgttcttcctgtgtgcggccgcattcctgcaggggatgactgtgaatggcttcatcaacacagtcatcacctccctggagcgccgctatgacctgcacagctaccagagcgggctcatcgccagctcctacgacattgccgcctgcctctgcctcaccttcgtcagctacttcgggggctcagggcacaagccgcgctggctgggctggggcgtgctgcttatgggcacggggtcgctggtgttcgcgctgccccacttcacggctggccgctatgaggtggagttggacgcgggtgtcaggacgtgccctgccaaccccggcgcggtgtgtgcggacagcacctcgggcctgtcccgctaccagctggtcttcatgctgggccagttcctgcatggcgtgggtgccacacccctctacacgctgggcgtcacctacctgggcatgtccacgttcagccccaagttcttggagtcccagttcagcctgagtgcctcagaagctgccaccttgtttgggtacctggtggtgccagcgggtggtggcggcaccttcctgggcggcttctttgtgaacaagctcaggctccggggctccgcggtcatcaagttctgcctgttctgcaccgttgtcagcctgctgggcatcctcgtcttctcactgcactgccccagtgtgcccatggcgggcgtcacagccagctacggcgggagcctcctgcccgaaggccacctgaacctaacggctccctgcaacgctgcctgcagctgccagccagaacactacagccctgtgtgcggctcggacggcctcatgtacttctcactgtgccacgcagggtgccctgcagccacggagacgaatgtggacggccagaaggtgtaccgagactgtagctgtatccctcagaatctttcctctggttttggccatgccactgcagggaaatgcacttcaacttgtcagagaaagcccctccttctggttttcatattcgttgtaattttctttacattcctcagcagcattcctgcactaacggcaactctacgatgtgtccgtgaccctcagagatcctttgccctgggaatccagtggattgtagttagaatactagggggcatcccggggcccatcgccttcggctgggtgatcgacaaggcctgtctgctgtggcaggaccagtgtggccagcagggctcctgcttggtgtaccagaattcggccatgagccgctacatactcatcatggggctcctgtacaaggtgctgggcgtcctcttctttgccatagccagctccagagcagcgtctgaccaccgcccgcgcccacccggccacggcgggcactcagcatttcctgatgacagaacagtgccgttgggtgatgcaatcacacgggaacttctatttgacctgcaaccttctacttaa

SEQ ID NO: 276507 - protein, 135 aa, Artificial Sequence
  derived and/or modified sequence
MHTIIRDKETSRDEFIFYSKRLMRLLIEHALSFLPFQDCVVQTPQGQDYAGKCYAGKQITGVSILRAGETMEPALRAVCKDVRIGTILIQTNQLTGEPELHYLRLPKDISDDHVILMDCTVSTGAAAMMAVRVLL

SEQ ID NO: 276508 - protein, 892 aa, Artificial Sequence
  derived and/or modified sequence
MTDPFCVGGRRLPGSSKSGPGKDGSRKEVRLPMLHDPPKMGMPVVRGGQTVPGQAPLCFDPGSPASDKTEGKKKGRPKAENQALRDIPLSLMNDWKDEFKAHSRVKCPNSGCWLEFPSIYGLKYHYQRCQGGAISDRLAFPCPFCEAAFTSKTQLEKHRIWNHMDRPLPASKPGPISRPVTISRPVGVSKPIGVSKPVTIGKPVGVSKPIGISKPVSVGRPMPVTKAIPVTRPVPVTKPVTVSRPMPVTKAMPVTKPITVTKSVPVTKPVPVTKPITVTKLVTVTKPVPVTKPVTVSRPIVVSKPVTVSRPIAISRHTPPCKMVLLTRSENKAPRATGRNSGKKRAADSLDTCPIPPKQARPENGEYGPSSMGQSSAFQLSADTSSGSLSPGSRPSGGMEALKAAGPASPPEEDPERTKHRRKQKTPKKFTGEQPSISGTFGLKGLVKAEDKARVHRSKKQEGPGPEDARKKVPAAPITVSKEAPAPVAHPAPGGPEEQWQRAIHERGEAVCPTCNVVTRKTLVGLKKHMEVCQKLQDALKCQHCRKQFKSKAGLNYHTMAEHSAKPSDAEASEGGEQEERERLRKVLKQMGRLRCPQEGCGAAFSSLMGYQYHQRRCGKPPCEVDSPSFPCTHCGKTYRSKAGHDYHVRSEHTAPPPEEPTDKSPEAEDPLGVERTPSGRVRRTSAQVAVFHLQEIAEDELARDWTKRRMKDDLVPETARLNYTRPGLPTLNPQLLEAWKNEVKEKGHVNCPNDCCEAIYSSVSGLKAHLASCSKGAHLAGKYRCLLCPKEFSSESGVKYHILKTHAENWFRTSADPPPKHRSQDSLVPKKEKKKNLAGGKKRGRKPKERTPEEPVAKLPPRRDDWPPGCRDKGARGSTGRKVGVSKAPEK

SEQ ID NO: 276509 - DNA, 5910 bp, Artificial Sequence
  derived and/or modified sequence
ccccgcgcccggcccggcccgggaaggtctacttgctctgcagagatgacggatcctttctgcgttggaggccgtcggctcccggggtccagcaagagtggtcccgggaaggatggcagccgaaaggaggtccgacttccaatgctgcatgacccaccgaagatggggatgccggtggtccgtggtggacagacagtgcccggccaggcccctctctgctttgacccgggaagtccagccagtgacaagacagaagggaagaaaaaggggcggccaaaagccgagaaccaggccctccgagacattcctctctccctgatgaacgactggaaggatgagttcaaggcacactcgagggtgaagtgtccaaactcagggtgctggctggagttccccagcatctacgggctcaagtaccattaccagcggtgccaagggggtgccatctcagatcgcctggccttcccctgccccttctgcgaggccgcattcacctctaagacccagctggagaaacaccggatctggaaccacatggaccgacccctgcctgcctccaagcctgggcccatcagcaggccggtcaccatcagccggcctgttggggtcagcaagcccatcggagtgagcaaacctgtcactattggcaaacctgtgggtgtcagcaaacccattggcatcagcaagccagtctcggtcggcagacccatgccagtcaccaaggccatcccggtcactaggcccgtgccagtcaccaaacctgtcacagtcagcaggcccatgcccgtcaccaaggccatgccggtcaccaaacccatcacagtcaccaagtctgtgccggtcaccaaacccgtacctgtcaccaaacccattacggtaacaaagcttgtgacagttacgaaacccgtgccggtcaccaagccagtgacagtcagcaggcccattgtggtcagcaagccggtgacagtcagcaggcccattgctatcagcagacacacaccgccctgcaaaatggtgctgctgaccaggtcggagaacaaagcacctcgtgccacagggaggaacagtggtaagaaaagggctgcggacagcctggacacctgcccaattccacccaagcaggccaggccagagaatggggagtacggcccctcctccatgggccagagctcggccttccagctgagtgcagacaccagcagtggctccttgtcgccaggcagcaggccgtcagggggcatggaggcactgaaggctgcaggccctgcgtccccgcctgaggaggacccggagcgcacaaagcacagaaggaaacagaaaacacccaaaaagtttacaggggagcagccatccatctcagggacctttgggctcaaaggcctggtcaaagctgaggacaaggcccgagttcaccgctccaagaagcaggaggggccaggccctgaggacgcccggaagaaggtgccagctgcccccatcactgtcagcaaggaggcaccggcccctgtggcccacccagctccaggtggccctgaagagcagtggcagagggccatccatgagcgcggggaagccgtctgccccacctgcaacgtggtcacccggaagactctcgtggggcttaagaagcacatggaggtgtgtcagaagcttcaggatgcactcaagtgccagcactgccggaagcagttcaagtccaaagccggcctcaactaccacactatggccgagcacagtgccaagccctctgacgccgaggcctccgaagggggcgagcaggaggagcgcgagaggctgcgcaaggtgctgaagcagatgggacggctgcgctgcccccaggagggttgcggggctgccttctccagcctcatgggctaccagtaccaccagcggcgctgcgggaagccgccctgcgaggtggacagcccctccttcccctgcacccactgtggcaagacgtaccgatccaaggctggccacgactaccacgtgcgctcggagcacacggcccccccccctgaggagcccacagacaagtcccctgaggctgaggacccgctgggtgtggagcggaccccaagcgggcgtgtccgccgcacgtcggcccaggtggcggtgttccacctgcaggagatagcggaggacgagctggcccgcgactggaccaagcggcgcatgaaggatgaccttgtgcccgagaccgcacggctcaactacactcgaccagggctccccacgctgaacccccagctgctagaggcatggaagaatgaagtgaaggagaaaggccacgtcaactgtcccaacgactgctgtgaagccatctactccagcgtgtccggactcaaggctcatctcgccagctgcagtaagggggcccacctggcagggaagtaccgctgtctgctgtgtccgaaggagttcagttctgagagtggcgtcaaataccacatcctgaagacccacgcagagaactggttccgaacatcagcagacccacctcccaaacacaggagccaggactcattggtgcccaagaaggaaaagaagaaaaatctggcaggtggaaagaagcggggccgaaagcccaaggagcggaccccagaggagcctgtggccaagctgcccccgcgccgggacgactggcctccaggatgcagagacaagggggcccggggctccaccggccggaaggtgggagtcagcaaggcgcctgaaaagtgagcatggtgcgtggggcctggcccccatgcagccgccacaccgccctctgttcaaggcagggccagctccgggacctctgtcctccagttctccatcccccacccccgcctcttcatccgtccagtggggcagccagccactctcccttccctgaaggtggcccttcccctgttaaggctgccacagggcacacctgggttggggctccccaaggtgtgcccagcagaagtgcaatagccaggagggttgcccctcctcatgggaatgtgtctggggtcttggtgccacaggggctgcagcgcagagtaggcagatggcctttggccccccggctccgcttcctcaggccctgccgggtcccttccctggctaccccaaggctcaggcatccctggtgacctgtggttctgggctggtgagggcacctgagcaacctggcacgggcagccaccatcctggcctcacctccacccaacactggaactccagcacccccagctacctcccaggacagacccctgtctgaccactgccatgctgacctgacaggctccggcctgcccttggccacccacttggtccccttgcttctgttttctacctctccaggcctgcccactacccccacccctgctcctcctttgtcagtgcgatccctgctgtgctcaggccctgccccccaggcctgtctgtaattctcccagcttggggcaagggaggggttttgcttcttgtacctacagggcagcagaagcttgatgcccttcaacacagctgccagccctgggggtgtggggcccctggagtgtgctctcctccagtgttcagccttctggcactgcaggcctaggttggagcagcctcgtggagtagggacggactagttcgggccctggggtcttgctggggcccataggcatgtggggcaggaagctgggcagagctggcctggctctgagtggccactgggggaaaggcagccttctgtctgccaatctgggtaggcccagtggccaagctctcatgggagccccctccccacttttttttttaacctgcccccattgtttctggttgtgtggtcatttgatatgggaactgaaggccagccaggggaggggcttggccaaagtcacagcaggttgatggcagctccagagctgtctttgcccctttgtggccctgaggacggctgggtctataggtagggcaggggtcaggcagggagtccagggtgcctggaagaggtggccacagcctgtggctccctccctggggtcctgccttccaaccacggcattgcagggaggatgaggctcagagggggtaggtttggagggaggccattttccagggtgggtgggagtgggctgagggctcggccccactgaccctggacgatgagaattttgatgtttgcccgtgtgcgtgtgtctcctgggtgtagtggatgccagtcttgttgctgtgacaagtaacaaccttttttttaaattgttttttatacaaacactcgcaatccgacatttggtgctaagggtttcctggtgcagacggtgggcctgggggctgggctggaccagggcgtgggtctctggggttggggtcccttgctgctcagggaggcagtactgactgggcactgcctctgcccccagcacccaccctcccccattccccagggagaaggggccccactgggcttggcctgcagtagtagggagacaagttccaggagcactttggggactggggttgcagaacacttcctgtctctggcttcatccttgggccagaaggctccaaccctcagcagcccttgccagatgtgccagggagtgggtgtggagacccggactccccccacccacgcacacctcggcctgatgagaggatggaggctggggcagagatgggcgtgacccagcgtcagagggtcgggggaggcattccttcctgtgtcccagagcttcactggtggagctggaggagccggaggtggagggtggggtctggcagctgctgctggggcagcctcatgaggggaggggaggggaggggaggggagcaggcactgggcgggggcctaggtgcactttgtccttgccaccaatggcgggaggagggtggacctgaacacctgcagggtgtggtgcctgccccagcctctcaggtacttggcccttggggagaagagaagagggtctggtttttgctgggggtgagtttccgggacactcccaaagcccacagataatccctggtgtgggaagaggagtcctggataccttgatgtttagcactttaaccccctttgtctttaaggtaggcgtgggggctactgccagaagtggctgttgggtctgaccccctcctttctgccctccctctgccacatgctggtccgcagagccctcctcccaaggggtggggccctgggtggagctcagcagggtctgcccactccctacgctggcccacataggcctccaggagccctcagtgagagggaccagcatagctgacccccagagtgtggtgggcgccggccctgcccgaggcccagtcggggccctttctgcagatctacctctggctcagcgcacgccccctgccctgagaacaggaaagggcccggaagggctgactcaccgggccgacgctcacacgaaaatgggatgcactttatttgctggtgcaaaggcaggtgagggtgcctcctgtgtgaccgttggccctcctgcctggtggcgctgaagggaaggagccagtgagcctgaccccgggaggggccgtccccgtgtgccgcgtttggcggggccccaggcggctcccccaggcccgggtctggggccccaggctttcccctgcctcgcggccgggcgtcccgtgctttgggtttcttggtttgggttttttaatgccagttctcagtacataagtgcattttgaaagaggttccagctatcacttgtaaccatatatatatacatatatattctatctacaaagtgtttatttgcgagatgtttcaacggtgagttcgggccccgcccgccttgtgaccatctgtccccggtcctcgtccccgccccgcgccctggtcccgagtggcgtggggacgggccatcactgtatgtattaaaatgactgtatcaaataaatgtttattgatttttttccagg

SEQ ID NO: 276510 - DNA, 5919 bp, Artificial Sequence
  derived and/or modified sequence
ccccccgccccggcccggcccggcccggccgcagccccgctgggcgccgcagagatgacggatcctttctgcgttggaggccgtcggctcccggggtccagcaagagtggtcccgggaaggatggcagccgaaaggaggtccgacttccaatgctgcatgacccaccgaagatggggatgccggtggtccgtggtggacagacagtgcccggccaggcccctctctgctttgacccgggaagtccagccagtgacaagacagaagggaagaaaaaggggcggccaaaagccgagaaccaggccctccgagacattcctctctccctgatgaacgactggaaggatgagttcaaggcacactcgagggtgaagtgtccaaactcagggtgctggctggagttccccagcatctacgggctcaagtaccattaccagcggtgccaagggggtgccatctcagatcgcctggccttcccctgccccttctgcgaggccgcattcacctctaagacccagctggagaaacaccggatctggaaccacatggaccgacccctgcctgcctccaagcctgggcccatcagcaggccggtcaccatcagccggcctgttggggtcagcaagcccatcggagtgagcaaacctgtcactattggcaaacctgtgggtgtcagcaaacccattggcatcagcaagccagtctcggtcggcagacccatgccagtcaccaaggccatcccggtcactaggcccgtgccagtcaccaaacctgtcacagtcagcaggcccatgcccgtcaccaaggccatgccggtcaccaaacccatcacagtcaccaagtctgtgccggtcaccaaacccgtacctgtcaccaaacccattacggtaacaaagcttgtgacagttacgaaacccgtgccggtcaccaagccagtgacagtcagcaggcccattgtggtcagcaagccggtgacagtcagcaggcccattgctatcagcagacacacaccgccctgcaaaatggtgctgctgaccaggtcggagaacaaagcacctcgtgccacagggaggaacagtggtaagaaaagggctgcggacagcctggacacctgcccaattccacccaagcaggccaggccagagaatggggagtacggcccctcctccatgggccagagctcggccttccagctgagtgcagacaccagcagtggctccttgtcgccaggcagcaggccgtcagggggcatggaggcactgaaggctgcaggccctgcgtccccgcctgaggaggacccggagcgcacaaagcacagaaggaaacagaaaacacccaaaaagtttacaggggagcagccatccatctcagggacctttgggctcaaaggcctggtcaaagctgaggacaaggcccgagttcaccgctccaagaagcaggaggggccaggccctgaggacgcccggaagaaggtgccagctgcccccatcactgtcagcaaggaggcaccggcccctgtggcccacccagctccaggtggccctgaagagcagtggcagagggccatccatgagcgcggggaagccgtctgccccacctgcaacgtggtcacccggaagactctcgtggggcttaagaagcacatggaggtgtgtcagaagcttcaggatgcactcaagtgccagcactgccggaagcagttcaagtccaaagccggcctcaactaccacactatggccgagcacagtgccaagccctctgacgccgaggcctccgaagggggcgagcaggaggagcgcgagaggctgcgcaaggtgctgaagcagatgggacggctgcgctgcccccaggagggttgcggggctgccttctccagcctcatgggctaccagtaccaccagcggcgctgcgggaagccgccctgcgaggtggacagcccctccttcccctgcacccactgtggcaagacgtaccgatccaaggctggccacgactaccacgtgcgctcggagcacacggcccccccccctgaggagcccacagacaagtcccctgaggctgaggacccgctgggtgtggagcggaccccaagcgggcgtgtccgccgcacgtcggcccaggtggcggtgttccacctgcaggagatagcggaggacgagctggcccgcgactggaccaagcggcgcatgaaggatgaccttgtgcccgagaccgcacggctcaactacactcgaccagggctccccacgctgaacccccagctgctagaggcatggaagaatgaagtgaaggagaaaggccacgtcaactgtcccaacgactgctgtgaagccatctactccagcgtgtccggactcaaggctcatctcgccagctgcagtaagggggcccacctggcagggaagtaccgctgtctgctgtgtccgaaggagttcagttctgagagtggcgtcaaataccacatcctgaagacccacgcagagaactggttccgaacatcagcagacccacctcccaaacacaggagccaggactcattggtgcccaagaaggaaaagaagaaaaatctggcaggtggaaagaagcggggccgaaagcccaaggagcggaccccagaggagcctgtggccaagctgcccccgcgccgggacgactggcctccaggatgcagagacaagggggcccggggctccaccggccggaaggtgggagtcagcaaggcgcctgaaaagtgagcatggtgcgtggggcctggcccccatgcagccgccacaccgccctctgttcaaggcagggccagctccgggacctctgtcctccagttctccatcccccacccccgcctcttcatccgtccagtggggcagccagccactctcccttccctgaaggtggcccttcccctgttaaggctgccacagggcacacctgggttggggctccccaaggtgtgcccagcagaagtgcaatagccaggagggttgcccctcctcatgggaatgtgtctggggtcttggtgccacaggggctgcagcgcagagtaggcagatggcctttggccccccggctccgcttcctcaggccctgccgggtcccttccctggctaccccaaggctcaggcatccctggtgacctgtggttctgggctggtgagggcacctgagcaacctggcacgggcagccaccatcctggcctcacctccacccaacactggaactccagcacccccagctacctcccaggacagacccctgtctgaccactgccatgctgacctgacaggctccggcctgcccttggccacccacttggtccccttgcttctgttttctacctctccaggcctgcccactacccccacccctgctcctcctttgtcagtgcgatccctgctgtgctcaggccctgccccccaggcctgtctgtaattctcccagcttggggcaagggaggggttttgcttcttgtacctacagggcagcagaagcttgatgcccttcaacacagctgccagccctgggggtgtggggcccctggagtgtgctctcctccagtgttcagccttctggcactgcaggcctaggttggagcagcctcgtggagtagggacggactagttcgggccctggggtcttgctggggcccataggcatgtggggcaggaagctgggcagagctggcctggctctgagtggccactgggggaaaggcagccttctgtctgccaatctgggtaggcccagtggccaagctctcatgggagccccctccccacttttttttttaacctgcccccattgtttctggttgtgtggtcatttgatatgggaactgaaggccagccaggggaggggcttggccaaagtcacagcaggttgatggcagctccagagctgtctttgcccctttgtggccctgaggacggctgggtctataggtagggcaggggtcaggcagggagtccagggtgcctggaagaggtggccacagcctgtggctccctccctggggtcctgccttccaaccacggcattgcagggaggatgaggctcagagggggtaggtttggagggaggccattttccagggtgggtgggagtgggctgagggctcggccccactgaccctggacgatgagaattttgatgtttgcccgtgtgcgtgtgtctcctgggtgtagtggatgccagtcttgttgctgtgacaagtaacaaccttttttttaaattgttttttatacaaacactcgcaatccgacatttggtgctaagggtttcctggtgcagacggtgggcctgggggctgggctggaccagggcgtgggtctctggggttggggtcccttgctgctcagggaggcagtactgactgggcactgcctctgcccccagcacccaccctcccccattccccagggagaaggggccccactgggcttggcctgcagtagtagggagacaagttccaggagcactttggggactggggttgcagaacacttcctgtctctggcttcatccttgggccagaaggctccaaccctcagcagcccttgccagatgtgccagggagtgggtgtggagacccggactccccccacccacgcacacctcggcctgatgagaggatggaggctggggcagagatgggcgtgacccagcgtcagagggtcgggggaggcattccttcctgtgtcccagagcttcactggtggagctggaggagccggaggtggagggtggggtctggcagctgctgctggggcagcctcatgaggggaggggaggggaggggaggggagcaggcactgggcgggggcctaggtgcactttgtccttgccaccaatggcgggaggagggtggacctgaacacctgcagggtgtggtgcctgccccagcctctcaggtacttggcccttggggagaagagaagagggtctggtttttgctgggggtgagtttccgggacactcccaaagcccacagataatccctggtgtgggaagaggagtcctggataccttgatgtttagcactttaaccccctttgtctttaaggtaggcgtgggggctactgccagaagtggctgttgggtctgaccccctcctttctgccctccctctgccacatgctggtccgcagagccctcctcccaaggggtggggccctgggtggagctcagcagggtctgcccactccctacgctggcccacataggcctccaggagccctcagtgagagggaccagcatagctgacccccagagtgtggtgggcgccggccctgcccgaggcccagtcggggccctttctgcagatctacctctggctcagcgcacgccccctgccctgagaacaggaaagggcccggaagggctgactcaccgggccgacgctcacacgaaaatgggatgcactttatttgctggtgcaaaggcaggtgagggtgcctcctgtgtgaccgttggccctcctgcctggtggcgctgaagggaaggagccagtgagcctgaccccgggaggggccgtccccgtgtgccgcgtttggcggggccccaggcggctcccccaggcccgggtctggggccccaggctttcccctgcctcgcggccgggcgtcccgtgctttgggtttcttggtttgggttttttaatgccagttctcagtacataagtgcattttgaaagaggttccagctatcacttgtaaccatatatatatacatatatattctatctacaaagtgtttatttgcgagatgtttcaacggtgagttcgggccccgcccgccttgtgaccatctgtccccggtcctcgtccccgccccgcgccctggtcccgagtggcgtggggacgggccatcactgtatgtattaaaatgactgtatcaaataaatgtttattgatttttttccagg

SEQ ID NO: 276511 - DNA, 5926 bp, Artificial Sequence
  derived and/or modified sequence
ccccgcggcgtctggctcggctcgcgccttccgcgagctgcccccgctgggcgccgcagagatgacggatcctttctgcgttggaggccgtcggctcccggggtccagcaagagtggtcccgggaaggatggcagccgaaaggaggtccgacttccaatgctgcatgacccaccgaagatggggatgccggtggtccgtggtggacagacagtgcccggccaggcccctctctgctttgacccgggaagtccagccagtgacaagacagaagggaagaaaaaggggcggccaaaagccgagaaccaggccctccgagacattcctctctccctgatgaacgactggaaggatgagttcaaggcacactcgagggtgaagtgtccaaactcagggtgctggctggagttccccagcatctacgggctcaagtaccattaccagcggtgccaagggggtgccatctcagatcgcctggccttcccctgccccttctgcgaggccgcattcacctctaagacccagctggagaaacaccggatctggaaccacatggaccgacccctgcctgcctccaagcctgggcccatcagcaggccggtcaccatcagccggcctgttggggtcagcaagcccatcggagtgagcaaacctgtcactattggcaaacctgtgggtgtcagcaaacccattggcatcagcaagccagtctcggtcggcagacccatgccagtcaccaaggccatcccggtcactaggcccgtgccagtcaccaaacctgtcacagtcagcaggcccatgcccgtcaccaaggccatgccggtcaccaaacccatcacagtcaccaagtctgtgccggtcaccaaacccgtacctgtcaccaaacccattacggtaacaaagcttgtgacagttacgaaacccgtgccggtcaccaagccagtgacagtcagcaggcccattgtggtcagcaagccggtgacagtcagcaggcccattgctatcagcagacacacaccgccctgcaaaatggtgctgctgaccaggtcggagaacaaagcacctcgtgccacagggaggaacagtggtaagaaaagggctgcggacagcctggacacctgcccaattccacccaagcaggccaggccagagaatggggagtacggcccctcctccatgggccagagctcggccttccagctgagtgcagacaccagcagtggctccttgtcgccaggcagcaggccgtcagggggcatggaggcactgaaggctgcaggccctgcgtccccgcctgaggaggacccggagcgcacaaagcacagaaggaaacagaaaacacccaaaaagtttacaggggagcagccatccatctcagggacctttgggctcaaaggcctggtcaaagctgaggacaaggcccgagttcaccgctccaagaagcaggaggggccaggccctgaggacgcccggaagaaggtgccagctgcccccatcactgtcagcaaggaggcaccggcccctgtggcccacccagctccaggtggccctgaagagcagtggcagagggccatccatgagcgcggggaagccgtctgccccacctgcaacgtggtcacccggaagactctcgtggggcttaagaagcacatggaggtgtgtcagaagcttcaggatgcactcaagtgccagcactgccggaagcagttcaagtccaaagccggcctcaactaccacactatggccgagcacagtgccaagccctctgacgccgaggcctccgaagggggcgagcaggaggagcgcgagaggctgcgcaaggtgctgaagcagatgggacggctgcgctgcccccaggagggttgcggggctgccttctccagcctcatgggctaccagtaccaccagcggcgctgcgggaagccgccctgcgaggtggacagcccctccttcccctgcacccactgtggcaagacgtaccgatccaaggctggccacgactaccacgtgcgctcggagcacacggcccccccccctgaggagcccacagacaagtcccctgaggctgaggacccgctgggtgtggagcggaccccaagcgggcgtgtccgccgcacgtcggcccaggtggcggtgttccacctgcaggagatagcggaggacgagctggcccgcgactggaccaagcggcgcatgaaggatgaccttgtgcccgagaccgcacggctcaactacactcgaccagggctccccacgctgaacccccagctgctagaggcatggaagaatgaagtgaaggagaaaggccacgtcaactgtcccaacgactgctgtgaagccatctactccagcgtgtccggactcaaggctcatctcgccagctgcagtaagggggcccacctggcagggaagtaccgctgtctgctgtgtccgaaggagttcagttctgagagtggcgtcaaataccacatcctgaagacccacgcagagaactggttccgaacatcagcagacccacctcccaaacacaggagccaggactcattggtgcccaagaaggaaaagaagaaaaatctggcaggtggaaagaagcggggccgaaagcccaaggagcggaccccagaggagcctgtggccaagctgcccccgcgccgggacgactggcctccaggatgcagagacaagggggcccggggctccaccggccggaaggtgggagtcagcaaggcgcctgaaaagtgagcatggtgcgtggggcctggcccccatgcagccgccacaccgccctctgttcaaggcagggccagctccgggacctctgtcctccagttctccatcccccacccccgcctcttcatccgtccagtggggcagccagccactctcccttccctgaaggtggcccttcccctgttaaggctgccacagggcacacctgggttggggctccccaaggtgtgcccagcagaagtgcaatagccaggagggttgcccctcctcatgggaatgtgtctggggtcttggtgccacaggggctgcagcgcagagtaggcagatggcctttggccccccggctccgcttcctcaggccctgccgggtcccttccctggctaccccaaggctcaggcatccctggtgacctgtggttctgggctggtgagggcacctgagcaacctggcacgggcagccaccatcctggcctcacctccacccaacactggaactccagcacccccagctacctcccaggacagacccctgtctgaccactgccatgctgacctgacaggctccggcctgcccttggccacccacttggtccccttgcttctgttttctacctctccaggcctgcccactacccccacccctgctcctcctttgtcagtgcgatccctgctgtgctcaggccctgccccccaggcctgtctgtaattctcccagcttggggcaagggaggggttttgcttcttgtacctacagggcagcagaagcttgatgcccttcaacacagctgccagccctgggggtgtggggcccctggagtgtgctctcctccagtgttcagccttctggcactgcaggcctaggttggagcagcctcgtggagtagggacggactagttcgggccctggggtcttgctggggcccataggcatgtggggcaggaagctgggcagagctggcctggctctgagtggccactgggggaaaggcagccttctgtctgccaatctgggtaggcccagtggccaagctctcatgggagccccctccccacttttttttttaacctgcccccattgtttctggttgtgtggtcatttgatatgggaactgaaggccagccaggggaggggcttggccaaagtcacagcaggttgatggcagctccagagctgtctttgcccctttgtggccctgaggacggctgggtctataggtagggcaggggtcaggcagggagtccagggtgcctggaagaggtggccacagcctgtggctccctccctggggtcctgccttccaaccacggcattgcagggaggatgaggctcagagggggtaggtttggagggaggccattttccagggtgggtgggagtgggctgagggctcggccccactgaccctggacgatgagaattttgatgtttgcccgtgtgcgtgtgtctcctgggtgtagtggatgccagtcttgttgctgtgacaagtaacaaccttttttttaaattgttttttatacaaacactcgcaatccgacatttggtgctaagggtttcctggtgcagacggtgggcctgggggctgggctggaccagggcgtgggtctctggggttggggtcccttgctgctcagggaggcagtactgactgggcactgcctctgcccccagcacccaccctcccccattccccagggagaaggggccccactgggcttggcctgcagtagtagggagacaagttccaggagcactttggggactggggttgcagaacacttcctgtctctggcttcatccttgggccagaaggctccaaccctcagcagcccttgccagatgtgccagggagtgggtgtggagacccggactccccccacccacgcacacctcggcctgatgagaggatggaggctggggcagagatgggcgtgacccagcgtcagagggtcgggggaggcattccttcctgtgtcccagagcttcactggtggagctggaggagccggaggtggagggtggggtctggcagctgctgctggggcagcctcatgaggggaggggaggggaggggaggggagcaggcactgggcgggggcctaggtgcactttgtccttgccaccaatggcgggaggagggtggacctgaacacctgcagggtgtggtgcctgccccagcctctcaggtacttggcccttggggagaagagaagagggtctggtttttgctgggggtgagtttccgggacactcccaaagcccacagataatccctggtgtgggaagaggagtcctggataccttgatgtttagcactttaaccccctttgtctttaaggtaggcgtgggggctactgccagaagtggctgttgggtctgaccccctcctttctgccctccctctgccacatgctggtccgcagagccctcctcccaaggggtggggccctgggtggagctcagcagggtctgcccactccctacgctggcccacataggcctccaggagccctcagtgagagggaccagcatagctgacccccagagtgtggtgggcgccggccctgcccgaggcccagtcggggccctttctgcagatctacctctggctcagcgcacgccccctgccctgagaacaggaaagggcccggaagggctgactcaccgggccgacgctcacacgaaaatgggatgcactttatttgctggtgcaaaggcaggtgagggtgcctcctgtgtgaccgttggccctcctgcctggtggcgctgaagggaaggagccagtgagcctgaccccgggaggggccgtccccgtgtgccgcgtttggcggggccccaggcggctcccccaggcccgggtctggggccccaggctttcccctgcctcgcggccgggcgtcccgtgctttgggtttcttggtttgggttttttaatgccagttctcagtacataagtgcattttgaaagaggttccagctatcacttgtaaccatatatatatacatatatattctatctacaaagtgtttatttgcgagatgtttcaacggtgagttcgggccccgcccgccttgtgaccatctgtccccggtcctcgtccccgccccgcgccctggtcccgagtggcgtggggacgggccatcactgtatgtattaaaatgactgtatcaaataaatgtttattgatttttttccagg

SEQ ID NO: 276512 - protein, 246 aa, Artificial Sequence
  derived and/or modified sequence
MDLLRELKAMPITLHLLQSTRVGMSVNALRKQSSDEEVIALAKSLIKSWKKLLDASDAKARERGRGMPLPTSSRDASEAPDPSRKRPELPRAPSTPRITTFPPVPVTCDAVRNKCREMLTAALQTDHDHVAIGADCERLSAQIEECIFRDVGNTDMKYKNRVRSRISNLKDAKNPDLRRNVLCGAITPQQIAVMTSEEMASDELKEIRKAMTKEAIREHQMARTGGTQTDLFTCGKCRKKNCTYTQ

SEQ ID NO: 276513 - protein, 270 aa, Artificial Sequence
  derived and/or modified sequence
MDLLRELKAMPITLHLLQSTRVGMSVNALRKQSSDEEVIALAKSLIKSWKKLLDASDAKARERGRGMPLPTSSRDASEAPDPSRKRPELPRAPSTPRITTFPPVPVTCDAVRNKCREMLTAALQTDHDHVAIGADCERLSAQIEECIFRDVGNTDMKYKNRVRSRISNLKDAKNPDLRRNVLCGAITPQQIAVMTSEEMASDELKEIRKAMTKEAIREHQMARTGGTQTDLFTCGKCRKKNCTYTQVQTRSSDEPMTTFVVCNECGNRWK

SEQ ID NO: 276514 - protein, 453 aa, Artificial Sequence
  derived and/or modified sequence
MERAPPDGPLNASGALAGEAAAAGGARGFSAAWTAVLAALMALLIVATVLGNALVMLAFVADSSLRTQNNFFLLNLAISDFLVGAFCIPLYVPYVLTGRWTFGRGLCKLWLVVDYLLCTSSAFNIVLISYDRFLSVTRAVSYRAQQGDTRRAVRKMLLVWVLAFLLYGPAILSWEYLSGGSSIPEGHCYAEFFYNWYFLITASTLEFFTPFLSVTFFNLSIYLNIQRRTRLRLDGAREAAGPEPPPEAQPSPPPPPGCWGCWQKGHGEAMPLHRYGVGEAAVGAEAGEATLGGGGGGGSVASPTSSSGSSSRGTERPRSLKRGSKPSASSASLEKRMKMVSQSFTQRFRLSRDRKVAKSLAVIVSIFGLCWAPYTLLMIIRAACHGHCVPDYWYETSFWLLWANSAVNPVLYPLCHHSFRRAFTKLLCPQKLKIQPHSSLEHCWKKMKKKTCL

SEQ ID NO: 276515 - protein, 445 aa, Artificial Sequence
  derived and/or modified sequence
MERAPPDGPLNASGALAGEAAAAGGARGFSAAWTAVLAALMALLIVATVLGNALVMLAFVADSSLRTQNNFFLLNLAISDFLVGAFCIPLYVPYVLTGRWTFGRGLCKLWLVVDYLLCTSSAFNIVLISYDRFLSVTRAVSYRAQQGDTRRAVRKMLLVWVLAFLLYGPAILSWEYLSGGSSIPEGHCYAEFFYNWYFLITASTLEFFTPFLSVTFFNLSIYLNIQRRTRLRLDGAREAAGPEPPPEAQPSPPPPPGCWGCWQKGHGEAMPLHRYGVGEAAVGAEAGEATLGGGGGGGSVASPTSSSGSSSRGTERPRSLKRGSKPSASSASLEKRMKMVSQSFTQRFRLSRDRKVAKSLAVIVSIFGLCWAPYTLLMIIRAACHGHCVPDYWYETSFWLLWANSAVNPVLYPLCHHSFRRAFTKLLCPQKLKIQPHSSLEHCWK

SEQ ID NO: 276516 - protein, 415 aa, Artificial Sequence
  derived and/or modified sequence
MERAPPDGPLNASGALAGEAAAAGGARGFSAAWTAVLAALMALLIVATVLGNALVMLAFVADSSLRTQNNFFLLNLAISDFLVGAFCIPLYVPYVLTGRWTFGRGLCKLWLVVDYLLCTSSAFNIVLISYDRFLSVTRAVSYRAQQGDTRRAVRKMLLVWVLAFLLYGPAILSWEYLSGGSSIPEGHCYAEFFYNWYFLITASTLEFFTPFLSVTFFNLSIYLNIQRRTRLRLKGHGEAMPLHRYGVGEAAVGAEAGEATLGGGGGGGSVASPTSSSGSSSRGTERPRSLKRGSKPSASSASLEKRMKMVSQSFTQRFRLSRDRKVAKSLAVIVSIFGLCWAPYTLLMIIRAACHGHCVPDYWYETSFWLLWANSAVNPVLYPLCHHSFRRAFTKLLCPQKLKIQPHSSLEHCWK

SEQ ID NO: 276517 - DNA, 1362 bp, Artificial Sequence
  derived and/or modified sequence
atggaacgcgcgccccccgatggcccccttaacgcttcaggggccctcgccggtgaagctgcagcagctggtggagcacgcggtttctctgcagcttggactgcagtcctcgccgcgctgatggcactgttgatcgtagccaccgtgcttgggaatgcccttgtgatgctggcatttgtggccgattcttcgcttcgcacacaaaataacttcttcctactgaacctggctattagtgacttcctagtcggcgctttctgtattcccttatatgtcccctacgttctgaccggacgctggacattcgggagagggctttgcaagctgtggctagtggtcgactacttgctgtgtaccagcagcgctttcaacattgtccttatttcctatgatagatttctgagcgtcaccagggcagtgagctaccgagcacagcaaggcgatacaagacgcgccgtccggaagatgctgttggtctgggttctcgccttcctgctgtacgggcctgcaatcttgtcttgggagtacctgagcggcggtagcagcattccagagggccactgctacgcagagtttttttacaactggtattttttgattactgcaagcacactcgagttttttactccttttctgtctgtcactttctttaacctgtccatctacctgaatatccagcgtcgaacccggcttcgactggacggggccagggaggccgcagggccggaacccccacccgaggctcagccctcaccaccccccccgccagggtgctggggatgttggcaaaaaggacacggagaggccatgccactgcataggtatggcgtgggcgaggccgctgttggcgccgaagcgggtgaggccacactcgggggtggaggagggggaggttcagtcgcttccccgacatcatcatccggaagctcatccaggggaaccgaacgcccccgatccttgaagcgtggctcgaaaccgtctgcatcctctgcgagcttagaaaaacggatgaagatggtgagccaatctttcacccagcgctttagactgtctcgggataggaaagtcgccaagtccttggcagtcatagtcagcatttttgggctgtgttgggcaccctacactcttctgatgatcatcagagctgcctgccacgggcattgtgtacctgattactggtatgagacaagtttctggttactctgggctaattcagctgtcaaccctgtgttgtatcctctgtgtcaccattcttttcgccgagctttcaccaagctcctgtgcccccaaaagctgaagattcagccacactcttccttagaacactgttggaaaaagatgaagaagaagacttgcctgtag

SEQ ID NO: 276518 - DNA, 1362 bp, Artificial Sequence
  derived and/or modified sequence
atggagcgggcccccccagatggccccctgaatgccagcggggccctggccggggaggccgctgctgctggaggagcccggggcttctctgctgcctggacagctgtgctggccgccctgatggccctgctgattgtggccaccgtgctgggcaatgccctggtgatgctggcctttgtggccgacagcagcctgcggacccagaacaacttcttcctgctgaacctggccatcagtgacttcctggtgggcgccttctgcatccccctgtatgtgccctacgtgctgaccggccgctggaccttcggccggggcctgtgcaagctgtggctggtggtggactacctgctgtgcaccagcagcgccttcaacatcgtgctgatctcctatgaccgcttcctgtctgtgaccagggctgtgtcctaccgggcccagcagggcgacacccggcgggctgtgaggaagatgctgctggtgtgggtgctggccttcctgctgtatggccctgccatcctgtcctgggagtacctgagcggcggcagcagcatccctgagggccactgctacgccgagttcttctacaactggtacttcctgatcacagccagcaccctggagttcttcacccccttcctgtctgtgaccttcttcaacctgagcatctacctgaacatccagaggaggacccggctgcggctggatggagcccgggaggccgccggccctgagcccccacctgaggcccagcccagccccccacctcctcctggctgctggggctgctggcagaagggccacggggaggccatgcccctgcacagatatggagtgggggaggccgctgtgggcgctgaggccggggaggccaccctgggcggcggcggcggcggcggctctgtggccagccccaccagcagcagcggcagcagcagccggggcacagagcggcccaggagcctgaagaggggcagcaagcccagcgccagcagcgccagcctggagaagaggatgaagatggtgtcccagagcttcacccagcgcttccggctgagccgggacaggaaggtggccaagagcctggccgtgattgtgtccatcttcggcctgtgctgggccccctacaccctgctgatgatcatccgggccgcctgccacggccactgtgtgcctgactactggtatgagaccagcttctggctgctgtgggccaacagcgctgtgaaccctgtgctgtaccccctgtgccaccacagcttccggcgggccttcaccaagctgctgtgcccccagaagctgaagatccagccccacagcagcctggagcactgctggaagaagatgaagaagaagacctgcctgtag

SEQ ID NO: 276519 - DNA, 1362 bp, Artificial Sequence
  derived and/or modified sequence
atggagcgggccccccccgacggccccctgaacgccagcggcgcccttgccggtgaagctgccgccgcaggcggagctaggggcttcagcgccgcctggacggccgtgctggccgcactcatggcgcttctgattgtggccactgtactcggtaacgctttagtaatgctggcctttgtggccgactccagtcttcggacacagaataattttttcctgctcaatcttgccatatctgatttcttggtgggcgcgttttgtatccccctctatgtcccatacgtgctgacaggcaggtggacctttgggagagggctgtgcaaactgtggctggtggtggactatcttctctgtaccagttccgcttttaacatagttttgattagctatgatcgctttttgagtgttacccgcgccgtgtcgtatagagcgcagcagggcgacactaggcgtgctgttaggaaaatgttactcgtttgggtgctcgcttttctcctgtatggacctgcaatcctgtcctgggagtatctgtcaggagggagcagtatcccagaagggcactgttacgccgaattcttttataattggtatttcctgataacagcttccacattggagttctttacaccattcctgtccgtgacattctttaacctcagcatatacttgaacatccagaggcggactcgacttcgactggacggggcccgcgaagctgccggaccggagcctccacccgaagcccagccgagcccgccccccccgcccggttgctgggggtgctggcagaaaggacacggagaggcgatgccattgcacagatatggcgtgggggaggcagccgtgggggcggaggccggtgaggctaccttggggggggggggcggagggggctctgtcgctagccctacctcgtcgtctggttcctcctctcgtggaactgagcgccctcggtcactcaagcggggcagtaagccgagtgctagtagcgcctctctggagaagcgcatgaagatggtgtcccagagctttacacagcggtttcggctgagtcgagatcggaaggtggccaaatcccttgccgttattgtgagtatctttgggctgtgttgggcgccttacacccttctgatgatcatcagagcagcctgccacggacactgtgttcctgactactggtacgaaacttctttctggttattatgggccaatagcgcggtgaaccctgttctgtacccattgtgtcatcattctttcagaagagcattcactaagttactgtgtccacaaaagctgaaaattcagccgcactcttcattggaacactgttggaaaaaaatgaagaagaagacatgtctctag

SEQ ID NO: 276520 - DNA, 1362 bp, Artificial Sequence
  derived and/or modified sequence
atggagcgggctccaccagacgggccactaaatgcgagcggtgccctggccggagaagcggctgcagccggtggtgcacgtggattctctgcagcctggactgcagtgctcgctgcccttatggcacttctcatcgtagctacagtcttagggaacgccctggtgatgttagcatttgtggcggacagctccttgcgcacccagaataactttttcctcctgaatctggccattagcgacttcctggtgggagccttctgcatccccctctacgtgccatacgttctgacaggtagatggacctttggacggggactgtgtaagctttggttagtcgtggattacctcctgtgcacatccagtgcgtttaacattgtactaatctcttacgaccgtttcctttcagtgacaagagccgtttcctaccgggctcaacaaggggatacaagaagggctgtgcggaaaatgcttctggtctgggtgctcgcgtttctgctgtatggccctgctattcttagctgggagtacctttctggcggttcatccattcccgaaggccattgctacgccgagttcttttacaattggtacttcctgattacggcctctacgttggagttctttaccccttttctctcagtcacattcttcaatctgtcaatctacctcaacattcagcgacgtactcggttgcgcctcgatggcgcacgagaggctgctggccctgagcctcctccggaggcccagcccagccctcctccacctcctgggtgctggggatgctggcagaagggccatggagaggcgatgcccctgcatagatacggggttggagaagccgctgtcggagctgaagccggagaagccacattggggggtggtggaggcggaggctcagtcgcttctccaacctcctcttcgggtagctcttccagggggaccgagcgcccaaggtcgctgaaacgcggaagtaaacctagcgcgtcatctgcctcgctggagaaacggatgaagatggtctcacaatcattcacccagagatttagactctctagagacagaaaagtggcgaaatcactggccgttattgtcagtatattcggcctctgttgggctccgtacaccctgctgatgattattagagcagcctgccacgggcattgtgtgccagactattggtatgagacgtccttttggctgctttgggccaattctgctgtcaaccccgtcctgtaccccctttgtcaccattccttcaggagggccttcacaaagctgctgtgtccccaaaagttaaaaatacagccgcatagcagcctggagcattgttggaaaaaaatgaagaaaaagacgtgcttgtag

SEQ ID NO: 276521 - DNA, 1362 bp, Artificial Sequence
  derived and/or modified sequence
atggagagagccccccccgacggccccctgaacgccagcggcgccctggccggcgaggccgccgccgccggcggcgccagaggcttcagcgccgcctggaccgccgtgctggccgccctgatggccctgctgatcgtggccaccgtgctgggcaacgccctggtgatgctggccttcgtggccgacagcagcctgagaacccagaacaacttcttcctgctgaacctggccatcagcgacttcctggtgggcgccttctgcatccccctgtacgtgccctacgtgctgaccggcagatggaccttcggcagaggcctgtgcaagctgtggctggtggtggactacctgctgtgcaccagcagcgccttcaacatcgtgctgatcagctacgacagattcctgagcgtgaccagagccgtgagctacagagcccagcagggcgacaccagaagagccgtgagaaagatgctgctggtgtgggtgctggccttcctgctgtacggccccgccatcctgagctgggagtacctgagcggcggcagcagcatccccgagggccactgctacgccgagttcttctacaactggtacttcctgatcaccgccagcaccctggagttcttcacccccttcctgagcgtgaccttcttcaacctgagcatctacctgaacatccagagaagaaccagactgagactggacggcgccagagaggccgccggccccgagcccccccccgaggcccagcccagccccccccccccccccggctgctggggctgctggcagaagggccacggcgaggccatgcccctgcacagatacggcgtgggcgaggccgccgtgggcgccgaggccggcgaggccaccctgggcggcggcggcggcggcggcagcgtggccagccccaccagcagcagcggcagcagcagcagaggcaccgagagacccagaagcctgaagagaggcagcaagcccagcgccagcagcgccagcctggagaagagaatgaagatggtgagccagagcttcacccagagattcagactgagcagagacagaaaggtggccaagagcctggccgtgatcgtgagcatcttcggcctgtgctgggccccctacaccctgctgatgatcatcagagccgcctgccacggccactgcgtgcccgactactggtacgagaccagcttctggctgctgtgggccaacagcgccgtgaaccccgtgctgtaccccctgtgccaccacagcttcagaagagccttcaccaagctgctgtgcccccagaagctgaagatccagccccacagcagcctggagcactgctggaagaagatgaagaagaagacctgcctgtag

SEQ ID NO: 276522 - DNA, 1659 bp, Artificial Sequence
  derived and/or modified sequence
cgcgttgcgctccggctgcacggtcgcaccggcagcggctcaggctccggctcctctcccgctgcagcagccgcgctgccggccccactgggctcggatccggccccggccccctcggcaccgcctgctctggccccggccccggccccgcggaccatgcgctgggcgcccccaggggaacccgacccggccaagggcccgcaaagacgaggctcccgggccggggcccctcccggccgcccagctctcggccggcgccctgccccgcgtcccggagccgcgtgagcctgcggggccatggagcgcgcgccgcccgacgggccgctgaacgcttcgggggcgctggcgggcgaggcggcggcggcgggcggggcgcgcggcttctcggcagcctggaccgcggtgctggccgcgctcatggcgctgctcatcgtggccacggtgctgggcaacgcgctggtcatgctcgccttcgtggccgactcgagcctccgcacccagaacaacttcttcctgctcaacctcgccatctccgacttcctcgtcggcgccttctgcatcccactgtatgtaccctacgtgctgacaggccgctggaccttcggccggggcctctgcaagctgtggctggtagtggactacctgctgtgcacctcctctgccttcaacatcgtgctcatcagctacgaccgcttcctgtcggtcacccgagcggtctcataccgggcccagcagggtgacacgcggcgggcagtgcggaagatgctgctggtgtgggtgctggccttcctgctgtacggaccagccatcctgagctgggagtacctgtccgggggcagctccatccccgagggccactgctatgccgagttcttctacaactggtacttcctcatcacggcttccaccctggagttctttacgcccttcctcagcgtcaccttctttaacctcagcatctacctgaacatccagaggcgcacccgcctccggctggatggggctcgagaggcagccggccccgagccccctcccgaggcccagccctcaccacccccaccgcctggctgctggggctgctggcagaaggggcacggggaggccatgccgctgcacaggtatggggtgggtgaggcggccgtaggcgctgaggccggggaggcgaccctcgggggtggcggtgggggcggctccgtggcttcacccacctccagctccggcagctcctcgaggggcactgagaggccgcgctcactcaagaggggctccaagccgtcggcgtcctcggcctcgctggagaagcgcatgaagatggtgtcccagagcttcacccagcgctttcggctgtctcgggacaggaaagtggccaagtcgctggccgtcatcgtgagcatctttgggctctgctgggccccatacacgctgctgatgatcatccgggccgcctgccatggccactgcgtccctgactactggtacgaaacctccttctggctcctgtgggccaactcggctgtcaaccctgtcctctaccctctgtgccaccacagcttccgccgggccttcaccaagctgctctgcccccagaagctcaaaatccagccccacagctccctggagcactgctggaaaaagatgaagaagaaaacatgtctgtga

SEQ ID NO: 276523 - DNA, 153 bp, Artificial Sequence
  derived and/or modified sequence
aagacaggcctgaccggcagccccagcagcctgtgggacctgctgcgggagatgtttgtggtgtgcagcaaggagcagctgcagagcggcggcaagtacagccaccaggtgtgggcccccttcagccccctggccagcggggccgccttctag

SEQ ID NO: 276524 - DNA, 153 bp, Artificial Sequence
  derived and/or modified sequence
aagaccggcctgaccggcagccccagcagcctgtgggacctgctgagggagatgttcgtggtatgctctaaggaacagctgcagagcggaggtaagtacagtcatcaggtgtgggccccattttcgcccttagcctctggtgcggcattctag

SEQ ID NO: 276525 - protein, 279 aa, Artificial Sequence
  derived and/or modified sequence
MSRPKNQNYKGHGLSKGKEREQRASIRFKTTLMNTLMDVLRHRPGWVEVKDEGEWDFYWCDVSWLRENFDHTYMDEHVRISHFRNHYELTRKNYMVKNLKRFRKQLEREAGKLEAAKCDFFPKTFEMPCEYHLFVEEFRKNPGITWIMKPVARSQGKGIFLFRRLKDIVDWRKDTRSSDDQKDDIPVENYVAQRYIENPYLIGGRKFDLRVYVLVMSMFTSPTWLCKKHLPTTTQRRAASGRCSASGSTWRPNTGPRQWRHSSGTSTTSLSKACRVCRR

SEQ ID NO: 276526 - DNA, 840 bp, Artificial Sequence
  derived and/or modified sequence
atgagcagacccaagaaccagaactacaagggccacggcctgagcaagggcaaggagagagagcagagagccagcatcagattcaagaccaccctgatgaacaccctgatggacgtgctgagacacagacccggctgggtggaggtgaaggacgagggcgagtgggacttctactggtgcgacgtgagctggctgagagagaacttcgaccacacctacatggacgagcacgtgagaatcagccacttcagaaaccactacgagctgaccagaaagaactacatggtgaagaacctgaagagattcagaaagcagctggagagagaggccggcaagctggaggccgccaagtgcgacttcttccccaagaccttcgagatgccctgcgagtaccacctgttcgtggaggagttcagaaagaaccccggcatcacctggatcatgaagcccgtggccagaagccagggcaagggcatcttcctgttcagaagactgaaggacatcgtggactggagaaaggacaccagaagcagcgacgaccagaaggacgacatccccgtggagaactacgtggcccagagatacatcgagaacccctacctgatcggcggcagaaagttcgacctgagagtgtacgtgctggtgatgagcatgttcaccagccccacctggctgtgcaagaagcacctgcccaccaccacccagagaagagccgccagcggcagatgcagcgccagcggcagcacctggagacccaacaccggccccagacagtggagacacagcagcggcaccagcaccaccagcctgagcaaggcctgcagagtgtgcagaagatag

SEQ ID NO: 276527 - DNA, 840 bp, Artificial Sequence
  derived and/or modified sequence
atgtctcgtcctaagaaccagaattacaagggacatggtctatctaaagggaaagagcgcgagcagcgggccagtattaggttcaagacaacgcttatgaatactctgatggatgtgctgcgccacagacctggctgggttgaggtgaaggacgaaggggagtgggatttctattggtgcgacgtcagttggctgagggaaaactttgaccacacctatatggacgaacatgtcagaatctcccactttcgcaaccactatgaactgactcggaaaaactacatggttaagaacctcaaacggttccggaagcagttggagcgggaggctgggaagttagaggctgccaagtgtgatttcttccctaagacttttgagatgccttgtgagtaccatttgttcgtcgaggagtttagaaaaaatccagggatcacctggatcatgaaacctgtcgcccgttcgcagggtaagggaatctttctcttccgccgccttaaggatatcgtcgactggcgcaaagacacacggtcctccgatgatcaaaaggacgacattcctgtggagaactacgtagcccagaggtatattgaaaacccttacctgataggtggccgaaaatttgacctgagggtttatgtcctagtgatgtccatgttcacctcccctacctggttgtgcaagaaacatctcccaacaactacacaaaggcgggcggcctccggccggtgctcggctagtggcagtacctggcgtcctaacacaggacctcgacagtggcggcacagttctggcacgtcaacaacatcattaagcaaggcctgccgtgtgtgcaggaggtag

SEQ ID NO: 276528 - DNA, 840 bp, Artificial Sequence
  derived and/or modified sequence
atgagccggcccaagaaccagaactacaagggccacggcctgagcaagggcaaggagcgggagcagagggccagcatccgcttcaagaccaccctgatgaacaccctgatggatgtgctgcggcaccggcccggctgggtggaggtgaaggatgaaggagagtgggacttctactggtgtgatgtgtcctggctgagagaaaattttgaccacacctacatggatgaacatgtgcgcatcagccacttcaggaaccactatgagctgaccaggaagaactacatggtgaagaacctgaagcgcttcaggaagcagctggagcgggaggccggcaagctggaggccgccaagtgtgacttcttccccaagacctttgagatgccctgtgagtaccacctgtttgtggaggagttcaggaagaaccctggcatcacctggatcatgaagcctgtggcccggagccagggcaagggcatcttcctgttccggcggctgaaggacatcgtggactggaggaaggacaccaggagcagtgatgaccagaaggatgacatccctgtggagaactacgtggcccagcgctacatcgagaacccctacctgattggaggcaggaagtttgacctgcgggtgtatgtgctggtgatgtccatgttcaccagccccacctggctgtgcaagaagcacctgcccaccaccacccagaggcgggccgccagcggccgctgcagcgccagcggcagcacctggaggcccaacacaggcccccggcagtggaggcacagcagcggcaccagcaccaccagcctgagcaaggcctgccgggtgtgcagaagatag

SEQ ID NO: 276529 - DNA, 840 bp, Artificial Sequence
  derived and/or modified sequence
atgagccggcccaagaaccagaactacaagggccacggcctgagcaaaggaaaagagcgggagcagcgggcatcaataagattcaaaacaacacttatgaacaccctgatggatgtcttaagacatcgaccgggctgggtggaggtgaaggatgagggcgaatgggatttttattggtgcgacgtgtcttggctccgcgagaattttgatcacacatacatggatgagcacgtgaggatttctcattttaggaatcattatgaacttacccgcaagaactatatggtgaagaatctcaaacgatttcgtaagcagctggagcgtgaggctgggaaactggaagcggctaaatgcgactttttccctaaaacctttgaaatgccctgcgagtaccacctattcgtggaggagttcagaaagaacccaggcattacgtggataatgaagccggttgcccggtcccagggaaaaggaatttttctcttccgccgcctaaaggacatagtggactggcgaaaggacacccgtagctcagacgaccaaaaagacgacatccccgtggagaattacgtcgcccaacgttatattgaaaacccctacttgatcggaggccgaaaatttgatctccgcgtatacgtcctggtgatgagcatgttcacgtcaccaacctggctgtgcaaaaagcatttgcctaccacaactcagaggagagcggcttctggaaggtgctcagcttctggctccacctggagacctaatacggggcccaggcagtggcgacattcttccggaacatcaactacttctctgagcaaagcctgccgtgtgtgccgacgatag

SEQ ID NO: 276530 - DNA, 840 bp, Artificial Sequence
  derived and/or modified sequence
atgtctagaccaaagaaccagaattataagggtcatggtctgagtaaaggaaaggaacgcgagcagcgagcaagcattaggttcaagaccacactcatgaacacgttaatggacgttttgcgccacagaccaggatgggtggaagttaaggacgagggtgaatgggatttttattggtgtgatgtcagctggctgagagaaaactttgaccatacctatatggatgagcacgtcaggatctcccacttccgcaaccactacgagctgacccgaaaaaactacatggttaagaacctcaaacgcttccgcaaacagctggagcgcgaagcgggaaagctagaagcagccaagtgcgacttctttcccaagactttcgaaatgccgtgcgagtatcacctgtttgtcgaagagtttaggaagaaccccggaatcacttggatcatgaaacccgtggctcgtagccagggaaagggtatcttcctgtttcggaggctcaaggatatcgtggactggcggaaggacacacggtcttccgacgaccagaaagacgacatccccgtggaaaactatgtggcgcagcgctatattgaaaacccctacctcattggcggacgtaaattcgatctgcgcgtgtatgttctagtgatgtctatgttcacatcacctacttggttgtgtaagaagcatcttccaacaacaacacagcgccgagccgctagcgggcgatgttctgcttccggctccacctggcgacccaatactggtcctagacagtggagacatagcagcgggacaagcacaactagcttgagtaaggcctgtagagtgtgtcgtaggtag

SEQ ID NO: 276531 - protein, 1241 aa, Artificial Sequence
  derived and/or modified sequence
MVFLEEFEARSCLAEEEIKTEQEVVEGMDISTRSKDPGSAERTAQKRKFPSPPHSSNGHSPQDTSTSPIKKKKKPGLLNSNNKEQSELRHGPFYYMKQPLTTDPVDVVPQDGRNDFYCWVCHREGQVLCCELCPRVYHAKCLRLTSEPEGDWFCPECEKITVAECIETQSKAMTMLTIEQLSYLLKFAIQKMKQPGTDAFQKPVPLEQHPDYAEYIFHPMDLCTLEKNAKKKMYGCTEAFLADAKWILHNCIIYNGGNHKLTQIAKVVIKICEHEMNEIEVCPECYLAACQKRDNWFCEPCSNPHPLVWAKLKGFPFWPAKALRDKDGQVDARFFGQHDRAWVPINNCYLMSKEIPFSVKKTKSIFNSAMQEMEVYVENIRRKFGVFNYSPFRTPYTPNSQYQMLLDPTNPSAGTAKIDKQEKVKLNFDMTASPKILMSKPVLSGGTGRRISLSDMPRSPMSTNSSVHTGSDVEQDAEKKATSSHFSASEESMDFLDKSTASPASTKTGQAGSLSGSPKPFSPQLSAPITTKTDKTSTTGSILNLNLDRSKAEMDLKELSESVQQQSTPVPLISPKRQIRSRFQLNLDKTIESCKAQLGINEISEDVYTAVEHSDSEDSEKSDSSDSEYISDDEQKSKNEPEDTEDKEGCQMDKEPSAVKKKPKPTNPVEIKEELKSTSPASEKADPGAVKDKASPEPEKDFSEKAKPSPHPIKDKLKGKDETDSPTVHLGLDSDSESELVIDLGEDHSGREGRKNKKEPKEPSPKQDVVGKTPPSTTVGSHSPPETPVLTRSSAQTSAAGATATTSTSSTVTVTAPAPAATGSPVKKQRPLLPKETAPAVQRVVWNSSSKFQTSSQKWHMQKMQRQQQQQQQQNQQQQPQSSQGTRYQTRQAVKAVQQKEITQSPSTSTITLVTSTQSSPLVTSSGSMSTLVSSVNADLPIATASADVAADIAKYTSKMMDAIKGTMTEIYNDLSKNTTGSTIAEIRRLRIEIEKLQWLHQQELSEMKHNLELTMAEMRQSLEQERDRLIAEVKKQLELEKQQAVDETKKKQWCANCKKEAIFYCCWNTSYCDYPCQQAHWPEHMKSCTQSATAPQQEADAEVNTETLNKSSQGSSSSTQSAPSETASASKEKETSAEKSKESGSTLDLSGSRETPSSILLGSNQGSVSKRCDKQPAYAPTTTDHQPHPNYPAQKYHSRSNKSSWSSSDEKRGSTRSDHNTSTSTKSLLPKESRLDTFWD

SEQ ID NO: 276532 - DNA, 88 bp, Artificial Sequence
  derived and/or modified sequence
gaagaaagcattcattcaagacatctaactcgttgatataatgcatacagttcaaaatgattacactatcattacatctagggctttc

SEQ ID NO: 276533 - DNA, 3726 bp, Artificial Sequence
  derived and/or modified sequence
atggtgttcctggaggagttcgaggccagaagctgcctggccgaggaggagatcaagaccgagcaggaggtggtggagggcatggacatcagcaccagaagcaaggaccccggcagcgccgagagaaccgcccagaagagaaagttccccagccccccccacagcagcaacggccacagcccccaggacaccagcaccagccccatcaagaagaagaagaagcccggcctgctgaacagcaacaacaaggagcagagcgagctgagacacggccccttctactacatgaagcagcccctgaccaccgaccccgtggacgtggtgccccaggacggcagaaacgacttctactgctgggtgtgccacagagagggccaggtgctgtgctgcgagctgtgccccagagtgtaccacgccaagtgcctgagactgaccagcgagcccgagggcgactggttctgccccgagtgcgagaagatcaccgtggccgagtgcatcgagacccagagcaaggccatgaccatgctgaccatcgagcagctgagctacctgctgaagttcgccatccagaagatgaagcagcccggcaccgacgccttccagaagcccgtgcccctggagcagcaccccgactacgccgagtacatcttccaccccatggacctgtgcaccctggagaagaacgccaagaagaagatgtacggctgcaccgaggccttcctggccgacgccaagtggatcctgcacaactgcatcatctacaacggcggcaaccacaagctgacccagatcgccaaggtggtgatcaagatctgcgagcacgagatgaacgagatcgaggtgtgccccgagtgctacctggccgcctgccagaagagagacaactggttctgcgagccctgcagcaacccccaccccctggtgtgggccaagctgaagggcttccccttctggcccgccaaggccctgagagacaaggacggccaggtggacgccagattcttcggccagcacgacagagcctgggtgcccatcaacaactgctacctgatgagcaaggagatccccttcagcgtgaagaagaccaagagcatcttcaacagcgccatgcaggagatggaggtgtacgtggagaacatcagaagaaagttcggcgtgttcaactacagccccttcagaaccccctacacccccaacagccagtaccagatgctgctggaccccaccaaccccagcgccggcaccgccaagatcgacaagcaggagaaggtgaagctgaacttcgacatgaccgccagccccaagatcctgatgagcaagcccgtgctgagcggcggcaccggcagaagaatcagcctgagcgacatgcccagaagccccatgagcaccaacagcagcgtgcacaccggcagcgacgtggagcaggacgccgagaagaaggccaccagcagccacttcagcgccagcgaggagagcatggacttcctggacaagagcaccgccagccccgccagcaccaagaccggccaggccggcagcctgagcggcagccccaagcccttcagcccccagctgagcgcccccatcaccaccaagaccgacaagaccagcaccaccggcagcatcctgaacctgaacctggacagaagcaaggccgagatggacctgaaggagctgagcgagagcgtgcagcagcagagcacccccgtgcccctgatcagccccaagagacagatcagaagcagattccagctgaacctggacaagaccatcgagagctgcaaggcccagctgggcatcaacgagatcagcgaggacgtgtacaccgccgtggagcacagcgacagcgaggacagcgagaagagcgacagcagcgacagcgagtacatcagcgacgacgagcagaagagcaagaacgagcccgaggacaccgaggacaaggagggctgccagatggacaaggagcccagcgccgtgaagaagaagcccaagcccaccaaccccgtggagatcaaggaggagctgaagagcaccagccccgccagcgagaaggccgaccccggcgccgtgaaggacaaggccagccccgagcccgagaaggacttcagcgagaaggccaagcccagcccccaccccatcaaggacaagctgaagggcaaggacgagaccgacagccccaccgtgcacctgggcctggacagcgacagcgagagcgagctggtgatcgacctgggcgaggaccacagcggcagagagggcagaaagaacaagaaggagcccaaggagcccagccccaagcaggacgtggtgggcaagaccccccccagcaccaccgtgggcagccacagcccccccgagacccccgtgctgaccagaagcagcgcccagaccagcgccgccggcgccaccgccaccaccagcaccagcagcaccgtgaccgtgaccgcccccgcccccgccgccaccggcagccccgtgaagaagcagagacccctgctgcccaaggagaccgcccccgccgtgcagagagtggtgtggaacagcagcagcaagttccagaccagcagccagaagtggcacatgcagaagatgcagagacagcagcagcagcagcagcagcagaaccagcagcagcagccccagagcagccagggcaccagataccagaccagacaggccgtgaaggccgtgcagcagaaggagatcacccagagccccagcaccagcaccatcaccctggtgaccagcacccagagcagccccctggtgaccagcagcggcagcatgagcaccctggtgagcagcgtgaacgccgacctgcccatcgccaccgccagcgccgacgtggccgccgacatcgccaagtacaccagcaagatgatggacgccatcaagggcaccatgaccgagatctacaacgacctgagcaagaacaccaccggcagcaccatcgccgagatcagaagactgagaatcgagatcgagaagctgcagtggctgcaccagcaggagctgagcgagatgaagcacaacctggagctgaccatggccgagatgagacagagcctggagcaggagagagacagactgatcgccgaggtgaagaagcagctggagctggagaagcagcaggccgtggacgagaccaagaagaagcagtggtgcgccaactgcaagaaggaggccatcttctactgctgctggaacaccagctactgcgactacccctgccagcaggcccactggcccgagcacatgaagagctgcacccagagcgccaccgccccccagcaggaggccgacgccgaggtgaacaccgagaccctgaacaagagcagccagggcagcagcagcagcacccagagcgcccccagcgagaccgccagcgccagcaaggagaaggagaccagcgccgagaagagcaaggagagcggcagcaccctggacctgagcggcagcagagagacccccagcagcatcctgctgggcagcaaccagggcagcgtgagcaagagatgcgacaagcagcccgcctacgcccccaccaccaccgaccaccagccccaccccaactaccccgcccagaagtaccacagcagaagcaacaagagcagctggagcagcagcgacgagaagagaggcagcaccagaagcgaccacaacaccagcaccagcaccaagagcctgctgcccaaggagagcagactggacaccttctgggactag

SEQ ID NO: 276534 - DNA, 3726 bp, Artificial Sequence
  derived and/or modified sequence
atggtttttctggaagagtttgaggctcgatcttgtctcgccgaggaagaaattaagaccgaacaagaggtggtagaaggcatggatatatctacaagaagtaaagacccgggcagcgccgagagaaccgctcagaaacggaagttcccttccccaccccactcctccaacggacattcacctcaggatacatcaacgtctccgatcaagaaaaagaaaaagccgggcctcctaaactccaacaacaaagagcaatcggagttaagacatggccccttttactacatgaagcagcccctgacaacggatcccgttgacgtggtgccacaggacggaagaaacgacttttattgctgggtgtgccatcgggaggggcaagtcctttgctgcgaactctgtccccgggtatatcacgctaaatgcctgagattgacatctgaaccagagggggactggttctgtccagagtgcgagaagataaccgtggcagagtgtatcgaaacacagtcaaaggccatgacgatgctgaccatcgaacagctcagctacctgttgaagttcgccatccagaagatgaagcaaccgggcactgacgcttttcaaaaacctgtcccccttgagcaacatcccgactatgcagaatatatattccatcccatggatctctgcaccttggaaaagaacgctaagaaaaaaatgtatggctgcaccgaggccttcctggccgatgccaaatggatactccacaattgtataatttataacgggggtaatcataagctaacacaaattgcaaaagtagtgattaagatttgtgaacatgagatgaatgaaattgaagtgtgtcccgagtgctacttggcggcctgtcagaagagggacaactggttttgtgagccttgcagcaaccctcacccattggtgtgggcaaagctgaaggggttccctttttggccagccaaggccctgagggataaagacgggcaggtggacgcccgcttctttggccagcacgatcgagcatgggtcccaattaacaattgttacctgatgtcgaaggaaatccccttttccgttaaaaagacaaagtcaatcttcaactctgccatgcaggagatggaagtgtacgttgaaaatataaggagaaaattcggcgtgttcaattattctcccttcaggacaccctatacccccaactcgcagtatcagatgttacttgaccctacaaatccttccgccggaactgcaaaaatcgataaacaggagaaagtgaagctgaacttcgacatgacagccagccccaagatactcatgagtaagccagtcttatccggtggaactggtagacggataagtctgagcgacatgccgagaagccccatgtctacaaactcatcagtgcacaccggcagtgatgtggaacaggacgcagaaaagaaggcaacttcgagccatttctcagcctccgaggagagtatggacttccttgataagagtacagcgagccccgcgtctacgaaaaccggccaggccggctcattgagcgggtcaccgaagcccttctctccccagctgtccgccccaattactaccaagacagacaagacctctactacgggctcgattttaaacctgaacttagaccgctcaaaggcagagatggatctcaaggagctttccgagtccgtccagcagcaatctacccccgttcccctgatctcacccaaacggcaaatccgttccaggtttcaattgaatttagataaaactatcgagagctgcaaagcccagctcggaattaatgagatcagcgaagatgtgtatactgccgtggagcacagcgactccgaagatagcgagaagagtgactcttcagatagcgagtatatttctgacgacgagcagaagtcgaaaaacgaaccagaggatacagaagataaggaaggatgtcagatggataaagaacccagcgcggtgaaaaaaaagcccaagccaacaaacccggttgaaatcaaagaggaattaaaatccaccagccccgcaagtgagaaggctgatcctggtgctgttaaggataaggcaagtcccgaaccggaaaaagactttagcgagaaagctaagccaagcccgcaccccatcaaggacaagctcaaaggtaaagacgagacggactccccaacagttcacctgggactcgatagtgactccgagagcgagctggtgatcgatttaggtgaggatcattcagggcgagaggggcgcaaaaataaaaaagagccgaaagaaccttcgcccaaacaggacgtggtcggtaagaccccgcccagcactacagtgggtagtcacagcccgcccgagactccagtcctcacacggtcttctgcccagacgtcagcggctggagccaccgcaacaacatccaccagttcaacagtgacagtcactgcccccgcccccgcagccacaggctccccggttaaaaagcagcgccccctgctccctaaagaaaccgctccagccgtgcagagggtcgtctggaactcttcttctaagttccagacatcttctcaaaaatggcatatgcagaaaatgcagaggcagcaacaacagcagcagcaacagaaccagcagcagcaacctcagtcatcccaagggactcgctatcagacaagacaggctgtgaaggccgtccagcagaaggaaatcacgcaaagcccctccactagtaccataactttggtcacgtctacacagtcgagccctctggtgacctcctcggggtcaatgtccactcttgtgtcgtcagttaatgctgatctgcctattgcaactgccagtgcggacgttgccgctgacattgctaaatacactagcaagatgatggatgcaattaagggcaccatgactgaaatttacaatgatctgtctaagaataccactggttccaccattgcagaaattcgccggctccgtattgagatagagaagctgcagtggcttcatcagcaagaattgtccgagatgaagcacaatttagagctaacgatggcagaaatgcgacaatcactcgaacaggagagggatcgactcatcgctgaagtgaaaaagcaactcgagttggagaaacagcaggcggtagacgaaaccaagaaaaaacagtggtgcgctaactgcaagaaagaggctattttttactgctgttggaacacatcatactgcgattacccttgtcagcaagctcactggccagaacatatgaaatcttgtactcagagcgcaacagcaccccaacaggaagcggatgccgaagtcaataccgagactctgaataagtcctctcaggggagcagttctagcacccaatcggcccctagtgagacagcttcagcctctaaggagaaggagacatcagctgaaaagagtaaggaatcagggagcacattagatcttagtgggagcagggaaaccccatcttcaatactgctcgggagcaaccagggcagcgtcagtaagagatgcgacaagcagccggcctacgctcccacaacaactgatcatcaacctcaccctaattaccctgctcagaagtatcatagcaggagcaacaaatcctcatggtctagttctgatgagaagcgaggctccacaagaagcgatcacaatacttcaacttccactaagtcattgctgccaaaggaaagcagactagatacattttgggattag

SEQ ID NO: 276535 - DNA, 3726 bp, Artificial Sequence
  derived and/or modified sequence
atggtgttcctggaggagtttgaggcccggagctgcctggccgaggaggagatcaagacagagcaggaggtggtggagggcatggacatcagcaccaggagcaaggaccccggcagcgctgagaggacagcccagaagaggaagttccccagccccccccacagcagcaatggccacagcccccaggacaccagcaccagccccatcaagaagaagaagaagccaggcctgctgaacagcaacaacaaggagcagagcgagctgcggcacggccccttctactacatgaagcagcccctgaccacagatcctgtggatgtggtgccccaggatggaagaaatgacttctactgctgggtgtgccaccgggagggccaggtgctgtgctgtgagctgtgcccccgggtgtaccacgccaagtgcctgcggctgaccagcgagcctgagggggactggttctgcccagaatgtgagaagatcaccgtggccgagtgcatcgagacccagagcaaggccatgaccatgctgaccatcgagcagctgagctacctgctgaagtttgccatccagaagatgaagcagcctggaacagatgccttccagaagcctgtgcccctggagcagcacccagactatgcagagtacatcttccaccccatggacctgtgcaccctggagaagaatgccaagaagaagatgtatggctgcacagaggccttcctggctgatgccaagtggatcctgcacaactgcatcatctacaatggaggcaaccacaagctgacccagatcgccaaggtggtgatcaagatctgtgagcacgagatgaatgaaattgaggtgtgcccagagtgctacctggccgcctgccagaagagggacaactggttctgtgagccctgcagcaacccccaccccctggtgtgggccaagctgaagggcttccccttctggccagccaaggccctgcgggacaaggatggccaggtggatgcccgcttcttcggccagcacgaccgggcctgggtgcccatcaacaactgctacctgatgagcaaggagatccccttctctgtgaagaagaccaagagcatcttcaacagcgccatgcaggagatggaggtgtatgtggagaacatccggaggaagtttggagtcttcaactacagccccttccgcaccccctacacccccaacagccagtaccagatgctgctggaccccaccaaccccagcgctggaacagccaagattgacaagcaggagaaggtgaagctgaactttgacatgacagccagccccaagatcctgatgagcaagcctgtgctgagcggcggcactggaagacgcatcagcctgagtgacatgcccaggagccccatgagcaccaacagctctgtgcacactggaagtgatgtggagcaggatgctgagaagaaggccaccagcagccacttcagcgccagcgaggagagcatggacttcctggacaagagcacagccagccctgccagcaccaagacaggccaggccggcagcctgagcggcagccccaagcccttcagcccccagctgagcgcccccatcaccaccaagacagacaagaccagcaccaccggcagcatcctgaacctgaacctggacaggagcaaggccgagatggacctgaaggagctgtctgagagcgtgcagcagcagagcacccctgtgcccctcatcagccccaagaggcagatccgcagccgcttccagctgaacctggacaagaccatcgagagctgcaaggcccagctgggcatcaatgagatcagtgaagatgtgtacacagctgtggagcacagcgacagtgaagattctgagaagagtgacagcagtgacagcgagtacatcagtgatgatgagcagaagagcaagaatgaacctgaggacacagaggacaaggagggctgccagatggacaaggagcccagcgctgtgaagaagaagcccaagcccaccaaccctgtggagatcaaggaggagctgaagagcaccagccctgccagcgagaaggctgaccctggagctgtgaaggacaaggccagccctgagcctgagaaggacttcagcgagaaggccaagcccagcccccaccccatcaaggacaagctgaagggcaaggatgaaacagacagccccaccgtgcacctgggcctggacagcgacagcgagagcgagctggtgattgacctgggggaggaccacagcggccgggagggcaggaagaacaagaaggagcccaaggagcccagccccaagcaggatgtggtgggcaagaccccacccagcaccaccgtgggcagccacagccccccagagacccctgtgctgaccaggagcagcgcccagaccagcgctgctggggccacagccaccaccagcaccagcagcacagtgacagtgacagccccagccccagctgccaccggcagccctgtgaagaagcagaggcccctgctgcccaaggagacagccccagctgtgcagagggtggtgtggaacagcagcagcaagttccagaccagcagccagaagtggcacatgcagaagatgcagaggcagcagcagcagcagcagcagcagaaccagcagcagcagccccagagcagccagggcacccgctaccagacccggcaggccgtgaaggctgtgcagcagaaggagatcacccagagccccagcaccagcaccatcaccctggtgaccagcacccagagcagccccctggtgaccagcagcggctccatgagcaccctggtgtcctctgtgaatgctgacctgcccatcgccacagccagcgcagatgtggccgctgacatcgccaagtacaccagcaagatgatggatgccatcaagggcaccatgacagagatctacaatgacctgagcaagaacaccaccggcagcaccatcgccgagatccggcggctgcgcatcgagattgagaagctgcagtggctgcaccagcaggagctgtctgagatgaagcacaacctggagctgaccatggccgagatgaggcagagcctggagcaggagcgggaccggctgattgctgaggtgaagaagcagctggagctggagaagcagcaggccgtggatgagaccaagaagaagcagtggtgtgccaactgcaagaaggaggccatcttctactgctgctggaacaccagctactgtgactacccctgccagcaggcccactggccagagcacatgaagagctgcacccagagcgccacagccccccagcaggaggctgatgctgaggtgaacacagagaccctgaacaagagcagccagggcagcagcagcagcacccagagcgcccccagcgagacagccagcgccagcaaggagaaggagaccagcgctgagaagagcaaggagagcggcagcaccctggacctgagcggcagccgggagacccccagcagcatcctgctgggcagcaaccagggctctgtgtccaagagatgtgacaagcagcctgcctatgcccccaccaccacagaccaccagccccaccccaactacccagcccagaagtaccacagccgcagcaacaagagctcctggagcagcagtgatgagaagaggggcagcaccaggagtgaccacaacaccagcaccagcaccaagagcctgctgcccaaggagagccggctggacaccttctgggactag

SEQ ID NO: 276536 - DNA, 3726 bp, Artificial Sequence
  derived and/or modified sequence
atggtgttcctggaggagttcgaggcccggagctgcctggccgaggaggaaatcaagaccgaacaggaggtcgtcgaaggcatggatattagcacacgctctaaggatcccggcagtgctgagagaactgcccagaagagaaaatttccgtccccccctcattcatccaatggacatagccctcaggatacctctacaagtcccataaaaaagaagaaaaaaccagggttgctcaattcaaataataaggaacagtcggagctccgccacggaccgttctattatatgaaacagcctctcactaccgatcccgttgacgtggttccccaggatggccgaaatgatttctattgttgggtgtgtcatcgggaggggcaagtgctttgctgtgagctgtgtccccgtgtttatcatgctaagtgcctcagactaactagtgagcctgaaggcgactggttttgtccggagtgcgagaaaattactgtggctgagtgtatcgaaacacagtctaaagctatgaccatgcttactattgaacagctgtcctacctattgaagttcgcgatccagaagatgaagcagcccggtacagatgcgttccagaaacctgtgccgcttgaacaacatcctgactacgccgaatatatcttccatcccatggacctctgtacactggagaagaatgcaaagaagaaaatgtacggatgcacggaagcctttctggcagacgctaagtggatcctccacaactgcattatatataatggcggaaatcataaactgacccagatcgcgaaggtggtgatcaaaatctgcgagcacgagatgaatgagatagaagtatgccccgaatgctacctcgcagcatgccagaagcgggataactggttctgcgagccttgcagcaaccctcaccctctcgtctgggccaaactcaaaggatttcctttctggcccgccaaggctctgagggacaaggatggtcaggttgatgcccgattttttggccagcatgacagggcttgggtgcctatcaataactgctatttaatgagcaaagagatccctttttccgttaagaaaaccaagtcaatttttaatagtgctatgcaggaaatggaggtgtatgtagaaaacatccgtcgaaagtttggggtgttcaactattcgccattccgcaccccatacacgcccaatagccagtaccagatgctcctcgaccctactaacccgtccgccgggaccgcaaaaatcgacaagcaggagaaagttaagctcaacttcgacatgacggcttcgcccaaaatcctgatgtcaaaaccagtactgagtggcggaacagggagacggatcagcttgtccgacatgccacgtagcccaatgtcaactaatagcagcgtgcacaccggctctgacgttgagcaggatgccgaaaaaaaagctacatcgtcgcacttcagcgcaagtgaagaatcaatggatttcctggataagagcacagcctcccccgcttctacaaagacagggcaggcagggagcctgagcggttctcccaagccgttctctcctcagctgagcgcaccaataacgaccaagactgacaagacctctactacaggctccatcctaaatctgaatctggataggtccaaggcagagatggacctgaaagaattgtccgagtcagttcagcagcagtctacccccgtcccactgatttctcccaaaaggcagatacgtagtcgcttccagctaaacctcgataagacgatagagtcatgtaaagcccagctgggtattaatgagatctccgaagatgtctatacagcagtcgagcacagtgattctgaagactccgaaaaaagtgactcaagcgatagcgaatatattagcgatgacgaacagaagtcaaagaatgaaccagaagatacggaggacaaagaggggtgccagatggataaagagccctcagccgtgaagaaaaagcccaagccaaccaaccccgttgagatcaaagaggagctgaagagcaccagcccggcctcggagaaggctgatcctggggctgttaaggataaagcaagtcccgagcctgagaaggacttctctgaaaaggcaaagcccagtccccatcccatcaaagacaagctgaaaggcaaggatgaaacagattcgccaaccgtacatctcggacttgacagtgattcggagtctgagttagttattgacctaggtgaagaccactcggggcgggagggcaggaagaacaaaaaggagcccaaggagccatcacctaaacaggacgttgtgggaaagaccccccccagcacaactgtgggttcacattctcctcccgaaacacctgttttgacccggtcaagcgctcagaccagcgccgcaggagccaccgctacaacaagtacaagtagcacagtcaccgtcacagcccctgccccggcagcaaccggatcccccgtgaagaagcagaggccactgctccctaaagaaaccgctcccgctgtgcagcgggtggtctggaacagcagtagcaagttccagacaagctcccagaaatggcacatgcaaaaaatgcaaagacagcagcaacagcagcagcaacaaaatcagcagcagcagccgcagtcgtctcagggtacgcggtatcaaacaaggcaggctgtcaaggccgtgcagcaaaaggagattacacagagcccctctacttctactattacactcgtgacttctactcagtccagcccgctggtgacatcctcggggagtatgagtactctcgttagttctgtgaatgcagatcttccgattgctaccgcgagcgcagacgtggcggcagatatcgcgaaatatacgtcaaaaatgatggacgccattaagggcacgatgaccgagatatacaatgacctgagtaaaaacacaacagggtccaccatcgcagaaatccgcagattgagaatcgagattgaaaaactgcagtggctgcatcagcaggagttgagcgagatgaaacacaatctggagctcacaatggctgagatgcgccagagcctagaacaggaaagagatagactgatagccgaggtcaagaagcagttagagctcgagaaacagcaggccgtggatgaaaccaagaaaaagcagtggtgcgctaattgcaagaaggaagctatcttctattgctgttggaacacctcctactgtgactatccctgccagcaggcacactggccagagcatatgaagtcttgtacccagagcgctaccgctcctcagcaggaagcggatgctgaagtgaatactgagactctaaataaatcaagtcagggtagttccagtagtacccagagcgctcccagtgagacagcctccgcaagcaaagaaaaagagactagtgctgagaagagtaaagaatcgggctccactctcgacctgtcgggcagtagagagactcctagttccatcctacttggcagcaaccagggtagcgttagcaagagatgcgataagcagcctgcatacgcgccgactacaactgatcaccagccacacccaaattatcccgcccagaagtaccactcccgcagtaataagtcctcatggtcgtctagcgacgagaaacgagggtcaactcggagtgatcacaacacatccacgtctacaaagagtctgctgcccaaagagtctcgcctggatacattttgggactag

SEQ ID NO: 276537 - DNA, 3726 bp, Artificial Sequence
  derived and/or modified sequence
atggtttttctcgaggagtttgaagcgaggtcctgtctcgcagaagaggagattaaaaccgagcaggaggtcgtggaggggatggatatttccaccagatctaaggacccgggatcagctgaaagaaccgcgcagaagcgaaagtttccgagtcctccacatagcagcaacggacattctccgcaggatacatcaacgtcccccataaaaaagaagaaaaagccagggttgctgaatagcaacaacaaagagcaatccgagctgcggcatggccctttttactatatgaagcaaccactgaccacagatcccgtggatgtcgtcccccaggacgggaggaacgatttctactgctgggtgtgccatcgcgagggacaggtactttgttgcgagctgtgcccgagggtataccacgccaaatgtctcagattaaccagtgaacctgagggggactggttctgccctgaatgtgagaagatcacagtcgcagagtgcatcgaaactcagtctaaggctatgacaatgcttaccattgaacaattgagctaccttctcaagtttgccatccagaaaatgaagcagcctgggacagatgccttccaaaaaccggtgcccctggagcagcatcccgattatgcggagtacatcttccacccgatggatctgtgtactttggagaagaacgctaagaagaagatgtatggatgcacagaagctttcctggctgatgccaagtggattcttcacaattgcattatctataacggcggtaaccacaagttgactcagatcgctaaggtagttataaaaatctgtgagcacgagatgaatgagattgaagtgtgccctgaatgttatctggccgcatgtcagaagcgggacaattggttttgcgagccatgctccaatccacatccattggtgtgggctaagctcaagggctttcctttctggccggcaaaggccctcagggataaagacggccaagtcgatgcgaggttcttcggacagcacgacagggcatgggtccctattaacaattgctacctgatgtcaaaagaaattccattcagcgtaaagaaaactaagtctatttttaactccgcaatgcaggagatggaggtgtacgtggagaacatcagacggaagttcggtgtctttaattacagtcctttccgaaccccatacacccctaattcccaataccagatgctactggaccccaccaatccttccgctggcactgctaaaattgataaacaagagaaagtaaagcttaatttcgacatgaccgcttcacctaagatcctgatgagcaagccagtgctgtctgggggaaccggcaggcggataagtctgagcgacatgccacgctcccctatgtcgacaaattcatctgtgcacactggcagcgatgtggagcaagacgcagagaaaaaggctaccagtagccacttttccgcatccgaagagagtatggacttccttgacaagagtactgcaagtccagccagcaccaagaccggacaggctggctccctgagcgggtccccaaaaccgttcagcccccaattgtctgcccctatcaccacgaagaccgacaagacctcaacaacagggtctatcctcaatttgaacctggatcgctctaaggcagagatggatctgaaagaattgagtgaatcagtgcagcagcagtcaactccagttccacttatttcccccaaacgccaaattagaagtcgttttcagttaaatttagacaagacgatagagtcctgtaaagcacagctggggattaatgaaatttcggaggacgtgtacactgccgttgagcattccgactctgaagattccgaaaaaagcgactctagcgattcagagtatatttccgatgatgagcagaagtccaagaacgagcccgaggacacggaagataaagagggatgtcagatggacaaagaaccctctgcagtgaagaaaaagcctaagccgactaacccggtggaaattaaggaggaattaaagtccacaagccctgctagcgagaaggcagatccaggcgctgtaaaagacaaagctagccctgaaccggaaaaagacttcagcgaaaaggctaagccctctcctcatcccataaaagacaaattgaagggtaaggacgaaactgacagccccacagtgcatctcggacttgactccgacagtgagtctgagctcgtgatcgacctgggcgaagaccattccggtcgggagggacgaaagaacaagaaagaacccaaagaaccttcccccaaacaggatgtcgtggggaagactcctcctagtacgactgtcggatcccacagcccccctgagaccccagtgctgactcgctcttccgcgcagacaagcgctgccggagcaactgccacgacatctacatccagcacggtgaccgtcacggcccctgcaccagccgctacaggatcgcccgttaaaaaacaaaggcccctgctcccgaaagagaccgctcctgccgtgcagagggtggtctggaactcaagtagcaagttccagacctcctcccagaaatggcatatgcaaaagatgcaacggcagcagcagcaacagcagcagcagaatcagcagcagcaaccccagtctagccaggggacaaggtaccagacgaggcaggctgttaaggccgtgcagcaaaaagagataactcagagccctagcacaagtacgattacattagtgaccagtacacagtctagtccattggtgaccagctccggctctatgagtacattggtgagttctgtgaacgccgatttgccaattgccaccgccagtgctgacgtggcggctgatattgccaagtatacatcaaagatgatggacgccataaagggaacaatgaccgaaatctacaatgacctctcaaagaacacaacaggtagcactatcgcagaaataagacgactcagaatcgagattgagaaactacaatggttacatcagcaagagctcagcgaaatgaagcacaaccttgagctcactatggccgagatgcgtcagtctctagagcaggagcgcgaccgtctgatagccgaagtgaagaagcagctggagctcgagaagcagcaggcggtcgacgagactaagaagaagcagtggtgtgctaattgtaagaaagaagctattttttattgttgctggaatacatcttattgcgattatccttgccagcaggcacactggccagaacacatgaagtcgtgtacccagagtgccactgcccctcagcaggaagctgatgctgaagttaacaccgaaacactcaacaagtcatctcaaggtagctcctcgagcacccagtccgctccaagtgagacggctagtgcctccaaggaaaaagaaacctccgctgaaaaatccaaggagtctgggagcacactcgatcttagcggctcgcgcgaaacgccaagctctatccttctgggttccaaccagggtagcgtatctaaacgatgcgataaacagcctgcgtatgcaccaacgaccacagatcaccagccacatcctaactaccctgcacagaagtatcatagtaggtccaataaaagttcttggtcatcctcagatgaaaaacgaggctctaccaggagcgaccacaatactagtacgagtacaaaatctcttctgccaaaagagtccaggctggataccttttgggattag

SEQ ID NO: 276538 - DNA, 3864 bp, Artificial Sequence
  derived and/or modified sequence
gtcacatggctcagtagccattagccatagcttgattttgcaaactggcaagggcctggcacacctttccttccaccagggcatggtgtttctggaagagtttgaagctagatcctgcttggctgaagaggaaataaaaacagaacaggaggtggtagagggcatggatatctctactcgctccaaagatcctggctctgcagagagaacagcccagaaaagaaagttccccagccctccacattcttccaatggccactcgccgcaggacacatcaacaagccccattaaaaagaaaaagaaacctggcttactgaacagtaacaataaggagcagtcagaactaagacatggtccgttttactatatgaagcagccactcaccacagaccctgttgatgttgtaccgcaggatggacggaatgatttctactgctgggtttgtcaccgggaaggccaagtcctttgctgtgagctctgtccccgggtttatcacgctaagtgtctgagactgacatcggaaccagagggggactggttttgtcctgaatgtgagaaaattacagtagcagaatgcatcgagacccagagtaaagccatgacaatgctcaccattgaacagttatcctacctgctcaagtttgccattcagaaaatgaaacagccagggacagatgcattccagaagcccgttccattggaacagcaccctgactatgcggaatacatcttccatccaatggacctttgtacattggaaaagaatgcgaaaaagaaaatgtatggctgcacagaagccttcctggctgatgcaaagtggattttgcacaactgcatcatttataatgggggaaatcacaaattgacgcaaatagcgaaagtagtcatcaaaatctgtgaacatgagatgaatgaaatcgaagtatgtccagaatgttatctagctgcttgccaaaaacgagataactggttttgtgagccttgtagcaatccacatcctttggtctgggccaaactgaaggggtttccattctggcctgcaaaagctctaagggataaagacgggcaggtcgatgcccgattctttggacaacatgacagggcctgggttccaataaataattgctacctcatgtctaaagaaattcctttttctgtgaaaaagactaagagcatcttcaacagtgccatgcaagagatggaggtttacgtggagaacatccgcaggaagtttggggtttttaattactctccatttaggacaccctacacacccaacagccagtatcaaatgctgctcgatcccaccaaccccagcgccggcactgccaagatagacaagcaggagaaggtcaagctcaactttgacatgacggcatcccccaagatcctgatgagcaagcctgtgctgagtgggggcacaggccgccggatttccttgtcggatatgccgcgctcccccatgagcacaaactcttctgtgcacacgggctccgacgtggagcaggatgctgagaagaaggccacgtcgagccacttcagtgcgagcgaggagtccatggacttcctggataagagcacagcttcaccagcctccaccaagacgggacaagcagggagtttatccggcagcccaaagcccttctctcctcaactgtcagctcctatcacgacgaaaacggacaaaacctccaccaccggcagcatcctgaatcttaacctggatcgaagcaaagctgagatggatttgaaggagctgagcgagtcggtccagcaacagtccacccctgttcctctcatctctcccaagcgccagattcgtagcaggttccagctgaatcttgacaagaccatagagagttgcaaagcacaattaggcataaatgaaatctcggaagatgtctatacggccgtagagcacagcgattcggaggattctgagaagtcagatagtagcgatagtgagtatatcagtgatgatgagcagaagtctaagaacgagccagaagacacagaggacaaagaaggttgtcagatggacaaagagccatctgctgttaaaaaaaagcccaagcctacaaacccagtggagattaaagaggagctgaaaagcacgtcaccagccagcgagaaggcagaccctggagcagtcaaggacaaggccagccctgagcctgagaaggacttttccgaaaaggcaaaaccttcacctcaccccataaaggataaactgaagggaaaagatgagacggattccccaacagtccatttgggcctggactctgattcagagagcgaacttgtcatagatttaggagaagaccattctgggcgggagggtcgaaaaaataagaaggaacccaaagaaccatctcccaaacaggatgttgtaggtaaaactccaccatccacgacggtgggcagccattctcccccggaaacaccggtgctcacccgctcttccgcccaaacttccgcggctggcgccacagccaccaccagcacgtcctccacggtcaccgtcacggccccggcccccgccgccacaggaagcccagtgaaaaagcagaggccgcttttaccgaaggagactgccccggccgtgcagcgggtcgtgtggaactcatcaagtaagtttcaaacgtcctcccaaaagtggcacatgcagaagatgcagcgtcagcagcagcagcagcagcagcaaaaccagcagcagcagcctcagtcttcccaggggacgagatatcagaccagacaggctgtgaaagctgtccagcagaaggagatcacacagagcccatccacgtccaccatcaccctggtgaccagcacacagtcatcgcccctggtcaccagctcggggtccatgagcacccttgtgtcctcagtcaacgctgacctgcccatcgccactgcctcagctgatgtcgccgctgatattgccaagtacactagcaaaatgatggatgcaataaaaggaacaatgacagaaatatacaacgatctttctaaaaacactactggaagcacaatagctgagattcgcaggctgaggatcgagatagagaagctccagtggctgcaccagcaagagctctccgaaatgaaacacaacttagagctgaccatggcggagatgcggcagagcctggagcaggagcgggaccggctcatcgccgaggtgaagaagcagctggagttggagaagcagcaggcggtggatgagaccaagaagaagcagtggtgcgccaactgcaagaaggaggccatcttttactgctgttggaacactagctactgtgactacccctgccagcaagcccactggcctgagcacatgaagtcctgcacccagtcagctactgctcctcagcaggaagcggatgctgaggtgaacacagaaacactaaataagtcctcccaggggagctcctcgagcacacaatcagcaccttcagaaacggccagcgcctccaaagagaaggagacgtcagctgagaaaagcaaggagagtggctcgacccttgacctttctggctccagagagacgccctcctccattctcttaggctccaaccaaggctctgttagcaaaaggtgtgacaagcaacctgcctatgccccaaccaccacagaccaccagccgcaccccaactaccccgcccagaagtaccattcccggagtaataaatccagttggagcagcagtgatgagaagaggggatcgacacgttccgatcacaacaccagtaccagcacgaagagcctcctcccgaaagagtctcggctggacaccttctgggactagcagtgaatcgggacacaaaccacccaccccattgggagaaaaacccagacgccagg

SEQ ID NO: 276539 - protein, 1186 aa, Artificial Sequence
  derived and/or modified sequence
MDISTRSKDPGSAERTAQKRKFPSPPHSSNGHSPQDTSTSPIKKKKKPGLLNSNNKEQSELRHGPFYYMKQPLTTDPVDVVPQDGRNDFYCWVCHREGQVLCCELCPRVYHAKCLRLTSEPEGDWFCPECEKITVAECIETQSKAMTMLTIEQLSYLLKFAIQKMKQPGTDAFQKPVPLEQHPDYAEYIFHPMDLCTLEKNAKKKMYGCTEAFLADAKWILHNCIIYNGGNHKLTQIAKVVIKICEHEMNEIEVCPECYLAACQKRDNWFCEPCSNPHPLVWAKLKGFPFWPAKALRDKDGQVDARFFGQHDRAWVPINNCYLMSKEIPFSVKKTKSIFNSAMQEMEVYVENIRRKFGVFNYSPFRTPYTPNSQYQMLLDPTNPSAGTAKIDKQEKVKLNFDMTASPKILMSKPVLSGGTGRRISLSDMPRSPMSTNSSVHTGSDVEQDAEKKATSSHFSASEESMDFLDKSTASPASTKTGQAGSLSGSPKPFSPQLSAPITTKTDKTSTTGSILNLNLDRSKAEMDLKELSESVQQQSTPVPLISPKRQIRSRFQLNLDKTIESCKAQLGINEISEDVYTAVEHSDSEDSEKSDSSDSEYISDDEQKSKNEPEDTEDKEGCQMDKEPSAVKKKPKPTNPVEIKEELKSTSPASEKADPGAVKDKASPEPEKDFSEKAKPSPHPIKDKLKGKDETDSPTVHLGLDSDSESELVIDLGEDHSGREGRKNKKEPKEPSPKQDVVGKTPPSTTVGSHSPPETPVLTRSSAQTSAAGATATTSTSSTVTVTAPAPAATGSPVKKQRPLLPKETAPAVQRVVWNSSSKFQTSSQKWHMQKMQRQQQQQQQQNQQQQPQSSQGTRYQTRQAVKAVQQKEITQSPSTSTITLVTSTQSSPLVTSSGSMSTLVSSVNADLPIATASADVAADIAKYTSKMMDAIKGTMTEIYNDLSKNTTGSTIAEIRRLRIEIEKLQWLHQQELSEMKHNLELTMAEMRQSLEQERDRLIAEVKKQLELEKQQAVDETKKKQWCANCKKEAIFYCCWNTSYCDYPCQQAHWPEHMKSCTQSATAPQQEADAEVNTETLNKSSQGSSSSTQSAPSETASASKEKETSAEKSKESGSTLDLSGSRETPSSILLGSNQGSDHSRSNKSSWSSSDEKRGSTRSDHNTSTSTKSLLPKESRLDTFWD

SEQ ID NO: 276540 - protein, 270 aa, Artificial Sequence
  derived and/or modified sequence
LLAALRRGGREPPTGGSRLASSSEVLASIENIIQDIITSLARNEAPAFTIDNRSSWENIKFEDSVGLQMVSHCTTRKIKSDSPKSAQKFSLILKILSMIYKLVQSNTYATKRDIYYTDSQLFGNQTVVDNIINDISCMLKVSRRSLHILSTSKGLIAGNLRYIEEDGTKVNCTCGATAVAVPSNIQGIRITDAKFVLIVEKDATFQRLLDDNFCNKLSPCIMITGKGVPDLNTRLLVKKLWDTFHVPVFTLVDADPHGIEIMCIYKYGSM

SEQ ID NO: 276541 - DNA, 813 bp, Artificial Sequence
  derived and/or modified sequence
ctgctggccgccctgagaagaggcggcagagagccccccaccggcggcagcagactggccagcagcagcgaggtgctggccagcatcgagaacatcatccaggacatcatcaccagcctggccagaaacgaggcccccgccttcaccatcgacaacagaagcagctgggagaacatcaagttcgaggacagcgtgggcctgcagatggtgagccactgcaccaccagaaagatcaagagcgacagccccaagagcgcccagaagttcagcctgatcctgaagatcctgagcatgatctacaagctggtgcagagcaacacctacgccaccaagagagacatctactacaccgacagccagctgttcggcaaccagaccgtggtggacaacatcatcaacgacatcagctgcatgctgaaggtgagcagaagaagcctgcacatcctgagcaccagcaagggcctgatcgccggcaacctgagatacatcgaggaggacggcaccaaggtgaactgcacctgcggcgccaccgccgtggccgtgcccagcaacatccagggcatcagaatcaccgacgccaagttcgtgctgatcgtggagaaggacgccaccttccagagactgctggacgacaacttctgcaacaagctgagcccctgcatcatgatcaccggcaagggcgtgcccgacctgaacaccagactgctggtgaagaagctgtgggacaccttccacgtgcccgtgttcaccctggtggacgccgacccccacggcatcgagatcatgtgcatctacaagtacggcagcatgtag

SEQ ID NO: 276542 - DNA, 813 bp, Artificial Sequence
  derived and/or modified sequence
ctgctcgcggccttgagacggggtggaagggagccccccaccggcgggtcgaggctcgccagctcttccgaggtcctggcctcaatcgaaaacattatccaggatattattacttcactagcccgtaatgaggcgcctgcgtttactattgataacagaagtagctgggaaaacattaagttcgaagacagtgtgggcttacagatggtgagccactgtaccactaggaagattaagtccgactcccccaaatcagctcagaaattctctctcattctcaaaatccttagcatgatatacaaacttgtgcaatcaaatacttacgctacgaaacgagacatctattatactgactctcagttgttcggaaaccagacagtggtggataatatcattaatgatatctcatgcatgttgaaagtcagtcggcgctcgctgcacatactctccactagtaagggcctcatcgccggaaatctcaggtatatcgaggaggatggaacaaaagtgaactgtacgtgcggagccacagcagtggctgtgccttctaacattcagggtatcagaattactgacgccaagttcgtgctcatcgtagaaaaagacgctactttccagagactcttggacgataacttttgcaataagctgtccccctgcattatgattacggggaaaggtgttcccgatctgaacacccggctgctggtcaaaaagctttgggacacattccatgtgccagttttcacgctggtggacgcagacccacatgggattgagattatgtgtatttacaaatatggaagtatgtag

SEQ ID NO: 276543 - DNA, 813 bp, Artificial Sequence
  derived and/or modified sequence
ctgctggccgccctgcggcggggcggccgggagccccccaccggcggcagccggctggccagcagcagcgaggtgctggccagcattgagaacatcatccaggacatcatcaccagcctggccagaaatgaggccccagccttcaccatcgacaacagaagctcctgggagaacatcaagtttgaggacagcgtgggcctgcagatggtgagccactgcaccaccaggaagatcaagagtgacagccccaagagcgcccagaagttcagcctcatcctgaagatcctgtccatgatctacaagctggtgcagagcaacacctacgccaccaagagggacatctactacacagacagccagctgtttggaaaccagacagtggtggacaacatcatcaatgacatcagctgcatgctgaaggtgtccagaagaagcctgcacatcctgagcaccagcaagggcctgattgctggcaacctgcgctacattgaagaagatggcaccaaggtgaactgcacctgtggggccacagctgtggccgtgcccagcaacatccagggcatccgcatcacagatgccaagtttgtgctgattgtggagaaggatgccaccttccagaggctgctggatgacaacttctgcaacaagctgagcccctgcatcatgatcaccgggaagggcgtgcctgacctgaacacccggctgctggtgaagaagctgtgggacaccttccacgtgcctgtgttcaccctggtggatgctgacccccatggaattgagatcatgtgcatctacaagtatggctccatgtag

SEQ ID NO: 276544 - DNA, 813 bp, Artificial Sequence
  derived and/or modified sequence
ctgctggccgccctgcggcggggcggccgggagccccccaccggcggttctcgactggctagcagttcagaagtgctcgcatcgatcgagaacataatccaggatatcataacttctctggcgaggaatgaggccccagccttcaccatcgacaaccgatcgagctgggagaatattaaattcgaggacagtgtcggattacaaatggtatcacattgtacaaccagaaaaatcaaaagcgactcccccaagtccgctcagaagttctccctcatcttgaagatcctgagcatgatctacaagctagtccagagtaatacctacgcaactaagcgagatatttactacactgacagccagttattcggtaatcagaccgtagtggacaacatcatcaatgatatatcttgcatgcttaaagtgagccgccgatccctgcacatattgtctaccagtaagggattgatcgccgggaatttgcgttatatcgaggaggacggcacaaaagtaaactgcacatgtggggcaacagccgtggccgtgccttctaacatacaaggcattaggataactgacgctaagttcgtgctcattgtagaaaaggacgcaacatttcagcgactgctggatgataacttctgcaataagctttcaccatgcattatgatcaccgggaagggcgtgcccgacctaaatacccgactcctcgtgaagaagctctgggatactttccacgtacctgtctttacactagtggatgcagacccccacggaatagagatcatgtgtatctataagtacggaagcatgtag

SEQ ID NO: 276545 - DNA, 813 bp, Artificial Sequence
  derived and/or modified sequence
ctgctcgctgcacttcggagaggcggacgcgaacccccaactggaggttcccgccttgcctcatcctctgaggtgctagcaagtatagagaacatcatccaggacataattacctcgcttgcccgaaacgaggcacccgcatttactatcgacaaccgatcctcttgggagaacataaagtttgaggactcagtgggactgcagatggtgtctcactgtaccactcggaaaatcaaatcggactcaccaaaatccgcccaaaagttttctctgatcttgaaaatcctgagtatgatttataaattggtgcaaagcaacacttacgccaccaagcgcgacatctattacactgatagccaactgtttggaaatcagacagtggtagataatataattaatgatatttcctgcatgttgaaggtgtcgcgcagaagcttacacattctctcgactagcaaaggattgatcgccggtaacttacgctacatagaggaggatggaacgaaagttaattgtacatgcggggctacagcagtggcagtgccaagtaacattcaggggattcgtatcaccgatgccaagttcgtgctgatcgtggagaaagacgccactttccaacggctgttagacgacaacttttgcaacaagctgtcaccctgcatcatgatcacaggtaagggtgtccctgatctgaataccagactgttagtgaagaagctgtgggataccttccatgtgccagtgtttactttagtagatgccgacccacatggaatcgagatcatgtgcatatacaagtacggttccatgtag

SEQ ID NO: 276546 - DNA, 810 bp, Artificial Sequence
  derived and/or modified sequence
ctgctggctgccctgaggagaggtggcagggagcccccaactgggggaagccgcctggcctccagttctgaggttcttgcatctatagaaaatattatccaagacataatcacaagcttggcaagaaatgaagcacctgcattcacgatagacaacagatcaagctgggaaaacataaagtttgaagattctgtgggtcttcagatggtatcccattgcaccaccagaaagatcaaaagtgattcaccaaaatcagctcaaaaattttctctaatccttaaaatattgtccatgatttataaattagtacagagcaacacttatgcaaccaaaagggacatatattacactgacagtcaactctttggtaaccagactgtcgtcgacaatattatcaatgacatttcttgcatgttaaaagtgtcaaggaggagtctacatatattatctacatcaaaaggtttaattgctggcaacttaagatacatcgaggaagatggcaccaaagtgaattgtacctgtggtgcaacggctgttgctgtgccatcgaatattcaaggaattcggattacagatgcaaagtttgtattaattgtagaaaaagatgcaacatttcagcggctcctagatgacaacttttgcaacaaattgtctccttgcatcatgattacgggaaagggagttcctgatctaaacacaagacttttagtcaagaaactgtgggatacatttcatgttcctgttttcactcttgtagatgctgatccacatggcatagaaataatgtgcatctataagtatggatctatg

SEQ ID NO: 276547 - protein, 504 aa, Artificial Sequence
  derived and/or modified sequence
MRLSKTLVDMDMADYSAALDPAYTTLEFENVQVLTMGNVLLPLRLARLRHPLRHHWSISGGVDSSPQGDTSPSEGTNLNAPNSLGVSALCAICGDRATGKHYGASSCDGCKGFFRRSVRKNHMYSCRFSRQCVVDKDKRNQCRYCRLKKCFRAGMKKEAVQNERDRISTRRSSYEDSSLPSINALLQAEVLSRQITSPVSGINGDIRAKKIASIADVCESMKEQLLVLVEWAKYIPAFCELPLDDQVALLRAHAGEHLLLGATKRSMVFKDVLLLGNDYIVPRHCPELAEMSRVSIRILDELVLPFQELQIDDNEYAYLKAIIFFDPDAKGLSDPGKIKRLRSQVQVSLEDYINDRQYDSRGRFGELLLLLPTLQSITWQMIEQIQFIKLFGMAKIDNLLQEMLLGGSPSDAPHAHHPLHPHLMQEHMGTNVIVANTMPTHLSNGQMCEWPRPRGQAATPETPQPSPPGGSGSEPYKLLPGAVATIVKPLSAIPQPTITKQEVI

SEQ ID NO: 276548 - DNA, 1515 bp, Artificial Sequence
  derived and/or modified sequence
atgaggctgtcgaaaaccctggtagacatggacatggcagactattccgccgctctggaccccgcatacaccaccctggaattcgagaatgtgcaagtgctgacaatgggaaacgtcctgctcccacttaggctggcgcgcttacggcacccactacggcaccactggtccatatctggaggagtggacagctcaccgcagggagacacttccccatctgagggtacaaacctgaatgcaccgaacagcctgggggtaagcgctttatgtgccatttgtggcgacagagccactggcaaacattacggcgccagctcatgtgatggatgcaaaggcttcttccgcagatcagtcaggaaaaaccatatgtactcctgtagattcagccgacagtgcgtcgtcgataaggacaaaaggaatcagtgtaggtattgcagactcaaaaaatgctttagagcgggaatgaagaaagaggccgtgcagaacgagagagaccgcatctccacccgacgcagctcttacgaagacagttccctcccgtcaatcaacgcacttcttcaggccgaggtcttgtctcggcaaatcacctcacccgtatcaggcattaatggtgacattagagcaaagaagatcgcttcaattgcggacgtgtgtgaatcaatgaaagaacagttattggtcctggtcgagtgggccaagtatatccctgccttctgtgaattgccactcgatgatcaggtggccctgttgcgagctcacgcgggcgagcatctattgcttggagccaccaaaaggagcatggtgtttaaggatgtgctgcttctcggaaatgattatattgtgcctcggcattgtcccgagctggctgaaatgagccgggtttccattcggatcctcgacgagcttgtgctgccattccaagaacttcagattgatgataatgaatacgcctacctcaaagcaattatctttttcgatcccgatgctaaaggcttgagcgacccgggcaaaataaaacgtctccggagccaggtccaggtgagcctcgaggattatattaatgacagacagtacgactcaagaggtagattcggggaactcctcctcctgctgcctactctccaaagcattacctggcagatgatcgagcagatacagttcatcaagctgtttggaatggccaagatagataacctgcttcaggagatgcttctgggtggatccccctcagacgccccccatgcacaccatccacttcatccacacctcatgcaagagcacatgggcacgaatgtcattgtagccaacacgatgcctactcacctgagtaatggccagatgtgtgagtggcctaggccacggggtcaggcagccacacctgaaactccccagccctcccctcccggggggtcaggtagcgagccatataagctgcttcccggcgccgtcgccaccatcgttaagcctctgtctgcaataccccagccaactatcaccaagcaggaggtcatatag

SEQ ID NO: 276549 - DNA, 3329 bp, Artificial Sequence
  derived and/or modified sequence
gggaggaggcagtgggagggcggagggcgggggccttcggggtgggcgcccagggtagggcaggtggccgcggcgtggaggcagggagaatgcgactctccaaaaccctcgtcgacatggacatggccgactacagtgctgcactggacccagcctacaccaccctggaatttgagaatgtgcaggtgttgacgatgggcaatgttttgttgccgctgcgtctcgccagattgaggcatcccctccgacatcactggagcatatctggaggggtggacagttctccacagggagacacgtccccatcagaaggcaccaacctcaacgcgcccaacagcctgggtgtcagcgccctgtgtgccatctgcggggaccgggccacgggcaaacactacggtgcctcgagctgtgacggctgcaagggcttcttccggaggagcgtgcggaagaaccacatgtactcctgcagatttagccggcagtgcgtggtggacaaagacaagaggaaccagtgccgctactgcaggctcaagaaatgcttccgggctggcatgaagaaggaagccgtccagaatgagcgggaccggatcagcactcgaaggtcaagctatgaggacagcagcctgccctccatcaatgcgctcctgcaggcggaggtcctgtcccgacagatcacctcccccgtctccgggatcaacggcgacattcgggcgaagaagattgccagcatcgcagatgtgtgtgagtccatgaaggagcagctgctggttctcgttgagtgggccaagtacatcccagctttctgcgagctccccctggacgaccaggtggccctgctcagagcccatgctggcgagcacctgctgctcggagccaccaagagatccatggtgttcaaggacgtgctgctcctaggcaatgactacattgtccctcggcactgcccggagctggcggagatgagccgggtgtccatacgcatccttgacgagctggtgctgcccttccaggagctgcagatcgatgacaatgagtatgcctacctcaaagccatcatcttctttgacccagatgccaaggggctgagcgatccagggaagatcaagcggctgcgttcccaggtgcaggtgagcttggaggactacatcaacgaccgccagtatgactcgcgtggccgctttggagagctgctgctgctgctgcccaccttgcagagcatcacctggcagatgatcgagcagatccagttcatcaagctcttcggcatggccaagattgacaacctgttgcaggagatgctgctgggagggtcccccagcgatgcaccccatgcccaccaccccctgcaccctcacctgatgcaggaacatatgggaaccaacgtcatcgttgccaacacaatgcccactcacctcagcaacggacagatgtgtgagtggccccgacccaggggacaggcagccacccctgagaccccacagccctcaccgccaggtggctcagggtctgagccctataagctcctgccgggagccgtcgccacaatcgtcaagcccctctctgccatcccccagccgaccatcaccaagcaggaagttatctagcaagccgctggggcttgggggctccactggctccccccagccccctaagagagcacctggtgatcacgtggtcacggcaaaggaagacgtgatgccaggaccagtcccagagcaggaatgggaaggatgaagggcccgagaacatggcctaagggccacatcccactgccacccttgacgccctgctctggataacaagactttgacttggggagacctctactgccttggacaacttttctcatgttgaagccactgccttcaccttcaccttcatccatgtccaacccccgacttcatcccaaaggacagccgcctggagatgacttgaggccttacttaaacccagctcccttcttccctagcctggtgcttctcctctcctagcccctgtcatggtgtccagacagagccctgtgaggctgggtccaattgtggcacttggggcaccttgctcctccttctgctgctgcccccacctctgctgcctccctctgctgtcaccttgctcagccatcccgtcttctccaacaccacctctccagaggccaaggaggccttggaaacgattcccccagtcattctgggaacatgttgtaagcactgactgggaccaggcaccaggcagggtctagaaggctgtggtgagggaagacgcctttctcctccaacccaacctcatcctccttcttcagggacttgggtgggtacttgggtgaggatccctgaaggccttcaacccgagaaaacaaacccaggttggcgactgcaacaggaacttggagtggagaggaaaagcatcagaaagaggcagaccatccaccaggcctttgagaaagggtagaattctggctggtagagcaggtgagatgggacattccaaagaacagcctgagccaaggcctagtggtagtaagaatctagcaagaattgaggaagaatggtgtgggagagggatgatgaagagagagagggcctgctggagagcatagggtctggaacaccaggctgaggtcctgatcagcttcaaggagtatgcagggagctgggcttccagaaaatgaacacagcagttctgcagaggacgggaggctggaagctgggaggtcaggtggggtggatgatataatgcgggtgagagtaatgaggcttggggctggagaggacaagatgggtaaaccctcacatcagagtgacatccaggaggaataagctcccagggcctgtctcaagctcttccttactcccaggcactgtcttaaggcatctgacatgcatcatctcatttaatcctcccttcctccctattaacctagagattgtttttgttttttattctcctcctccctccccgccctcacccgccccactccctcctaacctagagattgttacagaagctgaaattgcgttctaagaggtgaagtgattttttttctgaaactcacacaactaggaagtggctgagtcaggacttgaacccaggtctccctggatcagaacaggagctcttaactacagtggctgaatagcttctccaaaggctccctgtgttctcaccgtgatcaagttgaggggcttccggctcccttctacagcctcagaaaccagactcgttcttctgggaaccctgcccactcccaggaccaagattggcctgaggctgcactaaaattcacttagggtcgagcatcctgtttgctgataaatattaaggagaattca

SEQ ID NO: 276550 - DNA, 1515 bp, Artificial Sequence
  derived and/or modified sequence
atgaggctgagcaagaccctggtggacatggacatggctgactacagcgctgccctggaccctgcctacaccaccctggagtttgaaaatgtgcaggtgctgaccatgggaaatgtgctgctgcccctgcggctggcccggctgcggcaccccctgcggcaccactggagcatctctggaggagtggacagcagcccccagggcgacaccagccccagcgagggcaccaacctgaatgcccccaacagcctgggcgtgtctgccctgtgtgccatctgtggggaccgggccaccgggaagcactacggggccagcagctgtgatggctgcaagggcttcttcagaagatctgtgaggaagaaccacatgtacagctgccgcttcagccggcagtgtgtggtggacaaggacaagaggaaccagtgccgctactgccgcctgaagaagtgcttccgggccggcatgaagaaggaggccgtgcagaatgaaagagaccgcatcagcacccggcgcagcagctatgaggacagcagcctgcccagcatcaatgccctgctgcaggccgaggtgctgagccggcagatcaccagccctgtgtctggcatcaatggagacatccgggccaagaagatcgccagcattgctgatgtgtgtgagagcatgaaggagcagctgctggtgctggtggagtgggccaagtacatcccagccttctgtgagctgcccctggatgaccaggtggccctgctgcgggcccacgccggggagcacctgctgctgggcgccaccaagaggtccatggtgttcaaggatgtgctgctgctgggcaatgactacatcgtgcccaggcactgcccagagctggccgagatgagccgggtgtccatccgcatcctggatgagctggtgctgcccttccaggagctgcagattgatgacaatgaatatgcctacctgaaggccatcatcttctttgatcctgatgccaagggcctgagtgaccccgggaagatcaagaggctgcggagccaggtgcaggtgtccctggaggactacatcaatgaccggcagtatgacagccggggccgctttggagagctgctgctgctgctgcccaccctgcagagcatcacctggcagatgattgagcagatccagttcatcaagctgtttggcatggccaagattgacaacctgctgcaggagatgctgctgggcggcagccccagtgatgccccccacgcccaccaccccctgcacccccacctgatgcaggagcacatgggcaccaacgtgattgtggccaacaccatgcccacccacctgagcaatggccagatgtgtgagtggccccggccccggggccaggccgccaccccagagaccccccagcccagccccccaggcggcagcggcagcgagccctacaagctgctgcccggggctgtggccaccatcgtgaagcccctgagcgccatcccccagcccaccatcaccaagcaggaggtgatctag

SEQ ID NO: 276551 - DNA, 1515 bp, Artificial Sequence
  derived and/or modified sequence
atgcggctgagcaagaccctggtggacatggacatggccgactactcagcagctctagaccccgcctatacgactctagagtttgagaatgtgcaagttctaaccatgggaaatgttctgctgcccctgcgtctggccagactgagacaccccttgaggcaccattggtcaatctcaggaggggtagacagttcaccccagggcgataccagcccttcagagggtacaaatctgaacgctcccaactcacttggggtgtcggcgctgtgcgccatctgtggcgaccgggccaccggtaaacactacggggccagtagctgcgatggctgcaaggggttcttccgcagatctgtgcgtaaaaaccacatgtactcctgtagattctcccggcaatgtgtggtggacaaggataagaggaaccaatgtcggtattgtagactgaagaagtgtttcagggccggaatgaaaaaagaggctgtgcaaaatgaaagagatcgtatttcaacacgccgaagctcctacgaagatagcagtttgccttccatcaatgccctactgcaggctgaggttctatcacgccagatcaccagccctgtcagtggaataaacggcgacatccgcgctaaaaaaatcgcaagcatagcagatgtctgtgaaagcatgaaagaacagctgttagtcctcgtcgaatgggccaagtatatacccgcgttctgcgaactgcccttggatgatcaggtggcattattgcgggcgcacgccggtgagcatctgttactgggggctaccaaaaggtcaatggtgtttaaggatgtgcttcttctgggtaacgattatatcgtccctcgccactgtcccgagctcgcggaaatgtcccgtgtttccataaggatccttgatgaactggtgctgccttttcaggagctgcagatcgacgataatgaatatgcttacctaaaagctattattttctttgacccagacgccaaaggactgagcgacccgggtaagattaagcggttacgatcccaggtccaggtttctctggaagattacatcaatgatcgccagtatgattcccgtgggcgatttggcgaactgctcttattgcttccgaccttgcagtccatcacgtggcagatgattgagcaaattcagtttattaagctgttcggtatggctaagatagataacctactgcaggagatgctcttgggaggatctcctagtgacgcccctcatgcccaccaccctttgcatccacacctgatgcaagaacatatgggaactaatgttattgtagctaacaccatgccaacccatttgtcgaacggtcagatgtgtgagtggccacggcctcgcgggcaggctgccacgcccgaaactcctcaaccttcaccacccggtggcagcgggagcgaaccatacaagctgttgcccggcgccgtggctactatcgtcaagccactcagcgccatccctcaaccaaccatcaccaagcaggaggtgatctag

SEQ ID NO: 276552 - DNA, 324 bp, Artificial Sequence
  derived and/or modified sequence
atgaggctctcaaagacccttgtcgacatggacatggcagactactcggcagcccttgaccccgcatataccactctcgaatttgaaaatgttcaggtactcacaatgggtaacgattttgttgccgctgcctccaggcagatagaggcaagtcctcccacatctttggagcatatttggagaggaggtcagttctcaacagggaggcatgtgcccatccgaaggcatcagccacaacgggcacaacagccaggctgtcaacgtccggtttgccacttgcgcggtcccggacacggccagaccctcaggtgtctggaactgtag

SEQ ID NO: 276553 - DNA, 1515 bp, Artificial Sequence
  derived and/or modified sequence
atgagactatcaaagaccctcgtggacatggacatggccgactactctgcagccctggacccagcttatacaacactagagttcgaaaatgtgcaggtgctcacgatgggaaatgttttgttaccgctgcggctagccagactgaggcaccccctaagacatcactggagtatttccgggggagtggacagcagcccacagggcgacaccagcccatccgaagggactaatctgaatgctccgaactcactcggtgtatcagccctgtgcgcgatctgcggcgaccgggcaacaggcaaacattacggcgctagctcttgcgatggctgcaaagggttctttaggagatcagtcagaaagaatcacatgtattcttgtcggttcagccgtcaatgcgttgttgataaagataagcggaaccagtgtcgctattgtcggcttaagaagtgctttagagctgggatgaagaaggaggctgtacagaacgaacgggaccggattagtactagacgcagtagctacgaggatagcagtctaccaagtataaacgccctgttgcaggccgaagtattgtctagacagataacttctcctgtctctggaatcaatggggacatacgagcaaaaaaaatagcgtcaatagccgacgtgtgtgaatccatgaaagagcagctgttggttctggttgaatgggctaagtacatccctgcattttgtgaattgccactggatgaccaggtagccctattgcgagctcacgccggagaacacctgctgctcggggcaacgaagaggtccatggtttttaaggatgttctcttgctcggcaacgactatatagtgcctcgccattgccccgaactggcagagatgagccgcgtgtctatcagaattctcgacgagctcgttttgcccttccaggaactgcagatcgatgacaatgagtacgcctacctaaaggctatcatattttttgaccccgatgcaaagggcctcagtgacccaggcaagattaaacgcctgaggtctcaggtgcaggtctcgttagaagattacatcaacgaccgacagtacgactcccggggaaggttcggagagctcttgctgttgctgcctaccctgcagagtattacgtggcaaatgatagagcagattcagttcattaaactctttgggatggcaaagattgacaacctgttgcaggagatgttgcttgggggatccccttctgacgctccacatgcccatcaccctcttcaccctcacctaatgcaggaacacatgggcaccaacgtgatagttgccaacacaatgcccacacacctgagcaacgggcaaatgtgtgagtggcccaggccgaggggccaagccgctacacctgagaccccccagccgtcacccccagggggaagcggtagtgaaccatataaactgcttccaggagcggttgcgacaatcgtcaagcccctgagcgccattccccagcccactatcactaaacaggaagtgatttag

SEQ ID NO: 276554 - DNA, 1515 bp, Artificial Sequence
  derived and/or modified sequence
atgagactgagcaagaccctggtggacatggacatggccgactacagcgccgccctggaccccgcctacaccaccctggagttcgagaacgtgcaggtgctgaccatgggcaacgtgctgctgcccctgagactggccagactgagacaccccctgagacaccactggagcatcagcggcggcgtggacagcagcccccagggcgacaccagccccagcgagggcaccaacctgaacgcccccaacagcctgggcgtgagcgccctgtgcgccatctgcggcgacagagccaccggcaagcactacggcgccagcagctgcgacggctgcaagggcttcttcagaagaagcgtgagaaagaaccacatgtacagctgcagattcagcagacagtgcgtggtggacaaggacaagagaaaccagtgcagatactgcagactgaagaagtgcttcagagccggcatgaagaaggaggccgtgcagaacgagagagacagaatcagcaccagaagaagcagctacgaggacagcagcctgcccagcatcaacgccctgctgcaggccgaggtgctgagcagacagatcaccagccccgtgagcggcatcaacggcgacatcagagccaagaagatcgccagcatcgccgacgtgtgcgagagcatgaaggagcagctgctggtgctggtggagtgggccaagtacatccccgccttctgcgagctgcccctggacgaccaggtggccctgctgagagcccacgccggcgagcacctgctgctgggcgccaccaagagaagcatggtgttcaaggacgtgctgctgctgggcaacgactacatcgtgcccagacactgccccgagctggccgagatgagcagagtgagcatcagaatcctggacgagctggtgctgcccttccaggagctgcagatcgacgacaacgagtacgcctacctgaaggccatcatcttcttcgaccccgacgccaagggcctgagcgaccccggcaagatcaagagactgagaagccaggtgcaggtgagcctggaggactacatcaacgacagacagtacgacagcagaggcagattcggcgagctgctgctgctgctgcccaccctgcagagcatcacctggcagatgatcgagcagatccagttcatcaagctgttcggcatggccaagatcgacaacctgctgcaggagatgctgctgggcggcagccccagcgacgccccccacgcccaccaccccctgcacccccacctgatgcaggagcacatgggcaccaacgtgatcgtggccaacaccatgcccacccacctgagcaacggccagatgtgcgagtggcccagacccagaggccaggccgccacccccgagaccccccagcccagcccccccggcggcagcggcagcgagccctacaagctgctgcccggcgccgtggccaccatcgtgaagcccctgagcgccatcccccagcccaccatcaccaagcaggaggtgatctag

SEQ ID NO: 276555 - protein, 526 aa, Artificial Sequence
  derived and/or modified sequence
MLMLLVRGTHYENLRSKVVLPTPLGGRSTETFVSEFPGPDTGIRWRRSDEALRVNVGGVRRQLSARALARFPGTRLGRLQAAASEEQARRLCDDYDEAAREFYFDRHPGFFLSLLHFYRTGHLHVLDELCVFAFGQEADYWGLGENALAACCRARYLERRLTQPHAWDEDSDTPSSVDPCPDEISDVQRELARYGAARCGRLRRRLWLTMENPGYSLPSKLFSCVSISVVLASIAAMCIHSLPEYQAREAAAAVAAVAAGRSPEGVRDDPVLRRLEYFCIAWFSFEVSSRLLLAPSTRNFFCHPLNLIDIVSVLPFYLTLLAGVALGDQGGKEFGHLGKVVQVFRLMRIFRVLKLARHSTGLRSLGATLKHSYREVGILLLYLAVGVSVFSGVAYTAEKEEDVGFNTIPACWWWGTVSMTTVGYGDVVPVTVAGKLAASGCILGGILVVALPITIIFNKFSHFYRRQKALEAAVRNSNHQEFEDLLSSIDGVSEASLETSRETSQEGQSADLESQAPSEPPHPQMY

SEQ ID NO: 276556 - DNA, 1581 bp, Artificial Sequence
  derived and/or modified sequence
atgctgatgctgctggtgagaggcacccactacgagaacctgagaagcaaggtggtgctgcccacccccctgggcggcagaagcaccgagaccttcgtgagcgagttccccggccccgacaccggcatcagatggagaagaagcgacgaggccctgagagtgaacgtgggcggcgtgagaagacagctgagcgccagagccctggccagattccccggcaccagactgggcagactgcaggccgccgccagcgaggagcaggccagaagactgtgcgacgactacgacgaggccgccagagagttctacttcgacagacaccccggcttcttcctgagcctgctgcacttctacagaaccggccacctgcacgtgctggacgagctgtgcgtgttcgccttcggccaggaggccgactactggggcctgggcgagaacgccctggccgcctgctgcagagccagatacctggagagaagactgacccagccccacgcctgggacgaggacagcgacacccccagcagcgtggacccctgccccgacgagatcagcgacgtgcagagagagctggccagatacggcgccgccagatgcggcagactgagaagaagactgtggctgaccatggagaaccccggctacagcctgcccagcaagctgttcagctgcgtgagcatcagcgtggtgctggccagcatcgccgccatgtgcatccacagcctgcccgagtaccaggccagagaggccgccgccgccgtggccgccgtggccgccggcagaagccccgagggcgtgagagacgaccccgtgctgagaagactggagtacttctgcatcgcctggttcagcttcgaggtgagcagcagactgctgctggcccccagcaccagaaacttcttctgccaccccctgaacctgatcgacatcgtgagcgtgctgcccttctacctgaccctgctggccggcgtggccctgggcgaccagggcggcaaggagttcggccacctgggcaaggtggtgcaggtgttcagactgatgagaatcttcagagtgctgaagctggccagacacagcaccggcctgagaagcctgggcgccaccctgaagcacagctacagagaggtgggcatcctgctgctgtacctggccgtgggcgtgagcgtgttcagcggcgtggcctacaccgccgagaaggaggaggacgtgggcttcaacaccatccccgcctgctggtggtggggcaccgtgagcatgaccaccgtgggctacggcgacgtggtgcccgtgaccgtggccggcaagctggccgccagcggctgcatcctgggcggcatcctggtggtggccctgcccatcaccatcatcttcaacaagttcagccacttctacagaagacagaaggccctggaggccgccgtgagaaacagcaaccaccaggagttcgaggacctgctgagcagcatcgacggcgtgagcgaggccagcctggagaccagcagagagaccagccaggagggccagagcgccgacctggagagccaggcccccagcgagcccccccacccccagatgtactag

SEQ ID NO: 276557 - DNA, 1581 bp, Artificial Sequence
  derived and/or modified sequence
atgcttatgctcctggtgcggggcacgcactacgagaacctccggtccaaggtggttctcccaacacctctgggcggtcggtccaccgagacattcgtctctgagtttccgggtcccgataccggaattcgctggcggcgttctgacgaggccctgcgagttaatgtgggtggagtgaggagacagctctccgcccgggcccttgccagatttccagggacccgacttgggaggctgcaagcggccgcctctgaggagcaggcacgaagactgtgtgacgattacgacgaagccgccagagagttttactttgaccgacatcctggttttttccttagcctcctgcatttttatcgcactggccatctccatgttctggatgagttatgtgtgtttgcctttggtcaagaagccgactattggggtctgggggaaaatgcgctagccgcatgctgccgcgcaaggtacctggaaaggcgcttaacgcaaccacatgcttgggatgaagatagtgatactccttcctccgttgacccctgccccgacgagatttccgacgttcagagagaactggcaaggtacggggctgcacgctgcggccgactgcggcggcggctgtggttaaccatggagaaccctgggtatagcctgccctcgaagctcttcagctgtgtcagcatctcggtggtgttggcctcaatagccgcaatgtgcatacacagcctgccagaataccaggcccgggaggccgctgctgctgttgccgccgtggccgctgggcgttcacccgaaggagtcagagacgaccccgttctcagaagacttgagtacttctgtatagcatggttttccttcgaggtgagctcccgattgctcctagcaccgagcactcgcaatttcttctgtcacccactaaatcttatcgatatagtcagcgtcctgcccttttatttgacactgctggcaggtgtggccctgggggatcagggagggaaggagttcgggcatttaggcaaagtagtccaagtatttcggttaatgcgtatcttcagagttttgaagctcgccaggcactctacagggctcagatcattgggcgctaccttgaaacatagctacagggaagtgggcatcctgttgctctatcttgcggtgggcgtgtccgtgttctccggggttgcttacactgccgaaaaagaagaggatgtgggctttaatacgatcccagcgtgttggtggtgggggaccgttagtatgacaacagtgggctacggtgatgtggtgccagtgaccgtggctggaaaactggccgcaagtggctgtatattaggaggcatcctcgtcgtggcgctgccaatcaccatcatcttcaacaaattcagccatttctatcgcagacagaaagctctcgaagcggccgtgcgtaattcaaaccaccaggaatttgaagatctgctttcatctattgatggagtcagtgaggcaagccttgagaccagcagagaaaccagccaagaaggtcaatcggctgacctcgaatcacaagcacccagcgaacctccccatccccaaatgtattag

SEQ ID NO: 276558 - DNA, 1581 bp, Artificial Sequence
  derived and/or modified sequence
atgctcatgttgctcgtcagggggactcactatgaaaacctacgctcaaaggtggttcttccgactccccttgggggccgcagtaccgagacattcgtgtcggaattcccgggtcctgatactggcatccggtggaggaggtccgatgaagccctccgtgtaaacgtcggcggagttcgtcgccagctgtccgcccgtgccctggcaagatttcccggaacacggcttggcaggctgcaggccgcggcctcagaagagcaggctcggaggctgtgcgatgactacgatgaggcagctagggagttttatttcgatagacaccccggcttttttctctctttacttcatttttataggaccggccacttgcatgtgctggatgagctctgtgtctttgcttttggacaggaggcagactactggggcctgggagaaaacgcacttgcagcatgctgtagagcacgttacctcgaaaggaggctgacacagccccacgcctgggatgaggactctgataccccatcatcagtggatccgtgccccgacgagatatccgacgtgcagagagagttggcacgatatggggccgcgcggtgcgggagactgaggagacgcctgtggctgactatggaaaatccagggtatagcttgcccagtaaactgtttagttgcgtgagtatttctgtcgttctcgcgtccatcgctgctatgtgtatacattcactgccagaatatcaggccagagaggcagctgccgctgtggccgccgtcgctgctggacgcagtccagaaggtgttagggatgaccccgttttaagacggcttgagtatttttgtattgcctggttctccttcgaagtctcaagccggctcctactcgctccttccaccagaaactttttttgtcaccccttaaaccttatcgacatagtcagcgtgttgcctttctacctaacgctgctggctggggttgccctgggtgatcagggaggtaaggagttcggacaccttgggaaggtggtgcaagtctttaggctgatgcggatattccgagttctcaagctggccagacacagtactggactcagaagcctgggtgcaactttaaagcactcctacagggaagtcggtatattgctgctttatttggcagtgggtgtgagtgttttctcaggagtggcctacacagcagagaaggaggaggatgtcggtttcaacactatacctgcgtgctggtggtggggcactgtgtccatgacgacagttggatacggtgacgttgtgcccgtcaccgtggcaggcaagttggcagcgtcagggtgcattttgggtggcatcctggttgtggctctgcctattacaataatcttcaataagtttagtcacttctaccgcaggcaaaaagctctggaagccgccgtcaggaactccaatcatcaagagttcgaggatcttctgagtagcatagatggcgtttctgaagcctctttggagacttcgagagagacatctcaagagggccaatccgccgatctcgaaagtcaggctccatctgaacccccacacccccagatgtactag

SEQ ID NO: 276559 - DNA, 1581 bp, Artificial Sequence
  derived and/or modified sequence
atgctgatgctgctggtgcggggcacccactatgagaacctgcggagcaaggtggtgctgcccacccccctgggcggccgcagcacagagacctttgtgtctgagttccctggccctgacaccggcatccgctggaggagaagtgatgaggccctgcgggtgaatgtgggcggcgtgcggcggcagctgagcgcccgggccctggcccgcttccctggcacccggctgggccgcctgcaggccgccgccagcgaggagcaggcccggcggctgtgtgatgattatgatgaggccgcccgggagttctactttgacagacaccctggcttcttcctgagcctgctgcacttctacagaacaggccacctgcacgtgctggatgagctgtgtgtgtttgccttcggccaggaggccgactactggggcctgggagaaaatgccctggccgcctgctgccgggcccgctacctggagcggcggctgacccagccccacgcctgggatgaagattctgacacccccagctctgtggacccctgcccagatgagatcagtgatgtgcagcgggagctggcccgctacggggccgcccgctgtggccgcctgcggcggcggctgtggctgaccatggagaaccctggctacagcctgcccagcaagctgttcagctgtgtgtccatctctgtggtgctggccagcattgctgccatgtgcatccacagcctgcctgagtaccaggcccgggaggccgctgctgctgtggccgctgtggccgccggccgcagccctgagggcgtgagagatgatcctgtgctgcggcggctggagtacttctgcatcgcctggttctcctttgaggtgagcagccggctgctgctggcccccagcaccaggaacttcttctgccaccccctgaacctgattgacatcgtgtctgtgctgcccttctacctgaccctgctggccggcgtggccctgggggaccagggcggcaaggagtttggccacctgggcaaggtggtgcaggtgttccggctgatgaggatcttccgggtgctgaagctggcccggcacagcacaggcctgcggagcctgggcgccaccctgaagcacagctaccgggaggtgggcatcctgctgctgtacctggccgtgggcgtgtctgtgttttctggagtggcctacacagctgagaaggaggaggatgtgggcttcaacaccatcccagcctgctggtggtggggcaccgtgtccatgaccaccgtgggctatggagatgtggtgcctgtgacagtggccggcaagctggccgccagcggctgcatcctgggcggcatcctggtggtggccctgcccatcaccatcatcttcaacaagttcagccacttctaccgccggcagaaggccctggaggccgctgtgaggaacagcaaccaccaggagtttgaggacctgctgagcagcattgatggagtgtctgaggccagcctggagaccagccgggagaccagccaggagggccagagcgctgacctggagagccaggcccccagcgagcccccccacccccagatgtactag

SEQ ID NO: 276560 - DNA, 1581 bp, Artificial Sequence
  derived and/or modified sequence
atgctgatgctgctggtgcggggcacccactacgagaacctgcggagcaaagtggtgcttcccaccccactcggcggacggtctacagaaacctttgtgtcagagtttccaggtccagatacaggcataagatggagacgaagtgacgaggcgctgcgcgtgaatgtgggcggagtcagaagacagctgtctgcccgagcccttgcccggttcccagggacacggttgggtcgtctccaggccgccgcaagcgaagaacaggcaaggcgtctctgtgatgactatgacgaggcagccagagagttttactttgacagacatcctggattcttcctaagtttactacacttctatcgcacgggtcacctacacgttttggacgagttgtgcgtgtttgcctttgggcaggaagcggattattggggccttggcgagaacgcactggccgcctgctgtagggcccggtatctcgaacgaaggctgacacagcctcatgcatgggatgaagattctgataccccaagtagcgtggatccatgtccagatgagatctctgacgtccagagggaattggcccgttacggcgctgcccgatgcggccgcctgcggcgtagattgtggctcactatggaaaaccctggctactccttgcccagtaaacttttctcctgtgtgagtattagtgtggtgttagctagtatcgcagccatgtgtattcacagcctgcccgagtaccaggcccgagaggcagctgctgccgttgcagccgtggccgccggtcggtcccccgagggcgtaagggacgatcctgtgcttcgacgtcttgagtacttttgtatcgcgtggttttcgtttgaagtgtctagtcgtctgctgctagcaccttccacgcggaattttttctgccacccactaaatttgatcgacatagtgagtgtgcttccattttacctgaccctgctggcgggcgtggctctgggggaccaggggggtaaggagtttggccacctgggcaaagtcgtccaggtctttcgcctgatgcggattttcagagtattaaaactcgccaggcacagtacaggactgcggagcttgggggcgaccctcaaacacagttaccgagaagtgggaatcctactcctctatctagcggtaggagtgtcagtttttagcggagttgcctatacggccgaaaaagaggaagacgtgggctttaacactattccagcatgttggtggtggggcactgtgagcatgacgaccgtgggatacggagacgtggttcctgtaacagttgcgggcaagctcgccgcttccggctgcatcctcggcggaatactagtggtcgctctgcccatcacaattatcttcaacaaattttctcacttctaccgtagacagaaagcgctcgaggctgctgtgaggaatagcaaccatcaggaattcgaggatttactgtcatcaatcgacggtgtctccgaagcttccctcgagacttcgagggaaacgtcccaggagggccagtccgccgacctcgagtcacaggccccaagcgagcctccacacccacaaatgtattag

SEQ ID NO: 276561 - DNA, 1581 bp, Artificial Sequence
  derived and/or modified sequence
atgctgatgctgctggtgcggggcacccactacgagaacctgcggagcaaagtggtcctgcccacccctctgggaggtaggagcacggagactttcgtatccgaattcccgggcccagacaccgggatccggtggcggcggtccgacgaggccctccgggtgaatgtgggcggggttaggagacagctttcggctagagccctggctagattcccagggacccggctcgggaggcttcaagcagccgcttctgaggaacaggctcggcgcctttgcgatgactatgatgaggccgctagagagttctattttgacagacatccagggttctttctgagcctgctacacttttataggaccggccaccttcacgttcttgacgagttgtgtgtatttgcctttggccaggaggccgactattggggtctcggtgaaaacgccctagcagcctgctgtcgagctcgctatttggagagacggctcacgcagccccacgcgtgggacgaggactcagacacacctagctccgtcgacccctgccccgatgagataagcgatgtccagagggaactggcccgctacggggcggccagatgtggacggctaagaagacgcctgtggttgactatggagaacccaggctatagcttaccctcaaaacttttcagctgcgtaagcattagcgtcgtgttggctagcatcgctgcgatgtgcattcactcactgccagaatatcaggcaagggaagcagcagcagcagtcgctgccgtcgccgccgggcgctccccggagggcgtgagggatgatccagtcctgagacgtctagagtacttttgcattgcatggttttctttcgaagttagctcacggctcttgctggctccttctacccgtaacttcttctgccaccccctcaatctaattgatattgtgtccgtgcttccattttaccttacactgttggcaggcgtggccctaggggatcaaggtgggaaggaatttggccatttgggaaaagtggtacaggtgttcaggttaatgcggatcttccgggtgttaaaactagcgcgccacagcacgggattgcggtccctaggggccacactgaagcacagctaccgcgaggtgggaattctcctgctctatcttgcggtgggggtctctgtgttttctggggtggcgtacaccgctgagaaggaagaagacgtgggttttaacactatcccagcttgttggtggtggggcacggtgtctatgacaacagtgggttacggggatgttgttcccgttacagttgcaggcaagctggccgcctctgggtgtattctgggtggtattcttgttgtggccctcccgatcacaatcatattcaataagtttagccatttctatcgtcggcaaaaagcattggaagccgcagtacggaattcaaatcaccaggaatttgaggatctgctgagctccattgatggggtcagcgaggcaagtctggaaacctctagagaaaccagccaggaggggcagagtgcagatttagaaagtcaggcgccaagcgagccacctcacccccaaatgtattag

SEQ ID NO: 276562 - DNA, 4538 bp, Artificial Sequence
  derived and/or modified sequence
ggcagcgatcgatgcggccttcagccgcgggggactaggcaaggaagaaggaaggagagggcagcggggccgcctgcagcaggaggctcggcggggccggcggggcagaggcgagaccgagtatagccagcggctcccagcctcggtggctttgggacagacacgcgaggcgcccgggaggtgccaccacaggtggagatccaagtggaggtgggagcggagctacatcacacgtttattgtgcattgattatgtgccagggaccatgctgccgataaacaccttgcatcatttaattctctgagcctctcctggaaagtatgatgctacccggttccacagacagggaaacaagcccagagagggcgacgaatgcactcaaggacagcagctagtgatgctgatgctgctggtccggggaacacactatgagaacctccggtctaaagtggtgctgccaacacccctaggagggaggagcactgaaacctttgtgagcgagttcccgggccccgacaccgggatccgctggcggcgaagcgacgaggcgctgcgcgtgaacgtgggtggcgtgcggcggcagctgagcgcgcgcgccctggcgcgcttcccgggcacgcggctgggccgcctgcaggccgcggcgtcggaggagcaggcgcggcgcctgtgcgacgactacgacgaggcggcgcgcgaattctacttcgaccggcacccgggcttcttcctgagcctgctgcacttctaccgcactggccacctgcacgtgctcgacgagctgtgcgtcttcgcctttggccaggaggccgactactggggcctaggcgagaacgcgcttgccgcgtgctgccgcgcgcgctacctggagaggcggctgacccagccgcacgcctgggacgaggacagcgacacgccgagcagcgtggacccgtgccccgacgagatctccgacgtgcagcgagaactggcgcgctatggcgcggcgcgctgtggccgcctgcgccgccgcctctggctgaccatggagaacccgggctactcgctgccgagcaagctcttcagctgcgtctccatcagcgtggtgctcgcctccatcgccgccatgtgcatccacagcctgcccgagtaccaggcccgcgaggcggcggccgccgtggctgcggtggccgcgggccgcagcccggaaggcgtgcgcgacgacccggtgctgcgacgcctcgagtacttctgcatcgcctggttcagcttcgaggtgtcgtcgcgcctcctgctggcgcccagtacgcgcaacttcttctgccacccgctcaacctcatcgacattgtgtctgtgctgcccttctatctcacgctgctggctggtgtggcactgggcgaccagggcggcaaggagttcggccacctgggcaaggtggtgcaggtgttccgcctcatgcgcatcttccgcgtactcaagttggcgcgccattccaccgggctgcgctcgctgggagccacgctcaagcacagctaccgtgaggtgggcatcttgctgctgtacctggctgtgggtgtgtcagtgttctctggtgtggcctacacagctgaaaaggaggaggacgtgggctttaacaccatcccagcctgctggtggtggggcacagtgagcatgaccaccgtgggctatggggatgtggtgccagtgacggtggctggcaagctggcagcctcaggctgcatcctagggggcatcctggtggtagcactccccatcaccatcatcttcaacaagttctcccacttctaccggcgccagaaggctctggaggcagccgtgcgcaacagcaaccaccaagagtttgaggacttgctgagcagcattgatggggtgtcggaggcatctctggagacatcccgagaaacctctcaggagggacagtctgcagatctagagagccaggcccccagtgagcctccacaccctcagatgtattaaaaccagggatccgtgaccccctgccatgcccctacagtagagattcctcccctgctaaagttcttcatggtagtgagcctcccaggatcactcatgctgtcctgagaaatgagattcaaaagctgcattccttcctccaaaggcccaggacaggacagtgctaccctagattctgtgagattctgcaagcaactcagaaagctttataaacctgcctccaagccattcatgaagcaggcatgagccagagggaggaagttgaaaggatactaatgattcctgagcacctcctgtacatgaaccaggtcatgtttggccttgtgttggagaaagagaattatccccacttcacagatgaggaaaccaaggctaagagatgagcgatgcctctcccagatgtcacaattagaagtggcagagtcaggtttggaatctgggcttgttggtgtgcctggagcaatgctccatcaactccatctttcttctgccctcatgaagtttgcgtgtgttttttggtgattcatggatccccagagttgatccacaagataagaaatccctttcagagccagggaagggtccagacaggagatttggatataggagctctggatctcagctgtggttcctttctaggagcatccaacaggagtcagcaatcaaagatgagtcctggagggaaggaggatgagtcctgggaggaagtaccatagcattgtacttgcctctttagctggtatgcaagatttgctaagcaataatcttccgaccttcctcccagggctgatgtgagagaaagaaaatctgaagggcccctggcctgagatctagacaacctagctgcgccaagacctgctgtgtaaagtggtccaatccctgcccccaagtccagattccagcccctctgtcaaatggtcagaatctgtgacccagagggcaatgaaagccaaggagagcagaggggtctctaacttaaagccagctcagctctgaaatgttcagagggctgacatatatgaatactggcttctaagaccctcccccaacagtctgaccttggcagttcctttctgcccatcacacagacgtccagccctacattgtccagccctacctagagtacccatccaggcccatgtgtgagagtcctctcccttctggccagctccagccccctcacccttgctgggggcatatctctcatacccacctgctgaatcttctcttcacttgctgagaaagtcagaggaggggatccagtagccctttccacatactgtggctacagcacccagcactgtgctgttgttgtctgactgtggctatctctgtcccatcaccctgagcctcaagatggaagacattgtctgcttgaactctgggcttggtgcagagtaggtatttggtaaatgttgaatagatcaaccaattcctacagcccactgggtgccaagctcagagggggaaaaaaagatagccagagagagacctggccctcaaaaaggtgtgaacaagactgaaaaggaggtccgttcagctccgcctgccctgtccctgcttggttcttgaagtttttacaatatattccttgtaggttcttcactcactcactcaacaaatacccgttggaagagtcttaaactggggcttcatgtgtggcctgcagtcatgtttcggcttagtccaacagtgtttttattatattttaagaatctgaatgcctttgcgtgaggcatgcactctcaggttccccatagtgtctcccccgctgccacccacaaacagacacacatgccgttgtgttatgcccagccactctgatatactggcttctgacttatgggctgcttactagtctcaagagatacagtggtggaaaaatatatccctatactcatgaagcttaccgactagtagggaagatagactctaatgcaataatcacataaatatagcgagctctactaagtacaggtgtgtataatgtatcagggaccatggcccgagaaagtgagaaggctttcctgagcaagtgacaatctaacctgccatccaaatgataaattgctaattaagcaaatgaggttccaggggggagtactccaagcagagagaatggcatgtgtgaaggtgtgtgtcatacacagggcctagtacatagtgggccccctacatacgcatggattctgggtctccagattggaacagaggatggagctaagcagcaaagggcctcccttgaattcaccacacacataccagcccttctgcacactctgctccttacatctaggcccagctgaacccaggttaggggcagatcagaagggctgcgtgtagcacccttatggtcttgcagaacacaccaagaaacccgacggcttccatattttctgaccctacaaacaggtccctaatactgatgtggagaaagctcaagagggaatcatctggcctgagcctaccatgaggctgtttgtggtcctggcagaaaagcaacaactcgctccccttcccatgtatcagtgaaaaccattatgcaaataaagagctgggcccc

SEQ ID NO: 276563 - DNA, 2129 bp, Artificial Sequence
  derived and/or modified sequence
agcgatcgatgcggccttcagccgcgggggactaggcaaggaagaaggaaggagagggcagcggggccgcctgcagcaggaggctcggcggggccggcggggcagaggcgagaccgagtatagccagcggctcccagcctcggtggctttgggacagacacgcgaggcgcccgggaggtgccaccacaggtgatgctgatgctgctggtccggggaacacactatgagaacctccggtctaaagtggtgctgccaacacccctaggagggaggagcactgaaacctttgtgagcgagttcccgggccccgacaccgggatccgctggcggcgaagcgacgaggcgctgcgcgtgaacgtgggtggcgtgcggcggcagctgagcgcgcgcgccctggcgcgcttcccgggcacgcggctgggccgcctgcaggccgcggcgtcggaggagcaggcgcggcgcctgtgcgacgactacgacgaggcggcgcgcgaattctacttcgaccggcacccgggcttcttcctgagcctgctgcacttctaccgcactggccacctgcacgtgctcgacgagctgtgcgtcttcgcctttggccaggaggccgactactggggcctaggcgagaacgcgcttgccgcgtgctgccgcgcgcgctacctggagaggcggctgacccagccgcacgcctgggacgaggacagcgacacgccgagcagcgtggacccgtgccccgacgagatctccgacgtgcagcgagaactggcgcgctatggcgcggcgcgctgtggccgcctgcgccgccgcctctggctgaccatggagaacccgggctactcgctgccgagcaagctcttcagctgcgtctccatcagcgtggtgctcgcctccatcgccgccatgtgcatccacagcctgcccgagtaccaggcccgcgaggcggcggccgccgtggctgcggtggccgcgggccgcagcccggaaggcgtgcgcgacgacccggtgctgcgacgcctcgagtacttctgcatcgcctggttcagcttcgaggtgtcgtcgcgcctcctgctggcgcccagtacgcgcaacttcttctgccacccgctcaacctcatcgacattgtgtctgtgctgcccttctatctcacgctgctggctggtgtggcactgggcgaccagggcggcaaggagttcggccacctgggcaaggtggtgcaggtgttccgcctcatgcgcatcttccgcgtactcaagttggcgcgccattccaccgggctgcgctcgctgggagccacgctcaagcacagctaccgtgaggtgggcatcttgctgctgtacctggctgtgggtgtgtcagtgttctctggtgtggcctacacagctgaaaaggaggaggacgtgggctttaacaccatcccagcctgctggtggtggggcacagtgagcatgaccaccgtgggctatggggatgtggtgccagtgacggtggctggcaagctggcagcctcaggctgcatcctagggggcatcctggtggtagcactccccatcaccatcatcttcaacaagttctcccacttctaccggcgccagaaggctctggaggcagccgtgcgcaacagcaaccaccaagagtttgaggacttgctgagcagcattgatggggtgtcggaggcatctctggagacatcccgagaaacctctcaggagggacagtctgcagatctagagagccaggcccccagtgagcctccacaccctcagatgtattaaaaccagggatccgtgaccccctgccatgcccctacagtagagattcctcccctgctaaagttcttcatggtagtgagcctcccaggatcactcatgctgtcctgagaaatgagattcaaaagctgcattccttcctccaaaggcccaggacaggacagtgctaccctagattctgtgagattctgcaagcaactcagaaagctttataaacctgcctccaagccattcatgaagcaggcatgagccagagggaggaagttgaaaggatactaatgattcctgagcacctcctgtacatgaaccaggtcatgtttggccttgtgttggagaaagagaattatccccacttcacagat

SEQ ID NO: 276564 - DNA, 1581 bp, Artificial Sequence
  derived and/or modified sequence
atgcttatgcttctcgtgagaggtacccactacgaaaatcttcgtagtaaagtcgttctccccactccactgggaggcaggtcaaccgaaaccttcgtgtctgaattcccaggacctgatactgggatccgctggcgcaggagcgacgaagccttgcgcgtaaatgtcgggggagtgcggagacagctgagcgctagggcgctggctaggtttcctggaacacggcttgggcgtcttcaggccgctgccagtgaagagcaggccaggcggctgtgcgatgactacgacgaggccgcaagggaattctacttcgaccgccatccagggtttttcctgtccttgctgcacttctacagaaccggtcatttacacgtcctcgatgagctgtgcgtatttgcgtttggacaagaagccgattattgggggcttggcgaaaatgctctggccgcttgttgccgggctcggtatctggagagacgacttacacagccccatgcctgggatgaagacagtgacacgccatcttccgtggatccgtgcccagatgagattagcgatgtccagcgcgaattggcccgttacggagctgcaagatgtgggaggttgcggcgaagactgtggttgacaatggagaatcctggctactccctccctagcaagctctttagctgtgtttccatcagtgtcgtcctcgcatctattgctgccatgtgcatccacagtctgcccgagtaccaggcacgggaggccgcagcagcagtcgcagctgttgccgctggtcggtcacctgagggtgttagggacgatccagtgctgaggagactcgagtatttttgtatcgcttggttctctttcgaagtcagttcccgcctactgttggcaccaagcactaggaacttcttctgtcacccattaaacctcatagatatcgtgagcgtcttaccgttttacttgacattgcttgccggagttgctctaggagaccagggcggaaaagaattcggtcacctcggaaaagtcgtgcaggtttttagactcatgcgcattttcagagtactgaagctggccagacacagtactggtctgcggtcactcggggcaactctaaaacatagctacagagaggttggcatactgctgctgtacttggcagtgggcgtgtccgttttttccggcgtggcttataccgcggagaaagaagaggacgtggggtttaacacaattccagcatgttggtggtggggaaccgtgtctatgaccactgtgggctacggcgatgtcgtccctgtcaccgtagcaggaaagctggccgcttctggctgcatacttggaggcattctcgtggtggctctcccaatcacaataatatttaataagttctcacacttctacagaaggcaaaaagcactagaggctgctgtgcgaaattccaaccatcaggagttcgaagacctgcttagttctatcgatggcgtgtccgaggccagccttgagacaagcagggagaccagtcaggaagggcaaagtgccgatctggagagtcaagcaccttccgaaccacctcatccccagatgtactag

SEQ ID NO: 276565 - DNA, 1581 bp, Artificial Sequence
  derived and/or modified sequence
atgttgatgctgcttgtgagaggcactcattacgagaacctgcgctcaaaggtggttctgccaacaccactagggggacgcagcaccgagacttttgtgagcgaatttcctggacctgacaccggcatcagatggagaagatccgatgaggccctccgcgtcaacgtaggaggagtcaggcgccagttgtctgctcgggctctggccagattccccggaacgcgtcttggacgactccaggccgcagcctcagaggaacaggctagacgactctgcgacgattacgacgaggcagccagggagttctacttcgatagacatccagggttcttcttgtcactgctgcatttctatcggacaggacatttgcacgtcctggacgaactctgcgttttcgctttcggccaggaagccgactactggggcttgggtgagaacgctctcgcggcatgctgcagagcccgttacctagagcgccgacttactcagccacacgcatgggacgaggattctgatactccatcctcggttgacccatgtcctgacgagatttcggacgtgcagagagaactcgccagatatggggcagccaggtgtggaaggctccgcaggcgcctgtggctgactatggagaaccctggatattcactgccaagcaagctgttctcctgtgtgagtatttctgtagtcctcgccagcatcgctgccatgtgcattcacagcctaccggagtaccaggcacgggaagctgctgccgctgtagctgccgtagcagcaggtagatctccggaaggggtccgcgatgatcccgttctccgcaggctcgagtatttctgtatcgcctggtttagttttgaggtatcatcccggcttcttttagcaccatcaacccgaaacttcttctgccatcccctgaacctgattgacatcgtctcggtgctgccattttacctcacgctgctcgctggcgtggccctgggggaccagggagggaaggagttcgggcatctgggcaaggttgttcaagtctttcgcctcatgcgaatctttagagttctcaaactggccaggcacagcaccggactacggtctttaggcgcaactctgaaacacagctacagagaggtgggtatcctcctgctgtaccttgcagttggtgtgtccgtgttctctggcgttgcatatacagcagagaaagaggaggacgtggggttcaatactatacccgcttgttggtggtggggcacggtcagtatgaccactgtggggtatggcgacgtcgtgcccgtgacggttgccggaaaactggccgcaagtggctgcatcctgggaggaattctcgtagtggccctgcccattactattattttcaacaaattcagtcatttctatcgcaggcagaaggccctcgaagcggctgtcaggaattccaatcaccaggagttcgaggatcttctctctagtattgatggagtttctgaggcttcattagagacaagccgagaaacaagccaggagggccaatcagccgatctggagtcacaggctccaagcgaaccaccccatccacagatgtactag

SEQ ID NO: 276566 - DNA, 586 bp, Artificial Sequence
  derived and/or modified sequence
gcctcctgggatggatgtcacccgcttactcctggccaccctgctggtcttcctctgcttcttcactgccaacagccacctgccacctgaggagaagctccgagatgacaggagcctgagaagcaactcctctgtgaacctactggatgtcccttctgtctctattgtggcgctgaacaagaaatccaaacagatcggcagaaaagcagcagaaaagaaaagatcttctaagaaggaggcttcgatgaagaaagtggtgcggccccggacccccctatctgcgccctgcgtggccacccgcaacagctgcaagccgccggcacccgcctgctgcgacccgtgcgcctcctgccagtgccgcttcttccgcagcgcctgctcctgccgcgtgctcagcctcaactgctgagcgcccccactcccggccgcgagcaggcagggcttcggggacgcggggcgcttctcgggcgggtgatccctaacagggcggcttcccagggctgcaggcgggcggaggttccaggagatgggacttcagggagacctggcttgggctaaaatcgaaatacaatatatataggctgct

SEQ ID NO: 276567 - DNA, 951 bp, Artificial Sequence
  derived and/or modified sequence
atgttcagcagaaccctgaccgagccctgccccctggccagcgagagcagagtgtacgtggacatcaccacctacaaccaggacaacgagaccctggaggtgcaccccccccccaccaccacctaccaggacgtgatcctgggcaccagaaagacctacgccatctacgacctgctggacaccgccatgatcaacaacagcagaaacctgaacatccagctgaagtggaagagaccccccgagaacgaggccccccccgtgcccttcctgcacgcccagagatacgtgagcggctacggcctgcagaagggcgagctgagcaccctgctgtacaacacccacccctacagagccttccccgtgctgctgctggacaccgtgccctggtacctgagactgtacgtgcacaccctgaccatcaccagcaagggcaaggagaacaagcccagctacatccactaccagcccgcccaggacagactgcagccccacctgctggagatgctgatccagctgcccgccaacagcgtgaccaaggtgagcatccagttcgagagagccctgctgaagtggaccgagtacacccccgaccccaaccacggcttctacgtgagccccagcgtgctgagcgccctggtgcccagcatggtggccgccaagcccgtggactgggaggagagccccctgttcaacagcctgttccccgtgagcgacggcagcaactacttcgtgagactgtacaccgagcccctgctggtgaacctgcccacccccgacttcagcatgccctacaacgtgatctgcctgacctgcaccgtggtggccgtgtgctacggcagcttctacaacctgctgaccagaaccttccacatcgaggagcccagaaccggcggcctggccaagagactggccaacctgatcagaagagccagaggcgtgccccccctgtag

SEQ ID NO: 276568 - DNA, 951 bp, Artificial Sequence
  derived and/or modified sequence
atgttctcccggacgctgaccgaaccctgccctctggcttccgagtctcgagtgtacgtagatattactacctacaatcaagacaacgaaaccctcgaggtgcaccctccgcctacaaccacttaccaggacgtgatcttgggcacgcggaagacctatgcaatctatgatcttcttgatacagctatgatcaacaacagcaggaatttaaacatccagctgaaatggaagcgcccccccgaaaacgaggccccacctgtaccatttcttcatgcccagcgctacgtaagcggatatggcttgcaaaaaggcgagctcagtaccctgctgtataacacccatccatatcgggccttccccgtgctcctgctcgacacagtgccgtggtatctcagactgtatgtacacacattgaccataacttctaaagggaaggaaaacaaaccctcgtatatccattaccaaccagcacaagacaggctgcaaccccacctgctggagatgttgattcagctgcccgccaacagtgtaaccaaggtaagcatccagttcgagcgtgcattattaaagtggacagaatacacccctgacccaaatcacggcttctatgtctcaccttctgtgcttagcgctctggtgcccagtatggttgccgccaaacccgtcgattgggaggagagtccactctttaacagcttgttcccagtctccgatggctccaattactttgtgagactatacacagagccgttgcttgtgaacctgccgaccccagactttagcatgccctataacgttatttgtctgacctgcactgtggtagcggtttgttacgggagcttctacaaccttcttacgagaacatttcacatagaggagcctagaacaggagggctcgccaaaaggcttgctaatttgatcaggcgggcccggggcgtgccacctttgtag

SEQ ID NO: 276569 - DNA, 951 bp, Artificial Sequence
  derived and/or modified sequence
atgttcagcaggaccctgacagagccctgccccctggccagcgagagccgggtgtatgtggacatcaccacctacaaccaggacaatgagaccctggaggtgcaccccccacccaccaccacctaccaggacgtcatcctgggcaccaggaagacctacgccatctatgacctgctggacacagccatgatcaacaacagcaggaacctgaacatccagctgaagtggaagaggcccccagaaaatgaggcccctcctgtgcccttcctgcacgcccagagatatgtgtctggctacggcctgcagaagggggagctgagcaccctgctgtacaacacccacccctaccgggccttccctgtgctgctgctggacacagtgccctggtacctgcggctgtatgtgcacaccctgaccatcaccagcaagggcaaggagaacaagcccagctacatccactaccagcctgcccaggaccggctgcagccccacctgctggagatgctgatccagctgcctgccaacagcgtgaccaaggtgtccatccagtttgagcgggccctgctgaagtggacagagtacaccccagaccccaaccacggcttctacgtgagccccagcgtgctgagcgccctggtgcccagcatggtggccgccaagcctgtggactgggaggagagccccctcttcaacagcctcttccctgtgtctgatggcagcaactactttgtgcggctgtacacagagcccctgctggtgaacctgcccaccccagacttctccatgccctacaacgtcatctgcctgacctgcaccgtggtggccgtgtgctacggcagcttctacaacctgctgaccaggaccttccacatcgaggagcccaggactggaggcctggccaagaggctggccaacctgatccggcgggcccggggcgtgccccccctgtag

SEQ ID NO: 276570 - DNA, 951 bp, Artificial Sequence
  derived and/or modified sequence
atgttcagccggaccctgaccgagccctgccccctggccagcgagtctagagtttatgtggacattacgacctacaaccaagacaacgaaaccctggaagtacacccaccgccaaccacaacgtatcaggatgttattctaggaactcgcaagacttacgccatctatgacctgctggacacagctatgatcaataactcccggaaccttaacatccagctaaaatggaagcgcccaccagagaacgaagccccacctgtacccttcttgcatgcccagagatatgtgtccggatacggccttcagaagggcgaactgtcaaccctgctttataacactcacccttacagggctttccctgtgctcctgctcgatactgtaccatggtatctccgcctatacgtccatacgctgaccatcacatcaaaaggaaaagagaataagccaagctacatccactatcaacccgcccaggataggcttcagccccatctcctcgagatgctcatccagctcccggctaactcagtcactaaggttagcatccagtttgagcgggcacttcttaaatggaccgagtataccccagatcccaatcatgggttttacgtttctcccagcgtgctgagcgccttggttccttccatggtcgcagccaagccagtcgattgggaggagtcgccactttttaactctctgttccccgtaagcgatggatctaattattttgtccgtctgtacacagagcctttgttggtaaatctcccaacacctgactttagcatgccctacaatgtgatttgtcttacctgtactgttgtggccgtatgctatgggagcttttataatctcctgaccagaactttccacattgaggagcctcggactggcggcctggcaaaaaggctcgccaacctcattaggcgggcccgcggcgtgcctccactgtag

SEQ ID NO: 276571 - DNA, 951 bp, Artificial Sequence
  derived and/or modified sequence
atgttttcccgaacacttactgaaccttgcccgttagctagtgagtcgagagtgtacgttgacataacaacatataaccaagacaacgagactcttgaagtacatcccccaccgactacaacgtaccaagacgtgatcctcggcaccagaaaaacgtatgccatctacgaccttctggataccgctatgataaataactcaagaaatttgaatattcagctgaagtggaaacggccaccggagaacgaggcacctcctgtaccatttctacacgcccagaggtatgtgagcgggtacggcctccaaaagggcgaactcagtaccctgctgtacaatacacatccgtaccgtgcatttccagtgctgctcttggataccgtcccatggtatctgcggttgtatgtgcacacattgacaataacaagtaaagggaaggagaataaaccatcgtatatacactaccagcctgcacaggaccgcctccaaccgcacttactggagatgcttattcaactgcccgctaattctgtgacaaaagtgagcatccagttcgagagagcactgctgaaatggacggaatacactcctgatcccaatcatggtttttatgtgtcaccatcagtcttatcggctctcgttcccagcatggtggcagcaaagccagtcgactgggaagagagcccactcttcaattctttgttcccagtgtccgatgggagcaactactttgtcagattgtatacagagcctcttctcgtgaaccttcccacccctgacttctccatgccctacaatgtcatttgcctcacttgcaccgtggttgctgtttgttatggctcattctataacctcctgacacgtacgtttcatattgaggagcccaggacagggggactggccaagaggctcgctaatcttatcaggcgagccaggggtgtgcctccattatag

SEQ ID NO: 276572 - protein, 426 aa, Artificial Sequence
  derived and/or modified sequence
MSRRKQAKPQHLNSEEPRPARRECAEVAPQVAGEPASELDDDVPKANCLSTESTDTPKAPVITLPSEAREQMATLGERTFNCCYPGCHFKTVHGMKDLDRHLRIHTGDKPHKCEFCDKCFSRKDNLTMHMRCHTSVKPHKCHLCDYAAVDSSSLKKHLRIHSDERPYKCQLCPYASRNSSQLTVHLRSHTGDTPFQCWLCSAKFKISSDLKRHMIVHSGEKPFKCEFCDVRCTMKANLKSHIRIKHTFKCLHCAFQGRDRADLLEHSRLHQADHPEKCPECSYSCSSAAALRVHSRVHCKDRPFKCDFCSFDTKRPSSLAKHVDKVHRDEAKTENRAPLGKEGLREGSSQHVAKIVTQRAFRCETCGASFVRDDSLRCHKKQHSDQSENKNSDLVTFPPESGASGQLSTLVSVGQLEAPLEPSQDL

SEQ ID NO: 276573 - DNA, 1281 bp, Artificial Sequence
  derived and/or modified sequence
atgagcagaagaaagcaggccaagccccagcacctgaacagcgaggagcccagacccgccagaagagagtgcgccgaggtggccccccaggtggccggcgagcccgccagcgagctggacgacgacgtgcccaaggccaactgcctgagcaccgagagcaccgacacccccaaggcccccgtgatcaccctgcccagcgaggccagagagcagatggccaccctgggcgagagaaccttcaactgctgctaccccggctgccacttcaagaccgtgcacggcatgaaggacctggacagacacctgagaatccacaccggcgacaagccccacaagtgcgagttctgcgacaagtgcttcagcagaaaggacaacctgaccatgcacatgagatgccacaccagcgtgaagccccacaagtgccacctgtgcgactacgccgccgtggacagcagcagcctgaagaagcacctgagaatccacagcgacgagagaccctacaagtgccagctgtgcccctacgccagcagaaacagcagccagctgaccgtgcacctgagaagccacaccggcgacacccccttccagtgctggctgtgcagcgccaagttcaagatcagcagcgacctgaagagacacatgatcgtgcacagcggcgagaagcccttcaagtgcgagttctgcgacgtgagatgcaccatgaaggccaacctgaagagccacatcagaatcaagcacaccttcaagtgcctgcactgcgccttccagggcagagacagagccgacctgctggagcacagcagactgcaccaggccgaccaccccgagaagtgccccgagtgcagctacagctgcagcagcgccgccgccctgagagtgcacagcagagtgcactgcaaggacagacccttcaagtgcgacttctgcagcttcgacaccaagagacccagcagcctggccaagcacgtggacaaggtgcacagagacgaggccaagaccgagaacagagcccccctgggcaaggagggcctgagagagggcagcagccagcacgtggccaagatcgtgacccagagagccttcagatgcgagacctgcggcgccagcttcgtgagagacgacagcctgagatgccacaagaagcagcacagcgaccagagcgagaacaagaacagcgacctggtgaccttcccccccgagagcggcgccagcggccagctgagcaccctggtgagcgtgggccagctggaggcccccctggagcccagccaggacctgtag

SEQ ID NO: 276574 - DNA, 363 bp, Artificial Sequence
  derived and/or modified sequence
tgagagagaaccttcaactgctgctaccccggctgccacttcaagaccgtgcacggcatgaaggacctggacagacacctgagaatccacaccggcgacaagccccacaagtgcgagttctgcgacaagtgcttcagcagaaaggacaacctgaccatgcacatgagatgccacaccagcgtgaagccccacaagtgccacctgtgcgactacgccgccgtggacagcagcagcctgaagaagcacctgagaatccacagcgacgagagaccctacaagtgccagctgtgcccctacgccagcagaaacagcagccagctgaccgtgcacctgagaagccacaccggccccggccccggctag

SEQ ID NO: 276575 - DNA, 1281 bp, Artificial Sequence
  derived and/or modified sequence
atgtccagaagaaagcaggccaagcctcagcacctgaacagcgaagagcctcgacctgcgaggagggagtgtgccgaagtggcaccccaggtcgctggggagcctgcgtccgagctggatgatgatgtgcctaaggccaattgtctctcaacggaatctacagacacccccaaagcccccgttataacacttcctagcgaggcccgggagcagatggctaccttgggcgagagaacttttaactgttgttaccccggatgtcattttaagacggtgcatgggatgaaggacctggaccggcacctgcgcatacacacgggcgacaagcctcacaaatgcgaattctgcgacaagtgtttctcgcggaaagacaaccttactatgcacatgcgttgccacaccagtgtgaagccccacaaatgccacttgtgcgattatgctgcagtggattcatctagtctgaagaagcatttacgtatccacagcgatgaacgcccctataaatgtcagctgtgtccttatgcgagcagaaatagctcccagctcacagtgcacctacgaagccacacaggcgatacaccattccagtgttggctgtgctccgccaaatttaaaatcagcagcgacctgaagaggcacatgattgtgcactccggagagaagccgttcaagtgtgagttctgtgacgtccgttgcacaatgaaggctaacctaaagagccacatccggatcaaacacaccttcaaatgcctgcactgtgcatttcagggcagagacagagccgatctgcttgagcactcaagactccaccaggccgatcatcccgagaaatgccccgaatgtagctatagctgttcatccgcagctgccctccgagtgcactcccgcgtccactgtaaggacaggccctttaagtgcgacttttgtagtttcgacaccaaacgaccttcaagcctcgccaagcatgtggataaagtccacagagatgaggctaagacagagaatcgagccccactgggcaaagaaggactcagggagggtagtagccagcatgttgcaaagattgtcacacagcgtgccttccgatgcgagacatgcggcgcttcctttgtaagggacgatagcctgagatgtcacaagaaacagcatagtgaccagtccgaaaataaaaatagtgatctggtgactttcccaccagagtcgggggcgtcgggacagcttagtactctggtgagcgtcggacagctggaggctcctctggaacctagccaggatctgtag

SEQ ID NO: 276576 - DNA, 363 bp, Artificial Sequence
  derived and/or modified sequence
taggagagaaccttcaactgctgttacccgggatgccatttcaaaaccgtgcacggaatgaaggaccttgatcgccatttgagaatccacaccggcgataagccccataaatgcgagttctgcgacaaatgtttcagcaggaaagacaatctgaccatgcatatgcggtgccacacctccgtgaagccacataagtgccacctctgcgattatgcagccgtggatagctccagtttgaagaagcatttaaggatccattctgacgaaagaccatacaagtgccagctctgcccatacgcatccaggaactctagtcagttgactgttcatctgcgatcacacacagggcctggtcccggctag

SEQ ID NO: 276577 - DNA, 1281 bp, Artificial Sequence
  derived and/or modified sequence
atgagcaggaggaagcaggccaagccccagcacctgaacagcgaggagcccaggcctgccaggagagaatgtgccgaggtggccccccaggtggccggggagcccgccagcgagctggatgatgatgtgcccaaggccaactgcctgagcacagagagcacagacacccccaaggcccctgtgatcaccctgcccagcgaggcccgggagcagatggccaccctgggggagaggaccttcaactgctgctacccaggctgccacttcaagacagtgcacggcatgaaggacctggacagacacctgcgcatccacactggagacaagccccacaagtgtgagttctgtgacaagtgcttcagcaggaaggacaacctgaccatgcacatgcgctgccacacctctgtgaagccccacaagtgccacctgtgtgactatgctgctgtggacagcagcagcctgaagaagcacctgcgcatccacagtgatgagcggccctacaagtgccagctgtgcccctatgccagcaggaacagcagccagctgactgtgcacctgcggagccacactggagacacccccttccagtgctggctgtgcagcgccaagttcaagatcagcagtgacctgaagaggcacatgattgtgcacagcggggagaagcccttcaagtgtgagttctgtgatgtgcgctgcaccatgaaggccaacctgaagagccacatccgcatcaagcacaccttcaagtgcctgcactgtgccttccagggccgggacagagctgacctgctggagcacagccggctgcaccaggccgaccaccctgagaagtgcccagagtgcagctacagctgcagcagcgctgctgccctgcgggtgcacagccgggtgcactgcaaggaccggcccttcaagtgtgacttctgcagctttgacaccaagaggcccagcagcctggccaagcacgtggacaaggtgcacagagatgaggccaagacagagaacagagcccccctgggcaaggagggcctgcgggagggcagcagccagcacgtggccaagatcgtgacccagagggccttccgctgtgagacctgtggggccagctttgtgagagatgacagcctgcgctgccacaagaagcagcacagcgaccagagcgagaacaagaacagcgacctggtgaccttccccccagagagcggggccagcggccagctgagcaccctggtgtctgtgggccagctggaggcccccctggagcccagccaggacctgtag

SEQ ID NO: 276578 - DNA, 363 bp, Artificial Sequence
  derived and/or modified sequence
tgagaaagaaccttcaactgctgctacccaggctgccacttcaagacagtgcacggcatgaaggacctggacagacacctgcgcatccacactggagacaagccccacaagtgtgagttctgtgacaagtgcttcagcaggaaggacaacctgaccatgcacatgcgctgccacacctctgtgaagccccacaagtgccacctgtgtgactatgctgctgtggacagcagcagcctgaagaagcacctgcgcatccacagtgatgagcggccctacaagtgccagctgtgcccctatgccagcaggaacagcagccagctgactgtgcacctgcggagccacactggacctggccctggatag

SEQ ID NO: 276579 - DNA, 1281 bp, Artificial Sequence
  derived and/or modified sequence
atgagccggcggaagcaggccaagccccagcacctgaacagcgaggagccgaggcccgcccgccgcgaatgcgccgaggtggcgccccaagtcgctggagaaccggcgtctgaactcgacgacgacgttccaaaggctaattgcctatccacagagtctacagatactccgaaggcacctgtcataaccctcccctccgaggcgcgggagcagatggctaccttaggggagcgtacgttcaattgctgttaccctggctgtcacttcaagacagttcacgggatgaaagacctggaccggcacctgagaattcacaccggggataagcctcataagtgcgagttctgtgataaatgtttttcaagaaaagataacctcacaatgcacatgagatgccatacctccgtcaaaccgcataaatgtcacctctgtgactacgccgctgttgactccagtagtctgaagaaacacctgagaattcactcagatgagaggccgtataagtgtcagctgtgtccctatgcttcccgcaattccagccaactcacagtccatttgcggagccacacgggggatacacctttccagtgctggctgtgttctgcaaagttcaagattagtagtgacttaaaaaggcatatgatcgttcattctggggagaaaccatttaagtgcgagttttgcgatgttcggtgcactatgaaggccaatttaaagagccatattagaattaagcatacattcaagtgtttgcactgtgcgtttcaagggcgggaccgagcagatctgcttgagcactcccggctccaccaggccgatcacccggaaaagtgtcccgaatgcagctattcatgctctagtgccgccgccctgagagtccattctagggtgcattgcaaagatcgacccttcaagtgcgacttttgcagcttcgacactaaacggccttctagcctggctaagcacgtagataaggtgcaccgcgacgaagccaagactgaaaatcgggctcccctaggaaaggaggggctaagggaagggagttctcaacacgtcgcaaagattgtgactcagagagccttccggtgtgagacatgtggagcctcctttgttagggatgattctcttagatgtcataagaagcagcatagtgaccaaagtgaaaataaaaactccgatcttgtcacttttcctcctgaatctggggcatctgggcagcttagcaccctggtgtcagtgggacagcttgaggctccattggaaccctctcaggatctctag

SEQ ID NO: 276580 - DNA, 363 bp, Artificial Sequence
  derived and/or modified sequence
tgagagcggaccttcaactgctgctaccccggctgccacttcaagaccgtacacggaatgaaggatctggacaggcatctgcgcattcatacaggggataagccccacaagtgcgagttttgcgacaagtgtttcagccggaaggacaacctgaccatgcatatgagatgccacaccagtgtgaagcctcacaagtgtcatctgtgtgactacgccgctgtggactccagctcactgaagaagcacctcagaatccactctgatgaacggccctacaagtgccagctgtgcccttatgcttccaggaattcttcacagttgactgtgcacctgagaagtcatacagggccaggtccaggctag

SEQ ID NO: 276581 - DNA, 1281 bp, Artificial Sequence
  derived and/or modified sequence
atgtcacgcaggaagcaggcaaagccgcaacacttgaacagcgaggaacctcgacctgctcgcagggagtgtgcagaagtggccccacaggtggccggagagccggcttctgagcttgacgatgatgtgcctaaggcaaactgcttgagcactgaatcaaccgacacacccaaggcaccagtcatcacactcccatcagaggcacgtgaacagatggctacactgggggaaagaactttcaattgttgctacccaggttgccattttaaaactgtacacggcatgaaagatctggaccggcacctgcgaatccacaccggggataaaccacacaaatgcgagttttgcgataagtgtttcagccgaaaggataacttgacaatgcatatgaggtgccacacatcagtcaaaccccacaaatgccacctgtgcgattatgcagcagttgactctagctctctcaaaaagcatctccggatccactccgacgagcgcccatataagtgccagttatgtccttacgcttcaagaaactcctcccagctcacagttcacttgcgttcacacactggtgatactcccttccagtgctggctgtgttccgcgaagttcaaaatttcctccgacctgaagcggcacatgattgtgcacagtggtgagaaaccattcaaatgcgagttctgcgatgttcggtgtacaatgaaggccaacctgaaatctcacattaggatcaagcatactttcaagtgtctgcattgtgcattccagggacgcgatagggcagatctgctcgaacactcacgtctccaccaggctgatcaccctgagaaatgcccagagtgctcatactcctgttcctctgctgcggcattgcgagtgcactcaagagttcactgcaaggataggcctttcaaatgtgatttctgtagctttgataccaagcgccctagctctctcgccaagcacgtcgataaagtccaccgggatgaggccaagacggagaatagagcccctctgggtaaggagggcctgagagagggttctagccagcacgtagccaagatcgtaacccaaagggcatttaggtgtgaaacatgcggtgcttcttttgtccgtgacgactcgctccgctgtcacaagaaacagcatagtgatcagtccgagaacaagaactccgatcttgtcacttttccacctgaaagcggcgcatccggtcaattgtctacccttgtctcagttggtcaattagaggctcccctcgagccatctcaggacctgtag

SEQ ID NO: 276582 - DNA, 363 bp, Artificial Sequence
  derived and/or modified sequence
taggagcggacgttcaattgttgttatcctggttgccactttaaaactgtgcacggcatgaaagacttggaccggcatctccgcattcacaccggggacaagccgcacaagtgcgagttttgcgacaaatgtttctcaagaaaggataacctgactatgcacatgagatgccacacttccgtgaagccccataaatgtcacctctgcgattacgccgctgtcgactcctcttcgctcaaaaagcacttacgcattcatagtgacgaaagaccatacaagtgtcaactctgtccttatgcgagcaggaacagctctcagctaaccgtgcatctgcgatctcacacaggacccggacccggttag

SEQ ID NO: 276583 - DNA, 2234 bp, Artificial Sequence
  derived and/or modified sequence
ctgcgcttctgaaattttaatgggcaaacgaatcacctggggatctcgttaaaatgcagacacggtttctcaaactttaatgtgcatgcgaatcacctggggatcttgttaaaatgcagattctgattcagcgggtctggggtagagcccgagagtctgcatttctaacgagctcccaggtggcgcgggctgcccgggagcggaccgcaagtccgcgggactcctggggtcttggctccaggccaatcagccgtcaggactcttgataaatcgccctgctcggctgatgagcagaattgccgggacatgcgcgttccggccgaaggggggtaatttccgaactccgggaattcgttgtgtgaagtaggccactcctagggacgcgcggggagcccggtcctcgcgccatgtcgcggcgcaagcaggccaagccccagcacctcaactccgaggagccgcggcctgcgcgccgggagtgtgcggaggtggccccgcaggtggcgggggagccggcttcagaacttgatgatgatgttccaaaagcaaactgcctctccactgaaagcactgacactccgaaggcccctgtcatcactcttccctcagaggcaagggaacaaatggccacccttggagagaggacgttcaactgttgctacccaggttgccacttcaaaactgtccatggcatgaaagacttggaccgccatctcagaatccacacgggagacaaaccgcacaagtgtgagttctgtgacaagtgcttcagccggaaggacaacctgaccatgcacatgcggtgccacaccagtgtgaagccacacaagtgtcacctgtgtgactacgctgccgtggacagcagtagcctcaagaagcacctgcggatccactctgatgagcggccgtacaaatgccagctctgcccctatgccagccgcaactccagccagctcaccgtccacctgcgatctcacacgggggatacccccttccagtgctggctctgtagcgccaagttcaaaatcagctcggacttgaaaaggcacatgatcgtgcactcgggggagaagcctttcaagtgcgagttctgcgacgtccgctgcaccatgaaggcgaatctcaaatcgcacatccgcatcaagcacaccttcaaatgtctgcactgtgccttccagggccgggaccgggctgacctcctggagcacagccggctgcaccaggccgaccacccggagaagtgtccagagtgcagctactcctgctccagcgcggccgccctgcgcgtgcacagcagagtccactgtaaggaccgtcccttcaagtgtgacttctgcagcttcgacacgaagcggcccagcagcctggccaagcacgtcgacaaggtgcacagggacgaggccaagacggagaaccgggcccctctgggcaaggaagggctcagagagggcagctcccagcacgtggccaagatcgtgacgcagagggccttccgctgtgagacctgcggcgcctccttcgtcagggatgactctctgagatgccacaagaagcagcacagtgatcagagtgagaacaagaactcagacttggtcaccttcccaccggaaagcggtgcctcgggacagctcagcaccctggtctccgtggggcagctcgaggctcccctagagcccagccaagacctctagctcagccgaagagggtggtcagctgtcggaacttctgaccagtgctgttgcccagccctccagaggtgaggccactgagagacaggctttgggcaccacttctggggctggccgctccaacttcacaggccttcagaggcgatggctgggcgacagtgacgaaagcaaagcaaagcagggctgtggagacactcctcgcatttgtctcttccctccaaggattatctgagcaagtcgacttgttcattcaaaggcggggtctgccaagccctgctctatccaatggggatagcttctacgtaacggattccaattttaaaactgatccatctctgatggaattattaaacttagacgatatagaaaactaaaactaatctctagagtggaaagggttaaagtgaggaaggtgtacgtgaagggtctggggttgctggaaaacttctatttcataacctgggtgatcgttctaagagtgtttgccttatatgtttgtgtggtttcttttacctgttgtcttacaataaaaaaggcagactcatggta

SEQ ID NO: 276584 - DNA, 445 bp, Artificial Sequence
  derived and/or modified sequence
agagaggacgttcaactgttgctacccaggttgccacttcaaaactgtccatggcatgaaagacttggaccgccatctcagaatccacacgggagacaaaccgcacaagtgtgagttctgtgacaagtgcttcagccggaaggacaacctgaccatgcacatgcggtgccacaccagtgtgaagccacacaagtgtcacctgtgtgactacgctgccgtggacagcagtagcctcaagaagcacctgcggatccactctgatgagcggccgtacaaatgccagctctgcccctatgccagccgcaactccagccagctcaccgtccacctgcgatctcacacggggccgggaccgggctgacctcctggagcacagccggctgcaccaggccgaccacccggagaagtgtccagagtgcagctactcctgctccagcgcggccgc

SEQ ID NO: 276585 - protein, 477 aa, Artificial Sequence [sequence omitted]

SEQ ID NO: 276586 - protein, 1273 aa, Artificial Sequence
  derived and/or modified sequence
MVANWRHHPAVVEQWSKVICALTSRLLRFTYGPSFPAFKVPDEDASLIPPEMDNECVAQTWFRFLHMLSNPVDLSNPAIISSTPKFQEQFLNVSGMPQELNQYPCLKHLPQIFFRAMRGISCLVDAFLGISRPRSDSAPPTPVNRLSMPQSAAVSTTPPHNRRHRAVTVNKATMKTSTVSTAHASKVQHQTSSTSPLSSPNQTSSEPRPLPAPRRPKVNSILNLFGSWLFDAAFVHCKLHNGINRDSSMTAITTQASMEFRRKGSQMSTDTMVSNPMFDASEFPDNYEAGRAEACGTLCRIFCSKKTGEEILPAYLSRFYMLLIQGLQINDYVCHPVLASVILNSPPLFCCDLKGIDVVVPYFISALETILPDRELSKFKSYVNPTELRRSSINILLSLLPLPHHFGTVKSEVVLEGKFSNDDSSSYDKPITFLSLKLRLVNILIGALQTETDPNNTQMILGAMLNIVQDSALLEAIGCQMEMGGGENNLKSHSRTNSGISSASGGSTEPTTPDSERPAQALLRDYALNTDSAAGLLIRSIHLVTQRLNSQWRQDMSISLAALELLSGLAKVKVMVDSGDRKRAISSVCTYIVYQCSRPAPLHSRDLHSMIVAAFQCLCVWLTEHPDMLDEKDCLKEVLEIVELGISGSKSKNNEQEVKYKGDKEPNPASMRVKDAAEATLTCIMQLLGAFPSPSGPASPCSLVNETTLIKYSRLPTINKHSFRYFVLDNSVILAMLEQPLGNEQNDFFPSVTVLVRGMSGRLAWAQQLCLLPRGAKANQKLFVPEPRPVPKNDVGFKYSVKHRPFPEEVDKIPFVKADLSIPDLHEIVTEELEERHEKLRSGMAQQIAYEIHLEQQSEEELQKRSFPDPVTDCKPPPPAQEFQTARLFLSHFGFLSLEALKEPANSRLPPHLIALDSTIPGFFDDIGYLDLLPCRPFDTVFIFYMKPGQKTNQEILKNVESSRTVQPHFLEFLLSLGWSVDVGRHPGWTGHVSTSWSINCCDDGEGSQQEEVISSEDIGASIFNGQKKVLYYADALTEIAFVVPSPVESLTDSLESNISDQDSDSNMDLMPGILKQPSLTLELFPNHTDNLNSSQRLSPSSRMRKLPQGRPVPPLGPETRVSVVWVERYDDIENFPLSELMTEISTGVETTANSSTSLRSTTLEKEVPVIFIHPLNTGLFRIKIQGATGKFNMVIPLVDGMIVSRRALGFLVRQTVINICRRKRLESDSYSPPHVRRKQKITDIVNKYRNKQLEPEFYTSLFQEVGLKNCSS

SEQ ID NO: 276587 - protein, 1323 aa, Artificial Sequence
  derived and/or modified sequence
INDILLAPPTVQGGIAENLAEKLIGVLFEVWLLACTRCFPTPPYWKTAKEMVANWRHHPAVVEQWSKVICALTSRLLRFTYGPSFPAFKVPDEDASLIPPEMDNECVAQTWFRFLHMLSNPVDLSNPAIISSTPKFQEQFLNVSGMPQELNQYPCLKHLPQIFFRAMRGISCLVDAFLGISRPRSDSAPPTPVNRLSMPQSAAVSTTPPHNRRHRAVTVNKATMKTSTVSTAHASKVQHQTSSTSPLSSPNQTSSEPRPLPAPRRPKVNSILNLFGSWLFDAAFVHCKLHNGINRDSSMTAITTQASMEFRRKGSQMSTDTMVSNPMFDASEFPDNYEAGRAEACGTLCRIFCSKKTGEEILPAYLSRFYMLLIQGLQINDYVCHPVLASVILNSPPLFCCDLKGIDVVVPYFISALETILPDRELSKFKSYVNPTELRRSSINILLSLLPLPHHFGTVKSEVVLEGKFSNDDSSSYDKPITFLSLKLRLVNILIGALQTETDPNNTQMILGAMLNIVQDSALLEAIGCQMEMGGGENNLKSHSRTNSGISSASGGSTEPTTPDSERPAQALLRDYALNTDSAAGLLIRSIHLVTQRLNSQWRQDMSISLAALELLSGLAKVKVMVDSGDRKRAISSVCTYIVYQCSRPAPLHSRDLHSMIVAAFQCLCVWLTEHPDMLDEKDCLKEVLEIVELGISGSKSKNNEQEVKYKGDKEPNPASMRVKDAAEATLTCIMQLLGAFPSPSGPASPCSLVNETTLIKYSRLPTINKHSFRYFVLDNSVILAMLEQPLGNEQNDFFPSVTVLVRGMSGRLAWAQQLCLLPRGAKANQKLFVPEPRPVPKNDVGFKYSVKHRPFPEEVDKIPFVKADLSIPDLHEIVTEELEERHEKLRSGMAQQIAYEIHLEQQSEEELQKRSFPDPVTDCKPPPPAQEFQTARLFLSHFGFLSLEALKEPANSRLPPHLIALDSTIPGFFDDIGYLDLLPCRPFDTVFIFYMKPGQKTNQEILKNVESSRTVQPHFLEFLLSLGWSVDVGRHPGWTGHVSTSWSINCCDDGEGSQQEEVISSEDIGASIFNGQKKVLYYADALTEIAFVVPSPVESLTDSLESNISDQDSDSNMDLMPGILKQPSLTLELFPNHTDNLNSSQRLSPSSRMRKLPQGRPVPPLGPETRVSVVWVERYDDIENFPLSELMTEISTGVETTANSSTSLRSTTLEKEVPVIFIHPLNTGLFRIKIQGATGKFNMVIPLVDGMIVSRRALGFLVRQTVINICRRKRLESDSYSPPHVRRKQKITDIVNKYRNKQLEPEFYTSLFQEVGLKNCSS

SEQ ID NO: 276588 - DNA, 3822 bp, Artificial Sequence
  derived and/or modified sequence
atggtggccaactggagacaccaccccgccgtggtggagcagtggagcaaggtgatctgcgccctgaccagcagactgctgagattcacctacggccccagcttccccgccttcaaggtgcccgacgaggacgccagcctgatcccccccgagatggacaacgagtgcgtggcccagacctggttcagattcctgcacatgctgagcaaccccgtggacctgagcaaccccgccatcatcagcagcacccccaagttccaggagcagttcctgaacgtgagcggcatgccccaggagctgaaccagtacccctgcctgaagcacctgccccagatcttcttcagagccatgagaggcatcagctgcctggtggacgccttcctgggcatcagcagacccagaagcgacagcgccccccccacccccgtgaacagactgagcatgccccagagcgccgccgtgagcaccacccccccccacaacagaagacacagagccgtgaccgtgaacaaggccaccatgaagaccagcaccgtgagcaccgcccacgccagcaaggtgcagcaccagaccagcagcaccagccccctgagcagccccaaccagaccagcagcgagcccagacccctgcccgcccccagaagacccaaggtgaacagcatcctgaacctgttcggcagctggctgttcgacgccgccttcgtgcactgcaagctgcacaacggcatcaacagagacagcagcatgaccgccatcaccacccaggccagcatggagttcagaagaaagggcagccagatgagcaccgacaccatggtgagcaaccccatgttcgacgccagcgagttccccgacaactacgaggccggcagagccgaggcctgcggcaccctgtgcagaatcttctgcagcaagaagaccggcgaggagatcctgcccgcctacctgagcagattctacatgctgctgatccagggcctgcagatcaacgactacgtgtgccaccccgtgctggccagcgtgatcctgaacagcccccccctgttctgctgcgacctgaagggcatcgacgtggtggtgccctacttcatcagcgccctggagaccatcctgcccgacagagagctgagcaagttcaagagctacgtgaaccccaccgagctgagaagaagcagcatcaacatcctgctgagcctgctgcccctgccccaccacttcggcaccgtgaagagcgaggtggtgctggagggcaagttcagcaacgacgacagcagcagctacgacaagcccatcaccttcctgagcctgaagctgagactggtgaacatcctgatcggcgccctgcagaccgagaccgaccccaacaacacccagatgatcctgggcgccatgctgaacatcgtgcaggacagcgccctgctggaggccatcggctgccagatggagatgggcggcggcgagaacaacctgaagagccacagcagaaccaacagcggcatcagcagcgccagcggcggcagcaccgagcccaccacccccgacagcgagagacccgcccaggccctgctgagagactacgccctgaacaccgacagcgccgccggcctgctgatcagaagcatccacctggtgacccagagactgaacagccagtggagacaggacatgagcatcagcctggccgccctggagctgctgagcggcctggccaaggtgaaggtgatggtggacagcggcgacagaaagagagccatcagcagcgtgtgcacctacatcgtgtaccagtgcagcagacccgcccccctgcacagcagagacctgcacagcatgatcgtggccgccttccagtgcctgtgcgtgtggctgaccgagcaccccgacatgctggacgagaaggactgcctgaaggaggtgctggagatcgtggagctgggcatcagcggcagcaagagcaagaacaacgagcaggaggtgaagtacaagggcgacaaggagcccaaccccgccagcatgagagtgaaggacgccgccgaggccaccctgacctgcatcatgcagctgctgggcgccttccccagccccagcggccccgccagcccctgcagcctggtgaacgagaccaccctgatcaagtacagcagactgcccaccatcaacaagcacagcttcagatacttcgtgctggacaacagcgtgatcctggccatgctggagcagcccctgggcaacgagcagaacgacttcttccccagcgtgaccgtgctggtgagaggcatgagcggcagactggcctgggcccagcagctgtgcctgctgcccagaggcgccaaggccaaccagaagctgttcgtgcccgagcccagacccgtgcccaagaacgacgtgggcttcaagtacagcgtgaagcacagacccttccccgaggaggtggacaagatccccttcgtgaaggccgacctgagcatccccgacctgcacgagatcgtgaccgaggagctggaggagagacacgagaagctgagaagcggcatggcccagcagatcgcctacgagatccacctggagcagcagagcgaggaggagctgcagaagagaagcttccccgaccccgtgaccgactgcaagccccccccccccgcccaggagttccagaccgccagactgttcctgagccacttcggcttcctgagcctggaggccctgaaggagcccgccaacagcagactgcccccccacctgatcgccctggacagcaccatccccggcttcttcgacgacatcggctacctggacctgctgccctgcagacccttcgacaccgtgttcatcttctacatgaagcccggccagaagaccaaccaggagatcctgaagaacgtggagagcagcagaaccgtgcagccccacttcctggagttcctgctgagcctgggctggagcgtggacgtgggcagacaccccggctggaccggccacgtgagcaccagctggagcatcaactgctgcgacgacggcgagggcagccagcaggaggaggtgatcagcagcgaggacatcggcgccagcatcttcaacggccagaagaaggtgctgtactacgccgacgccctgaccgagatcgccttcgtggtgcccagccccgtggagagcctgaccgacagcctggagagcaacatcagcgaccaggacagcgacagcaacatggacctgatgcccggcatcctgaagcagcccagcctgaccctggagctgttccccaaccacaccgacaacctgaacagcagccagagactgagccccagcagcagaatgagaaagctgccccagggcagacccgtgccccccctgggccccgagaccagagtgagcgtggtgtgggtggagagatacgacgacatcgagaacttccccctgagcgagctgatgaccgagatcagcaccggcgtggagaccaccgccaacagcagcaccagcctgagaagcaccaccctggagaaggaggtgcccgtgatcttcatccaccccctgaacaccggcctgttcagaatcaagatccagggcgccaccggcaagttcaacatggtgatccccctggtggacggcatgatcgtgagcagaagagccctgggcttcctggtgagacagaccgtgatcaacatctgcagaagaaagagactggagagcgacagctacagccccccccacgtgagaagaaagcagaagatcaccgacatcgtgaacaagtacagaaacaagcagctggagcccgagttctacaccagcctgttccaggaggtgggcctgaagaactgcagcagctag

SEQ ID NO: 276589 - DNA, 3972 bp, Artificial Sequence
  derived and/or modified sequence
atcaacgacatcctgctggccccccccaccgtgcagggcggcatcgccgagaacctggccgagaagctgatcggcgtgctgttcgaggtgtggctgctggcctgcaccagatgcttccccacccccccctactggaagaccgccaaggagatggtggccaactggagacaccaccccgccgtggtggagcagtggagcaaggtgatctgcgccctgaccagcagactgctgagattcacctacggccccagcttccccgccttcaaggtgcccgacgaggacgccagcctgatcccccccgagatggacaacgagtgcgtggcccagacctggttcagattcctgcacatgctgagcaaccccgtggacctgagcaaccccgccatcatcagcagcacccccaagttccaggagcagttcctgaacgtgagcggcatgccccaggagctgaaccagtacccctgcctgaagcacctgccccagatcttcttcagagccatgagaggcatcagctgcctggtggacgccttcctgggcatcagcagacccagaagcgacagcgccccccccacccccgtgaacagactgagcatgccccagagcgccgccgtgagcaccacccccccccacaacagaagacacagagccgtgaccgtgaacaaggccaccatgaagaccagcaccgtgagcaccgcccacgccagcaaggtgcagcaccagaccagcagcaccagccccctgagcagccccaaccagaccagcagcgagcccagacccctgcccgcccccagaagacccaaggtgaacagcatcctgaacctgttcggcagctggctgttcgacgccgccttcgtgcactgcaagctgcacaacggcatcaacagagacagcagcatgaccgccatcaccacccaggccagcatggagttcagaagaaagggcagccagatgagcaccgacaccatggtgagcaaccccatgttcgacgccagcgagttccccgacaactacgaggccggcagagccgaggcctgcggcaccctgtgcagaatcttctgcagcaagaagaccggcgaggagatcctgcccgcctacctgagcagattctacatgctgctgatccagggcctgcagatcaacgactacgtgtgccaccccgtgctggccagcgtgatcctgaacagcccccccctgttctgctgcgacctgaagggcatcgacgtggtggtgccctacttcatcagcgccctggagaccatcctgcccgacagagagctgagcaagttcaagagctacgtgaaccccaccgagctgagaagaagcagcatcaacatcctgctgagcctgctgcccctgccccaccacttcggcaccgtgaagagcgaggtggtgctggagggcaagttcagcaacgacgacagcagcagctacgacaagcccatcaccttcctgagcctgaagctgagactggtgaacatcctgatcggcgccctgcagaccgagaccgaccccaacaacacccagatgatcctgggcgccatgctgaacatcgtgcaggacagcgccctgctggaggccatcggctgccagatggagatgggcggcggcgagaacaacctgaagagccacagcagaaccaacagcggcatcagcagcgccagcggcggcagcaccgagcccaccacccccgacagcgagagacccgcccaggccctgctgagagactacgccctgaacaccgacagcgccgccggcctgctgatcagaagcatccacctggtgacccagagactgaacagccagtggagacaggacatgagcatcagcctggccgccctggagctgctgagcggcctggccaaggtgaaggtgatggtggacagcggcgacagaaagagagccatcagcagcgtgtgcacctacatcgtgtaccagtgcagcagacccgcccccctgcacagcagagacctgcacagcatgatcgtggccgccttccagtgcctgtgcgtgtggctgaccgagcaccccgacatgctggacgagaaggactgcctgaaggaggtgctggagatcgtggagctgggcatcagcggcagcaagagcaagaacaacgagcaggaggtgaagtacaagggcgacaaggagcccaaccccgccagcatgagagtgaaggacgccgccgaggccaccctgacctgcatcatgcagctgctgggcgccttccccagccccagcggccccgccagcccctgcagcctggtgaacgagaccaccctgatcaagtacagcagactgcccaccatcaacaagcacagcttcagatacttcgtgctggacaacagcgtgatcctggccatgctggagcagcccctgggcaacgagcagaacgacttcttccccagcgtgaccgtgctggtgagaggcatgagcggcagactggcctgggcccagcagctgtgcctgctgcccagaggcgccaaggccaaccagaagctgttcgtgcccgagcccagacccgtgcccaagaacgacgtgggcttcaagtacagcgtgaagcacagacccttccccgaggaggtggacaagatccccttcgtgaaggccgacctgagcatccccgacctgcacgagatcgtgaccgaggagctggaggagagacacgagaagctgagaagcggcatggcccagcagatcgcctacgagatccacctggagcagcagagcgaggaggagctgcagaagagaagcttccccgaccccgtgaccgactgcaagccccccccccccgcccaggagttccagaccgccagactgttcctgagccacttcggcttcctgagcctggaggccctgaaggagcccgccaacagcagactgcccccccacctgatcgccctggacagcaccatccccggcttcttcgacgacatcggctacctggacctgctgccctgcagacccttcgacaccgtgttcatcttctacatgaagcccggccagaagaccaaccaggagatcctgaagaacgtggagagcagcagaaccgtgcagccccacttcctggagttcctgctgagcctgggctggagcgtggacgtgggcagacaccccggctggaccggccacgtgagcaccagctggagcatcaactgctgcgacgacggcgagggcagccagcaggaggaggtgatcagcagcgaggacatcggcgccagcatcttcaacggccagaagaaggtgctgtactacgccgacgccctgaccgagatcgccttcgtggtgcccagccccgtggagagcctgaccgacagcctggagagcaacatcagcgaccaggacagcgacagcaacatggacctgatgcccggcatcctgaagcagcccagcctgaccctggagctgttccccaaccacaccgacaacctgaacagcagccagagactgagccccagcagcagaatgagaaagctgccccagggcagacccgtgccccccctgggccccgagaccagagtgagcgtggtgtgggtggagagatacgacgacatcgagaacttccccctgagcgagctgatgaccgagatcagcaccggcgtggagaccaccgccaacagcagcaccagcctgagaagcaccaccctggagaaggaggtgcccgtgatcttcatccaccccctgaacaccggcctgttcagaatcaagatccagggcgccaccggcaagttcaacatggtgatccccctggtggacggcatgatcgtgagcagaagagccctgggcttcctggtgagacagaccgtgatcaacatctgcagaagaaagagactggagagcgacagctacagccccccccacgtgagaagaaagcagaagatcaccgacatcgtgaacaagtacagaaacaagcagctggagcccgagttctacaccagcctgttccaggaggtgggcctgaagaactgcagcagctag

SEQ ID NO: 276590 - DNA, 3822 bp, Artificial Sequence
  derived and/or modified sequence
atggtggccaactggagacatcaccccgctgtcgtagagcagtggtctaaagtgatttgcgccttgacatcgcggctgctgcgctttacctatggcccctctttccccgcctttaaagttcccgacgaagacgcgtcactcatcccacctgagatggacaacgagtgtgtggcccagacctggttcaggttcctgcatatgctcagcaaccccgtcgatctcagcaatcccgccattatctcaagcacacctaaatttcaggagcagttcttgaacgtgagcggtatgcctcaagagctcaatcagtacccatgccttaagcatctccctcaaatattctttcgggcgatgagaggcatttcctgcttggtcgacgcattcctggggatcagccggccacgctccgactctgctccccccaccccagtgaaccgtctgagtatgccccagagcgcggccgtgagtactactccacctcataatagacgtcaccgtgcagttactgttaacaaagcaacaatgaagacctccaccgtctcaactgcacatgcctccaaagttcagcaccagacctcatcgacctccccgctgtcatcacctaatcagactagctccgaaccacggccccttcctgctccgcgtagaccgaaagtgaacagcatccttaatctcttcggcagctggctattcgacgccgcgttcgtgcactgtaaactccataacggaatcaaccgggacagctctatgactgccattaccacccaggcgagtatggaatttcggcgaaaggggagtcaaatgtctacagacactatggtctctaacccgatgtttgatgcttctgaatttccggataactacgaggcagggcgtgccgaggcttgcggcacattatgccgtatattctgcagtaagaagacaggcgaggaaattctaccagcttacctttcccgtttttacatgctgctgattcagggtttgcagatcaacgattatgtctgccatccagtgctggccagcgttatcctgaatagcccccccctcttctgttgcgatctaaaggggatcgatgtggtggtgccttatttcattagtgcactcgagactatattaccagatcgggagctgagcaagtttaagtcatacgtcaacccaactgagctgagaaggtcatcaattaacattctgctgagtctgctacccctgccacatcacttcggcactgtcaaatcagaagtggtgctggagggtaagttctccaatgatgattcctcctcctatgataaacccattacattcctgagtctgaaacttcgccttgtgaacattctgattggcgccctccaaacagagaccgatcccaacaacacacaaatgattctcggagcaatgcttaacattgttcaggacagcgcgctactcgaggcaattggatgtcagatggagatgggcggcggagaaaacaacctcaagtcacacagcaggaccaatagcgggattagctccgcctccggcgggtctactgaaccgactacccctgactctgagagacctgctcaggcgctgctgcgggactatgcattaaatacagacagcgccgccggtcttttgatccgaagcattcatcttgtcacccagaggctcaactcccagtggcgacaagacatgtcaataagcctagccgccctggagctcctgtcagggctcgctaaagttaaggtcatggttgatagtggagacaggaaaagagctatttcatctgtttgcacatacattgtgtatcaatgtagtagaccagcccccctgcactctcgggaccttcatagtatgatcgtcgcagccttccagtgcttatgcgtgtggctgacagagcatccggacatgctggacgaaaaagactgtcttaaggaagtgttggaaatcgttgagctcggaatatctggatcaaagagcaaaaacaacgagcaggaggtcaaatacaaaggtgataaagaacccaatcccgcaagtatgcgcgtaaaggacgctgctgaagcaaccctgacctgcatcatgcaactgctcggagcattccctagcccctccgggccagcctccccctgctctctggtgaatgagactacactcattaagtactcccgactacctaccatcaataaacatagttttcgctacttcgtgctcgacaatagcgttatactagccatgctcgagcagcctctagggaatgagcagaatgactttttccctagcgtgactgttctcgtacgcggtatgtctggccgacttgcttgggcccagcagctctgcctgttaccgaggggcgctaaagctaaccagaagctgttcgtaccagagccgcgtccggtgcccaaaaatgatgtcggcttcaaatattctgtgaaacacagaccatttcctgaggaggtggacaaaattccatttgttaaggccgacctgtctattccagacctgcatgagattgttaccgaagagctggaggaacggcacgagaagctgagaagtggaatggctcagcagatagcttacgagatacacttggagcagcagtcagaagaggagttacaaaaacgctcctttccagatcctgtgaccgactgtaaaccaccccctccagctcaagagttccagacagcaagactctttctgtctcattttggattcctctctctggaggctctgaaggaacccgctaactcgcgtctgccgcctcacttgattgccctagactcaacaattccaggctttttcgatgacatcggatatctggatcttttgccatgtaggcctttcgacacggtgttcatcttctacatgaaacccggacaaaagacaaatcaggagatcctgaaaaacgtcgaaagctctcgcactgtccagcctcactttttggaatttcttctgtctctcggttggagcgtggacgtcggaagacacccagggtggacaggacatgtgtccacaagctggtccattaactgctgcgacgatggcgagggatctcagcaggaggaagtcatatcatctgaagacattggcgcatcaatcttcaacggacagaagaaagtcctttactatgcagacgccctgaccgaaatcgccttcgtggtgccatcacccgtggagtccctaactgattctttggagagtaacatcagtgaccaggactcagacagcaatatggatttgatgccaggtatcctgaaacaaccttctctcacgctggagctgtttcccaaccacactgacaatctgaactccagtcagcgcctgtcaccttcgtcaagaatgcgtaaactgccacagggtcggcccgtcccaccactcggaccagaaacgagagtgtctgtcgtgtgggtagagagatacgacgacatcgagaactttcctttaagtgagttgatgacagaaatctctacaggagttgaaacaactgccaactcttccacatcactgcgaagtaccacactggaaaaagaagtacccgtgatctttattcaccctctgaacacaggacttttccgtattaaaatccagggagcaacgggtaagttcaatatggtcattccactggtggacgggatgatcgttagccggagggcactcggattcctcgtgcggcagacggtgattaatatttgtcgtcgcaaaaggctggaaagtgacagctatagccccccccacgtgcgccggaaacagaagatcacagatatcgtcaataagtatagaaataagcaactcgaaccggaattttatactagcctgttccaggaagtgggcctgaaaaattgttcatcctag

SEQ ID NO: 276591 - DNA, 3972 bp, Artificial Sequence
  derived and/or modified sequence
attaatgacattctattggccccgccaacagtacagggggggatcgccgagaatttagccgagaagctgattggggttttgtttgaagtgtggttactggcttgtacccgctgttttcctaccccaccgtactggaagacggcaaaggagatggtcgcaaattggcgtcaccaccccgccgtcgtcgagcaatggtctaaggtaatctgcgcccttacatcacggctcctgcggttcacctatgggccctctttcccagctttcaaagtccccgatgaagacgccagtctgatcccacccgagatggataacgagtgcgtcgctcagacatggttccggtttttgcacatgttgagcaacccagtagatctgtccaacccagccatcatttcttcaacacccaagttccaggaacagttcttgaatgtctctggcatgccacaagaactgaaccagtatccttgtcttaagcacctccctcaaatcttcttcagagccatgagaggaatcagctgtctggttgatgcatttctggggatatcccggccacgatccgattccgcacctcctacgccagtgaatcgattatccatgcctcagagtgccgccgtgtctactaccccacctcacaaccgaaggcaccgcgcagtgactgtcaacaaggccactatgaagacatctaccgtcagcactgcccacgccagtaaagtgcagcatcaaacttcgagcacaagcccattatcctctcctaaccagacgtcgagtgagccgagacccttgccagccccccgaaggcctaaagtaaacagcatccttaacttgttcggctcttggctgttcgacgccgcatttgtgcactgtaaattacataatggcatcaacagggactccagcatgactgcaataaccacccaggctagcatggaattccgaagaaagggttcacaaatgtcaacggacaccatggtgtccaaccccatgtttgatgcctcagaattccccgataattatgaagcaggtagggcagaagcttgtggaacgctgtgtaggatcttctgttctaagaagactggcgaggaaattttgcccgcgtatctgagcagattctacatgctcctgatccagggcttgcaaataaacgattatgtctgccaccccgtcttggcgagtgtcattctcaactcaccaccactgttctgctgtgatttaaagggaatagatgttgtggtgccatacttcatcagcgcgttggaaacaattctgccggaccgcgagctttctaaatttaagtcatatgtcaaccccaccgagttgaggcgctcctctataaatattctgctgtcgctcctgcccctgccacaccactttgggaccgtgaaatccgaagtggtgttggagggcaaattttcaaacgacgactcttcttcctatgacaaaccaataacttttttgtcactaaagttgaggttggtcaacattctcatcggcgccctgcaaactgaaaccgatcctaacaatacacaaatgatactcggtgctatgctaaacatcgtgcaagactcagcactgctggaggccattggatgccaaatggaaatggggggaggcgaaaataatctgaagtcccattccagaaccaatagcggaattagcagcgcctccggcggttccacagagccgactaccccagactcagaaaggcctgctcaggctcttctcagggactacgcactgaacaccgatagtgcagccggcttgttgatacgcagtattcatctagtgacccagcgcttgaactctcagtggagacaggatatgtctataagtctggcggcactggagctgctgtctggtctggcaaaggtgaaagtcatggttgactccggggacaggaagagagcgatctcatcagtttgcacctacatcgtttaccagtgtagcagaccagccccattgcacagcagggatctccattccatgatcgtggcagcgtttcagtgtctttgtgtgtggctgaccgagcaccctgatatgctagatgagaaggattgtctgaaggaagtgctggagattgtcgagctagggatctctgggtccaaaagtaagaacaatgaacaggaagtgaagtacaaaggagacaaggaaccaaacccggcctccatgagggtgaaggatgccgctgaagctacacttacatgtatcatgcaactcctcggagcattcccttcccccagcggccctgcctctccttgctccctggtgaacgaaactacacttatcaagtactcgagactacccacgattaacaagcattcttttcgttactttgtgttagacaacagcgttattctggcaatgctcgagcagccactcgggaatgagcagaatgatttctttccctcagtgaccgttctggtgaggggcatgtctggcaggttggcatgggcccagcagctgtgtttgcttccaagaggagcaaaggctaatcaaaagctgttcgtccctgagcctcgccctgtgccaaagaatgatgtcggtttcaagtactcagttaagcacagacccttccctgaagaagtagataagatccctttcgtgaaggccgatctctctataccagatttgcacgagatagtcacagaggagctggaggagagacatgaaaagctacggtccgggatggcgcagcagattgcttacgagattcacttggagcaacaatcggaggaggagcttcaaaaaaggagttttcccgatcccgtcactgactgtaagccccctccccccgcacaggagttccagacagctcggctgtttctgtcccatttcgggttccttagtctcgaagccttgaaagagccagccaattcgaggctgcctcctcatctgattgccctggattcaactatccccggattcttcgatgacatagggtacctcgacctgttaccttgccgaccctttgatacggttttcattttctacatgaaacctgggcagaaaactaatcaggaaattctgaagaacgtggagtcctcgcggacggtccagcctcactttcttgagtttctgctcagcctgggctggagcgtagatgttggtagacatcccggatggaccgggcatgtatcgacctcctggtccattaactgctgcgacgacggagagggttcccaacaggaggaggtgataagtagtgaggacatcggagcaagcatcttcaacggccaaaaaaaagtgctgtattatgccgacgccctcactgagatcgcatttgttgtcccttcgcctgttgagagtctcactgactctttagaatccaatattagtgaccaggactcagattctaacatggacctgatgcccggcatactgaagcaaccctcgctcaccctggaactgtttcctaaccacacggataacttaaattcatctcagagattgtcaccttctagccgtatgaggaagcttccacaggggagacccgtacccccactggggcctgaaacgagagtgtctgtcgtctgggtggagcgttacgacgatattgagaattttcctttaagcgagcttatgaccgagatatccacaggggttgagacgaccgccaatagttcaacttcattacgctccactactctagagaaggaagttcctgtgatatttatccatcctctcaataccggcctgtttcggatcaaaatccagggagctacagggaagttcaatatggtgattcccctagtagatggaatgatagttagccgacgggccttggggttcctcgtaagacagaccgtcattaacatctgtcggcgcaagcggctcgagtcagattcatattctccgccccacgtgagaaggaagcagaaaattactgacatcgtgaataagtataggaataaacagctggaacccgaattctatacaagcttgtttcaggaggtgggcctgaaaaattgtagttcctag

SEQ ID NO: 276592 - DNA, 3822 bp, Artificial Sequence
  derived and/or modified sequence
atggtggccaactggaggcaccaccctgctgtggtggagcagtggagcaaggtgatctgtgccctgaccagccggctgctgcgcttcacctacggccccagcttccctgccttcaaggtgcctgatgaagatgccagcctcatccccccagagatggacaatgaatgtgtggcccagacctggttccgcttcctgcacatgctgagcaaccctgtggacctgagcaacccagccatcatcagcagcacccccaagttccaggagcagttcctgaatgtgtctggcatgccccaggagctgaaccagtacccctgcctgaagcacctgccccagatcttcttccgggccatgaggggcatcagctgcctggtggatgccttcctgggcatcagccggcccaggagtgacagcgccccacccacccctgtgaaccggctgtccatgccccagagcgctgctgtgtccaccaccccaccccacaacagaagacacagagctgtgacagtgaacaaggccaccatgaagaccagcacagtgtccacagcccacgccagcaaggtgcagcaccagaccagcagcaccagccccctgagcagccccaaccagaccagcagcgagccccggcccctgcctgccccccggcggcccaaggtgaacagcatcctgaacctgtttggctcctggctgtttgatgctgcctttgtgcactgcaagctgcacaacggcatcaacagagacagctccatgacagccatcaccacccaggcctccatggagttccggaggaagggcagccagatgagcacagacaccatggtgagcaaccccatgtttgatgccagcgagttcccagacaactatgaagctggccgggcagaggcctgtggcaccctgtgccgcatcttctgcagcaagaagacaggagaggagatcctgcctgcctacctgagccgcttctacatgctgctgatccagggcctgcagatcaatgactatgtgtgccaccctgtgctggccagcgtcatcctgaacagccccccactcttctgctgtgacctgaagggcattgatgtggtggtgccctacttcatcagcgccctggagaccatcctgcctgaccgggagctgagcaagttcaagagctatgtgaaccccacagagctgcggcgcagcagcatcaacatcctgctgagcctgctgcccctgccccaccacttcggcaccgtgaagtctgaggtggtgctggagggcaagttcagcaatgatgacagcagcagctatgacaagcccatcaccttcctgagcctgaagctgcggctggtgaacatcctgattggagccctgcagacagaaacagaccccaacaacacccagatgatcctgggcgccatgctgaacatcgtgcaggacagcgccctgctggaggccatcggctgccagatggagatgggcggcggggagaacaacctgaagagccacagcaggaccaacagcggcatcagcagcgccagcggcggcagcacagagcccaccaccccagattctgagaggcctgcccaggccctgctgcgggactatgccctgaacacagacagcgctgctggcctgctgatccgcagcatccacctggtgacccagaggctgaacagccagtggaggcaggacatgagcatcagcctggccgccctggagctgctgagcggcctggccaaggtgaaggtgatggtggacagcggggacaggaagagggccatcagctctgtgtgcacctacatcgtgtaccagtgcagcaggcctgcccccctgcacagccgggacctgcacagcatgattgtggccgccttccagtgcctgtgtgtgtggctgacagagcacccagacatgctggatgagaaggactgcctgaaggaggtgctggagatcgtggagctgggcatcagcggcagcaagagcaagaacaatgagcaggaggtgaagtacaagggggacaaggagcccaacccagcctccatgagggtgaaggatgctgctgaggccaccctgacctgcatcatgcagctgctgggcgccttccccagccccagcggccctgccagcccctgcagcctggtgaatgagaccaccctcatcaagtacagccggctgcccaccatcaacaagcacagcttccgctactttgtgctggacaacagcgtcatcctggccatgctggagcagcccctgggcaatgagcagaatgacttcttccccagcgtgacagtgctggtgcggggcatgagcggccgcctggcctgggcccagcagctgtgcctgctgcccaggggggccaaggccaaccagaagctgtttgtgcctgagcccaggcctgtgcccaagaatgatgtgggcttcaagtacagcgtgaagcaccggcccttccctgaggaggtggacaagatcccctttgtgaaggctgacctgagcatcccagacctgcacgagatcgtgacagaggagctggaggagagacatgagaagctgcggagcggcatggcccagcagatcgcctatgagatccacctggagcagcagagcgaggaggagctgcagaagaggagcttcccagaccctgtgacagactgcaagcccccacctccagcccaggagttccagacagcccggctcttcctgagccacttcggcttcctgagcctggaggccctgaaggagcccgccaacagccggctgcccccccacctgattgccctggacagcaccatccctggcttctttgatgacatcggctacctggacctgctgccctgccggccctttgacaccgtcttcatcttctacatgaagccaggccagaagaccaaccaggagatcctgaagaatgtggagagcagcaggacagtgcagccccacttcctggagttcctgctgagcctgggctggagcgtggatgtgggccgccaccctggctggacaggccacgtgtccacctcctggagcatcaactgctgtgatgatggagagggcagccagcaggaggaggtgatcagcagtgaagatattggagccagcatcttcaacggccagaagaaggtgctgtactatgcagatgccctgacagagatcgcctttgtggtgcccagccctgtggagagcctgacagacagcctggagagcaacatcagtgaccaggacagcgacagcaacatggacctgatgcctggcatcctgaagcagcccagcctgaccctggagctgttccccaaccacacagacaacctgaacagcagccagaggctgagccccagcagcaggatgaggaagctgccccagggccggcctgtgccccccctgggccctgagaccagggtgtctgtggtgtgggtggagagatatgatgacatcgagaacttccccctgtctgagctgatgacagagatcagcactggagtggagaccacagccaacagcagcaccagcctgcggagcaccaccctggagaaggaggtgcctgtgatcttcatccaccccctgaacacaggcctcttccgcatcaagatccagggcgccaccgggaagttcaacatggtgatccccctggtggatggcatgattgtgtcccggcgggccctgggcttcctggtgcggcagaccgtcatcaacatctgcaggaggaagaggctggagagtgacagctacagcccccctcatgtgcggaggaagcagaagatcacagacatcgtgaacaagtacagaaacaagcagctggagcctgagttctacaccagcctcttccaggaggtgggcctgaagaactgcagcagctag

SEQ ID NO: 276593 - DNA, 3972 bp, Artificial Sequence
  derived and/or modified sequence
atcaatgacatcctgctggccccacccaccgtgcagggcggcattgctgagaacctggccgagaagctgattggagtgctgtttgaggtgtggctgctggcctgcacccgctgcttccccaccccaccctactggaagacagccaaggagatggtggccaactggaggcaccaccctgctgtggtggagcagtggagcaaggtgatctgtgccctgaccagccggctgctgcgcttcacctacggccccagcttccctgccttcaaggtgcctgatgaagatgccagcctcatccccccagagatggacaatgaatgtgtggcccagacctggttccgcttcctgcacatgctgagcaaccctgtggacctgagcaacccagccatcatcagcagcacccccaagttccaggagcagttcctgaatgtgtctggcatgccccaggagctgaaccagtacccctgcctgaagcacctgccccagatcttcttccgggccatgaggggcatcagctgcctggtggatgccttcctgggcatcagccggcccaggagtgacagcgccccacccacccctgtgaaccggctgtccatgccccagagcgctgctgtgtccaccaccccaccccacaacagaagacacagagctgtgacagtgaacaaggccaccatgaagaccagcacagtgtccacagcccacgccagcaaggtgcagcaccagaccagcagcaccagccccctgagcagccccaaccagaccagcagcgagccccggcccctgcctgccccccggcggcccaaggtgaacagcatcctgaacctgtttggctcctggctgtttgatgctgcctttgtgcactgcaagctgcacaacggcatcaacagagacagctccatgacagccatcaccacccaggcctccatggagttccggaggaagggcagccagatgagcacagacaccatggtgagcaaccccatgtttgatgccagcgagttcccagacaactatgaagctggccgggcagaggcctgtggcaccctgtgccgcatcttctgcagcaagaagacaggagaggagatcctgcctgcctacctgagccgcttctacatgctgctgatccagggcctgcagatcaatgactatgtgtgccaccctgtgctggccagcgtcatcctgaacagccccccactcttctgctgtgacctgaagggcattgatgtggtggtgccctacttcatcagcgccctggagaccatcctgcctgaccgggagctgagcaagttcaagagctatgtgaaccccacagagctgcggcgcagcagcatcaacatcctgctgagcctgctgcccctgccccaccacttcggcaccgtgaagtctgaggtggtgctggagggcaagttcagcaatgatgacagcagcagctatgacaagcccatcaccttcctgagcctgaagctgcggctggtgaacatcctgattggagccctgcagacagaaacagaccccaacaacacccagatgatcctgggcgccatgctgaacatcgtgcaggacagcgccctgctggaggccatcggctgccagatggagatgggcggcggggagaacaacctgaagagccacagcaggaccaacagcggcatcagcagcgccagcggcggcagcacagagcccaccaccccagattctgagaggcctgcccaggccctgctgcgggactatgccctgaacacagacagcgctgctggcctgctgatccgcagcatccacctggtgacccagaggctgaacagccagtggaggcaggacatgagcatcagcctggccgccctggagctgctgagcggcctggccaaggtgaaggtgatggtggacagcggggacaggaagagggccatcagctctgtgtgcacctacatcgtgtaccagtgcagcaggcctgcccccctgcacagccgggacctgcacagcatgattgtggccgccttccagtgcctgtgtgtgtggctgacagagcacccagacatgctggatgagaaggactgcctgaaggaggtgctggagatcgtggagctgggcatcagcggcagcaagagcaagaacaatgagcaggaggtgaagtacaagggggacaaggagcccaacccagcctccatgagggtgaaggatgctgctgaggccaccctgacctgcatcatgcagctgctgggcgccttccccagccccagcggccctgccagcccctgcagcctggtgaatgagaccaccctcatcaagtacagccggctgcccaccatcaacaagcacagcttccgctactttgtgctggacaacagcgtcatcctggccatgctggagcagcccctgggcaatgagcagaatgacttcttccccagcgtgacagtgctggtgcggggcatgagcggccgcctggcctgggcccagcagctgtgcctgctgcccaggggggccaaggccaaccagaagctgtttgtgcctgagcccaggcctgtgcccaagaatgatgtgggcttcaagtacagcgtgaagcaccggcccttccctgaggaggtggacaagatcccctttgtgaaggctgacctgagcatcccagacctgcacgagatcgtgacagaggagctggaggagagacatgagaagctgcggagcggcatggcccagcagatcgcctatgagatccacctggagcagcagagcgaggaggagctgcagaagaggagcttcccagaccctgtgacagactgcaagcccccacctccagcccaggagttccagacagcccggctcttcctgagccacttcggcttcctgagcctggaggccctgaaggagcccgccaacagccggctgcccccccacctgattgccctggacagcaccatccctggcttctttgatgacatcggctacctggacctgctgccctgccggccctttgacaccgtcttcatcttctacatgaagccaggccagaagaccaaccaggagatcctgaagaatgtggagagcagcaggacagtgcagccccacttcctggagttcctgctgagcctgggctggagcgtggatgtgggccgccaccctggctggacaggccacgtgtccacctcctggagcatcaactgctgtgatgatggagagggcagccagcaggaggaggtgatcagcagtgaagatattggagccagcatcttcaacggccagaagaaggtgctgtactatgcagatgccctgacagagatcgcctttgtggtgcccagccctgtggagagcctgacagacagcctggagagcaacatcagtgaccaggacagcgacagcaacatggacctgatgcctggcatcctgaagcagcccagcctgaccctggagctgttccccaaccacacagacaacctgaacagcagccagaggctgagccccagcagcaggatgaggaagctgccccagggccggcctgtgccccccctgggccctgagaccagggtgtctgtggtgtgggtggagagatatgatgacatcgagaacttccccctgtctgagctgatgacagagatcagcactggagtggagaccacagccaacagcagcaccagcctgcggagcaccaccctggagaaggaggtgcctgtgatcttcatccaccccctgaacacaggcctcttccgcatcaagatccagggcgccaccgggaagttcaacatggtgatccccctggtggatggcatgattgtgtcccggcgggccctgggcttcctggtgcggcagaccgtcatcaacatctgcaggaggaagaggctggagagtgacagctacagcccccctcatgtgcggaggaagcagaagatcacagacatcgtgaacaagtacagaaacaagcagctggagcctgagttctacaccagcctcttccaggaggtgggcctgaagaactgcagcagctag

SEQ ID NO: 276594 - DNA, 3822 bp, Artificial Sequence
  derived and/or modified sequence
atggtggccaactggcggcaccaccccgccgtggtggagcagtggtccaaagtgatttgtgccctaacaagtcggcttctgcgcttcacctatggaccatcattcccagccttcaaggtgcccgacgaggatgcaagtttgattccaccggagatggataatgagtgtgtcgcccagacatggttcagattcttgcatatgctgtcaaacccagtcgatctctccaatccagccattatatcttccacccccaagttccaggagcagttcttgaacgtgtccggtatgccacaggagctgaaccaatacccttgcctgaaacatcttccacaaatctttttcagggcaatgaggggaattagctgcttggtcgatgccttcctgggcatttctcggcctagaagtgactctgccccacctactcccgtgaaccggctttccatgccccaatcggctgcagtttccaccacacctccccacaatcggcggcacagagcagtcaccgtcaacaaagccacaatgaagacgtccacggtctcaaccgcacacgctagtaaggtgcagcatcagacttcatccacatccccactgtcatcccctaaccaaacttcaagcgagcctcggccgctgcctgctccgcgacgacctaaagtgaattctatcctgaacctgtttgggagttggctctttgacgcggccttcgtgcactgcaaactgcacaacggtatcaatagggactcctctatgacagccatcacaactcaggcttccatggagttcagaagaaaagggtcacaaatgtccaccgatacaatggtgtccaaccctatgtttgacgcaagtgagttcccggacaattacgaagccgggcgagccgaagcctgcggaacgctatgtagaatcttttgctccaagaagaccggagaagaaatattgcctgcctacctcagtaggttttacatgctgctgattcaaggcctgcaaataaatgactatgtgtgtcatccagtgcttgcttcagttatcctgaatagtccaccactcttctgctgcgacttgaaggggatcgatgttgtagttccatatttcatttctgccttggagaccatcctaccagatcgagagctatctaagtttaagtcttacgtcaacccaacggaactgagaaggagcagcatcaatatcctgttgtcactattgcctcttcctcatcacttcgggacagttaagtccgaggtcgtgctagaggggaagttctccaatgatgacagctcttcctacgacaaacccataacattccttagcctcaagctcagactggtaaatatactcatcggcgccctgcaaactgagacggaccctaacaacacacagatgatactgggggcaatgctaaacatagtccaggacagtgcgctgttggaggccattgggtgtcagatggagatgggtggcggtgagaacaatttgaagtcccatagcaggaccaattcagggatctcctccgcaagcggaggatcaaccgagcctaccacccccgactcagagcgtcccgctcaagctttgctacgtgattacgccctgaacactgattccgccgccggcttgctaattcgctccatccacctggtcacacaaagactgaactcccagtggaggcaagatatgagtattagtctcgctgcgctcgagctgctctccggactggccaaggtgaaagtcatggtggattctggcgacagaaagcgggccatttcatccgtgtgtacctacatcgtgtaccagtgttcgcggcctgcccctttgcactcaagagatcttcacagcatgattgtggccgcattccagtgtttgtgcgtgtggcttactgagcatcctgacatgttggatgaaaaggactgtctgaaggaggtgctggaaatcgtggaacttggaatctccggcagtaagagtaaaaataacgaacaggaggttaaatataagggggataaggagccaaacccagcatccatgcgcgtgaaggacgctgcggaggcaactcttacatgcatcatgcagctgctgggagcctttccttcgccatctggccctgcttctccctgttcattggtgaacgagacgactctgatcaaatattctagattgccaacgatcaataaacattcctttagatatttcgttctggataacagcgtgattttagcaatgttggaacagcccttgggaaacgaacaaaatgatttcttcccaagcgtcacagttctagtgagaggaatgagcggcaggctggcttgggcccagcagctctgcctcctccctagaggcgctaaagccaaccagaagctctttgtgccggagcctcgccctgtgccaaaaaatgacgtgggcttcaaatacagcgtgaaacatagacccttcccagaagaggtggacaagatcccctttgtgaaggccgacctgtcaatacccgatttacatgagatcgtgacagaagagttagaggaaaggcatgagaagctgaggtccgggatggctcagcagattgcgtacgagatccacctggaacagcaatctgaagaagagcttcagaagaggagtttccccgatccggtgacggattgtaagcctcccccacccgcccaggagtttcagacagcccgactttttttgtcccatttcggatttttgagtttagaagctctgaaagagccggctaacagtaggctacccccacacctcattgcccttgacagtaccattcccgggttctttgatgacatcggctaccttgaccttctgccttgtaggccctttgatacagtttttattttctacatgaagcctgggcagaagacaaatcaggaaatcctcaaaaacgtagagtccagccgaacagtgcagccgcatttccttgagttcctgctctcactgggatggagcgtcgacgtgggaaggcatcctgggtggacgggacatgtgtcaacatcatggagcatcaattgttgcgacgacggcgagggctctcaacaagaagaggtcatcagtagcgaagatattggggcctcgattttcaacggacaaaagaaagttctgtattacgcggatgcactgacagagatagcttttgtcgtcccaagccctgtggagagtctgactgattcactggagtcgaacatcagcgatcaagattccgacagcaatatggatctgatgccggggattttgaagcagcccagcttgaccctcgaactgtttccaaatcatactgataatcttaacagcagccagcgtttgagtccctctagccgcatgagaaagcttccccagggacggcctgttccccctctagggcccgaaacaagggtctccgtcgtttgggtggaaaggtacgacgacattgaaaatttccccctctccgagttgatgaccgagatttctacaggtgttgaaacaacagctaatagttcaacatccctgcgaagtacgaccttggagaaggaagtcccagtcattttcatccaccccctcaacactggactgttccgcatcaaaatacagggagccacaggtaagttcaatatggtaatccctttggtcgacgggatgattgtctcgcggcgggccctgggattcctggtgagacagacagtaattaacatctgtcgaagaaagcgcttagagagtgactcttacagtcctcctcatgtgcggaggaagcagaagattacagacatcgtaaacaagtataggaataagcagctggagcctgagttctatacctcactgttccaggaggtcggcttgaagaactgtagctcctag

SEQ ID NO: 276595 - DNA, 3972 bp, Artificial Sequence
  derived and/or modified sequence
atcaacgacatcctgctggccccccccaccgtgcagggcggcatcgccgaaaatctcgcagagaaactgatcggagtcctgtttgaggtgtggctgctggcctgtacgcgctgctttcctacacctccatattggaaaactgctaaggaaatggttgcaaactggagacaccaccctgcggtggtggagcagtggtcaaaggtcatttgtgccctgacctctcggctgctcaggttcacgtacgggccctccttcccagctttcaaagtgccagacgaggatgcaagcctcatcccacctgaaatggataatgagtgcgtggcccagacatggtttaggttcctccatatgctctctaacccagtcgacctcagtaaccccgctattatctcatcgacacccaagttccaagagcaatttcttaatgtgtcaggtatgccgcaagagctgaaccaatacccctgtctaaagcaccttccacagatcttctttcgagctatgagaggaatcagctgtctcgtggacgcgtttctgggtatctcaagaccacgcagtgattcagctccacctaccccagtgaacagactgtctatgcctcagagcgccgctgtatctactacgcctccacacaatcggcgacacagagcagtcactgtgaataaagcaaccatgaaaacttccactgtaagcacggcccacgccagcaaggtgcagcaccagaccagcagcacgtccccactgtccagcccgaaccagacctcctccgagccccgacccctacctgcaccacggagacctaaagtcaatagcatcctcaatctctttggcagctggttgtttgatgccgccttcgtccattgcaaactgcataacggtatcaacagagatagctccatgactgcaattacaacgcaggccagtatggagtttagaagaaagggatcacagatgtccactgacacaatggtttctaacccaatgttcgatgccagcgaattccccgacaactatgaggctggccgagccgaagcctgtggcacactgtgcaggatcttctgctcaaagaaaacaggtgaggaaatcctgccggcctacctcagccggttttacatgttgctaatccagggccttcagattaatgattatgtatgtcacccggtcctggcctccgtgattctgaattcaccgcccctgttctgctgcgatttgaagggcattgatgtggtcgtgccgtacttcattagcgccttggagactatcctgccggacagagagctgtctaagttcaagtcttacgtcaacccaactgaacttaggaggtcctcgatcaacatcttgctgagcctcctgcctctcccccaccacttcggaactgtgaagtccgaagtagtccttgaaggtaagttcagtaacgatgacagtagtagctacgacaagccaatcacctttctgtccctaaaacttaggcttgtgaacatcttgatcggcgctctccaaaccgaaactgacccaaacaatacccagatgatcctaggcgctatgttgaatatcgtccaagattccgcactgctggaggctatcgggtgtcagatggagatgggcggcggcgagaataacctgaagtctcacagccggactaatagcggaatctcatccgcttctgggggcagcaccgaaccgaccacgcctgattcagagagaccggctcaggctctcttacgagactacgcgctaaatacagactcagccgccggactgctgattaggtcgatccacctggtcacccagcgactcaatagccagtggcgacaggacatgtccatctctctggctgcactagagttgttatccggtttagctaaggttaaggtgatggtggattcaggagacaggaaacgagctataagttctgtctgcacatacatcgtgtaccagtgctcaagaccggcaccactgcactctcgcgatctccactcaatgatcgtcgcagcgttccaatgtttatgtgtgtggcttactgaacacccagacatgttagatgagaaagactgcctgaaagaagtattagagatcgttgagctgggcatttcggggtcgaagtccaaaaataacgaacaagaggtgaagtataaaggagataaggaacctaatcctgcttccatgcgtgtcaaagatgctgcagaagccacactaacttgtattatgcagttattaggagcgtttcccagtcctagcggccctgctagtccttgcagcctagttaacgaaaccaccttgattaaatactcgcgcttgccgacaatcaataagcactcgtttcgctattttgtcctggacaatagcgtcattttggccatgcttgaacaaccccttggcaatgagcagaatgatttcttccctagtgtgactgtactcgtgagaggaatgtccggtaggttagcctgggcacaacagctctgtctgctaccacgaggcgctaaggccaaccaaaaactcttcgtgcccgagccacgtccggtgcccaaaaacgatgtgggcttcaagtactctgtcaagcaccggccttttccggaagaggtggacaaaattccctttgtgaaggctgatttaagcatacccgacctgcacgagatcgtaaccgaagaactcgaggagaggcatgaaaagctcaggtctggtatggcacaacaaattgcctacgagatccacttggagcagcagtcagaggaagagctacagaaaaggtcattccctgatccagtgactgactgtaagcccccaccacccgcccaggagttccagactgcacggctgttcctcagtcattttgggtttttgtccctggaagctctgaaggaaccagctaactctcgcttaccaccccatttgatcgctttagatagcactatccccggatttttcgatgacattgggtacttggacctattgccatgccggccttttgatacagtcttcatcttttacatgaaaccaggacagaaaacaaatcaagagatcctcaaaaacgtagagtcgtcaagaaccgtgcagcctcattttctcgagttcctgctgagcttagggtggtccgttgacgtggggcggcatcctgggtggaccggacacgtgtctactagttggagcatcaattgttgtgacgacggagagggctcccagcaggaggaagtcatttcgtccgaggatatcggtgcaagcatcttcaatggtcagaaaaaggtgctgtactatgccgacgcactgactgagattgcgtttgtggtaccctctcctgtggagagccttactgatagcctcgaatcaaacatttcagaccaagactccgatagcaatatggaccttatgcctgggatcctgaaacagcctagtctaacactcgagctgttccccaatcatacagacaacctgaatagtagtcagcgcctctctccgagtagccgtatgagaaagcttcctcaaggcagaccagttcctcccctggggccagaaacgagggtgagcgttgtgtgggttgagcgctatgacgacattgaaaattttcccctgagcgagcttatgaccgaaatcagcaccggggtggagaccacagccaactcatcaactagccttcgcagtacaaccctggagaaggaagtgcccgtcattttcatccaccctctgaacaccggtctgttccgtattaagatccaaggtgctactggaaagtttaatatggtcatccctctcgtggatggaatgattgtgtcccgccgagcgctcggctttctcgtgcgacaaactgtgatcaatatttgcaggcgtaaacgtcttgaaagtgactcatactcaccaccccatgtgcggcgcaaacagaagattacagacatcgtgaataaatatcgcaacaaacaactggaacccgagttttatacctctctgttccaagaggtgggacttaaaaactgcagcagctag

SEQ ID NO: 276596 - DNA, 3822 bp, Artificial Sequence
  derived and/or modified sequence
atggtggccaactggcgccaccatccagccgttgtggaacagtggtcaaaagtgatctgtgcactcacatcacgcctgctccgcttcacgtatggtcccagtttccctgcgttcaaagtccccgacgaggacgcctccttgatcccgccagagatggacaacgagtgtgttgcccagacttggttcaggtttctccacatgctaagcaatcctgtagatctgtccaaccccgctatcatttcatccacccctaagtttcaagagcaatttctgaacgtttcgggtatgccacaggagcttaaccagtacccttgcctgaaacacttaccacaaattttctttcgagcaatgcggggaatttcctgcctcgtggatgccttcctggggatatcaagaccgcgttccgattcggcccctcctacgcctgttaataggctgtccatgccccagtctgccgctgtgtctaccacacccccacacaaccgcaggcatcgagcagtcacagttaacaaggctactatgaagacatctaccgtgagtactgcccacgcctcaaaagttcagcaccagaccagctccacatctcctctaagctcccccaaccaaacaagctcggaacccaggcctcttccagcaccccgaaggcctaaagtaaacagcatcctgaatctgttcggttcatggctcttcgatgctgcctttgtgcactgtaagttacacaatggaatcaatagggattcctctatgaccgccattacaacgcaggccagcatggagttcagacggaaaggatcccaaatgagtaccgatacaatggtgtccaaccctatgtttgatgctagcgagtttcctgataactacgaggcaggcagagcggaagcatgtggcaccttatgtcgcatcttctgctcaaaaaaaaccggggaagagatcctgcccgcttacctatcaagattctatatgctcctgattcaggggctccagattaacgactatgtgtgccaccctgtactagcctccgttatcctgaacagcccccctctgttctgttgcgacctgaagggaattgatgtcgtggtaccctatttcatttcagctctggagactatactccccgatcgtgaactgagcaagtttaagagctacgtaaatccaacagagctccggaggtcttccattaatattctgctgagcctgttgcctctgcctcaccactttgggacggttaaaagcgaagtggtgttggagggaaagttctccaacgacgactcatcatcatatgacaagccaatcacattcctgtccctgaaattaaggctggtgaatatcctgatcggtgccctgcagactgaaaccgatccaaacaacacgcagatgattctaggtgcgatgcttaatatcgtgcaggactcagccctgcttgaggcaatcggctgccagatggaaatggggggaggagaaaataatctcaagagtcacagtcggactaatagtgggatcagtagcgccagcggaggatccacagaacccaccacacccgactcggaacgccctgcccaggctctgttgcgggattatgcactgaataccgatagtgctgccggattgctcattcgatcaattcatcttgtaacccagcggctgaacagccagtggagacaggatatgagcatttcattggctgcgctcgaactgctgtccgggcttgctaaagtgaaagtcatggtggatagtggagaccggaaaagggccatcagtagtgtttgtacatatatagtttatcagtgtagtcggccagcaccattgcactctcgggacctccatagcatgatagtcgcagctttccagtgtctgtgtgtatggctaacagaacaccccgatatgctggacgagaaggactgcctgaaggaagtcctcgaaatcgtggagctgggtatatcagggagcaagagcaagaacaacgaacaggaagtcaagtacaagggggacaaggagccgaatcccgcatccatgcgagtgaaagacgctgccgaagcaacgctgacctgcatcatgcagctccttggggcttttccgagtccttccgggcctgcatcaccttgtagtcttgtgaacgaaacgacgctcattaaatatagtcgtctgcccaccatcaataaacatagttttagatactttgtgctggacaatagcgtgatcctcgcaatgctggaacagcccctcggcaacgagcaaaatgattttttccccagcgtcacggtactggtgcgtggcatgtcaggaaggctggcctgggcccagcagttatgcctgctcccgagaggtgccaaggcgaatcagaagctgtttgtcccagagccaagaccagtccccaagaatgatgtggggttcaagtacagtgtaaagcaccgcccattccccgaggaggtcgacaaaatccctttcgtgaaagccgatctttcaatccccgatctccatgaaattgtgactgaggaactggaggagcgccacgagaaacttcgcagtggcatggcacagcagatcgcatatgaaattcatctagaacaacagtctgaggaagagctccagaagcggagcttccctgaccccgtcaccgattgtaagccgccacctccagctcaggaattccaaaccgcacggctgtttctctcgcacttcgggtttctgtcactggaggctctgaaggagcccgctaatagtcgcctacccccacacctgatcgcgctggatagcactatcccaggtttcttcgatgatattggttacctggatcttctcccctgtcgcccattcgatactgtttttatattttacatgaagcccggtcagaagaccaatcaggaaatcctgaagaacgtggagtcttcccggacagttcagccacatttcctggagttcctcctcagcctggggtggtctgtggacgtcgggcgtcatcctgggtggacaggtcatgtaagcacatcctggtccattaattgttgcgatgacggtgagggctctcagcaagaagaagtgatctcgagcgaagacatcggggcttccatctttaacggccagaagaaagtgctgtactatgcggacgccctgacagagatcgcttttgtggtccccagtcctgtcgaatctctgacggattctcttgagtccaacatctctgaccaagactccgacagtaatatggatttaatgccagggattctgaaacaaccaagtttgacacttgagctgtttcccaatcatactgataacctgaacagttctcaacggctgtcaccatcatctagaatgcgaaaactgccgcagggtcgacccgtacctcctctggggcctgagacacgggtgtcagtggtttgggttgagcgctacgatgatattgagaatttcccactcagtgaactgatgacggaaatttcaaccggcgtcgagaccactgctaactcatcgacctccctccgctcaactacgctcgagaaagaggtccctgttatttttatccaccctctgaacacaggtctcttccggataaaaatccagggagctacaggcaagttcaatatggttataccactggtggacggcatgatcgtttctaggcgggcactcggcttccttgtgagacagacagtgattaatatttgtcggcgtaaacgcttggaatctgacagctacagccctccccatgtccgcaggaagcagaaaatcacagatatagtgaataaatatcgtaacaagcagctggaaccagaattttacacaagcctattccaggaggttggactcaaaaactgcagcagttag

SEQ ID NO: 276597 - DNA, 3972 bp, Artificial Sequence
  derived and/or modified sequence
atcaacgacatcttacttgctccacctactgtacagggcggtatcgcagaaaatcttgccgaaaagctgattggagtgctgtttgaggtgtggctgttggcctgcactagatgttttccaacgccaccctattggaagacggctaaggagatggttgcaaattggcgtcaccacccagccgtggtggaacagtggagtaaagtgatctgcgccctaacttcacgtttgctgagattcacttacggtccatcatttcctgccttcaaggtccctgatgaggacgcctccctgataccacctgaaatggacaatgaatgcgtggcccaaacctggttcaggttcttgcacatgctttctaaccctgtggacctgtccaatcctgccatcatctcctctacccctaaatttcaggagcagttcttgaacgtatccggcatgccccaggaactgaatcagtatccctgtctgaaacacctaccccagatattctttcgggcaatgcgcggaatctcctgtcttgtggacgctttcctggggattagccgaccacgcagcgactctgcccctccaaccccagtgaatcgcttaagcatgccccagagcgcggctgtgagtaccactccccctcataatcgtagacatcgggcagtaaccgtcaacaaggcaactatgaagacgagtaccgtttcaactgcacatgcctccaaggtgcagcaccaaacctcatctaccagccctctgtcttctcccaatcagacctcctccgaacccagaccactacctgcccctcgcaggccgaaggtgaatagtattctgaacttattcggatcctggctcttcgacgccgcttttgtacactgcaagctccacaatggcataaatagagactcatcaatgacagccatcactacccaggcatccatggagttccggagaaagggtagccagatgagcacggatacaatggtgtccaatcctatgttcgatgcttccgagtttccagacaactacgaagccggacgcgctgaggcctgtgggacattgtgtagaatcttttgttcaaaaaagacaggcgaggagattctgccagcctacctatcgcgcttctatatgctattgatacaaggactccaaattaacgattatgtatgccacccagttctcgcctctgtgatcctaaactctccaccactgttttgctgtgatctcaaggggatcgatgtggttgtgccctattttatcagcgccttagagaccatcctgccagatcgggagctcagcaagttcaaaagttacgtcaatccaacggaattgcgccgatcctctatcaacatactgctctcactactaccgctacctcatcacttcggcaccgtgaaaagcgaggtggtgcttgagggaaaatttagcaacgacgactccagctcatacgataaaccgattacatttctgtccctgaagttgcggctagttaacattcttatcggcgctctgcagaccgaaacggaccccaacaacacacagatgattctgggagccatgctgaatattgtgcaggactccgccttgctggaggctattggctgtcagatggagatgggcggtggcgaaaacaacctcaagtcccattcccgtactaattctggaatctcctccgcttccggaggcagcactgagcctacaactccagatagtgaaaggccagcccaagcacttctcagggattacgccctcaatacggattccgccgctggactgttaatccggtctatccaccttgttacacagaggctcaacagtcaatggaggcaggacatgagtattagcttagctgcgctggagctcctaagcggattagctaaggtaaaagttatggttgattcaggggataggaagcgcgctattagctcagtgtgcacatacatagtctatcagtgctccagaccagcacctctgcattctcgggacctgcactccatgattgtagccgcattccagtgcttatgcgtctggttgaccgagcaccccgacatgctagatgagaaagattgcctcaaagaggtgttggagatagtggagttgggtatcagtggctctaaaagtaaaaataatgaacaggaggtgaagtacaaaggggataaggagcctaaccccgcttccatgagggtgaaagatgccgcagaagcaacattgacatgtataatgcagctgctgggcgcattccccagtcctagcggtcctgccagcccctgtagcctagtcaacgaaacgacactcattaagtactcccggttacccaccatcaacaagcacagttttcgctactttgtgctggacaactcagtaatactggcgatgctggagcaaccgctggggaatgagcaaaacgacttcttcccttcagtgaccgtgctagtgagagggatgtccggccgactcgcctgggctcagcagctctgcctgctcccacgtggcgctaaggcaaaccagaagctgttcgtaccagaacccaggccagttccgaagaatgatgtagggtttaagtattccgtcaaacataggccctttcctgaggaagtggacaaaatcccttttgtgaaagccgacttgagcattccagacctgcacgagattgtgacagaagagttagaggaacggcatgagaaactacgcagcggcatggctcagcagatcgcttacgagattcatctggaacaacagtccgaagaagagctccaaaagagaagttttcccgacccagtaactgactgtaaaccgcctcctccagcccaggaattccagactgctagattgttcctaagccacttcggattcctgtccctggaagccctcaaagagcccgctaactcgcggttaccccctcatctcattgccctggattctactattcctgggttttttgatgatatcggctatctggatttgctcccttgcagacccttcgataccgtgttcatcttttacatgaagccgggacagaagacaaatcaagagattctgaagaatgttgagtccagtagaactgtccagccccacttcctggagttcctgctctcactggggtggtcagttgatgtggggcgacacccaggctggactggccacgtgtctacatcatggtccatcaattgttgcgacgatggtgaaggctctcaacaggaagaggttatcagctccgaagatatcggggcttccatttttaatggtcagaaaaaggtcttatattacgccgatgcgctgaccgaaatcgcattcgtggtcccatcccccgtggagtcgctcactgacagcctcgaaagtaacatcagcgatcaggactcagactcgaacatggatttgatgcccggtattctgaagcagccgtccctgactctagaactttttccaaatcacacagataatctgaattcctcacagagattgtcaccctcgtcaagaatgaggaaactgccgcagggcagacctgtccccccacttggacccgaaacacgggtatctgttgtttgggttgaaaggtacgacgatatcgagaattttccactatccgagctcatgacagaaatctccaccggcgtagagactactgctaactccagcacaagcctcaggtctactacgttagagaaagaggtcccagttatttttatacatcccttgaacacaggcttattcagaatcaagatccagggggctactgggaaattcaacatggtgatccccctggtggatggtatgattgtgtctcgccgagcactcggctttcttgtccgccagaccgtcatcaacatctgccggcgaaagcgactggagtccgacagttattcaccacctcacgtccggcgaaagcagaagataaccgacatagttaataagtaccggaacaaacagctcgagccggaattttatacctctctcttccaggaggtaggtctgaaaaactgctctagctag

SEQ ID NO: 276598 - DNA, 8639 bp, Artificial Sequence
  derived and/or modified sequence
agtcggaagttgcctgagcagatcccagccggctggctcgagtggccttcgtcgtcccttggcgccctgggagagtcgctgacgggtggactgacggaccgcctgaggacggccggccagggcggtgaaagcgccagccctatggcgcgggtcgcgtgaggcggaaggccgaggacggccggcggcggcgcccgccccggcgatgcgggccccgcccgtcgcctcaggtgccatttggattgtactttagtggcacgatgtactctgagtggaggtcactgcatttggtgattcagaatgatcaaggccataccagtgtgctgcacagctatccagagagcgttggacgagaggtggcaaatgctgtagtccgtcctcttgggcaggtgttaggtaccccttcagtggctggtagtgagaatttgttaaaaactgacaaagaagtaaaatggaccatggaagtaatttgctatggactgacccttccattggatggagagactgtaaaatattgcgttgatgtatatacagactggattatggctttagtgttgccaaaagattctattccattgccagttattaaagagcctaatcaatatgttcaaactatactaaaacacctacagaatctttttgtaccaagacaggaacagggttccagtcagattcgactatgcttacaggtcctgagagccattcagaaactggcccgtgagtcatctctcatggcccgagaaacttgggaagtcttactgttgtttcttctgcagattaacgacatacttctggccccaccaactgttcaaggtggcattgctgagaatctagcagagaagttgattggtgttctctttgaggtgtggttactagcttgtactcggtgcttcccaacacctccttattggaaaacagccaaggagatggtggctaactggaggcatcacccagcagtggtggagcagtggagcaaggtcatttgtgcactcacttccagattgctacgctttacatatggtccttcatttcctgcatttaaagttcccgatgaagatgccagtctgatccctccagaaatggataatgagtgtgttgcacagacatggtttcgctttttacacatgttaagtaatcctgtggatttgagtaacccagctattataagctctactcccaaatttcaggaacagttcttgaatgtgagcggaatgccgcaagaattgaatcagtatccctgccttaaacatctgcctcaaatattttttcgtgccatgcgtggaatcagctgtctggtggatgcattcttaggtatttctagaccccgatcagacagtgctcccccaacacccgtgaatagattaagtatgcctcaaagtgctgctgtcagtaccacccccccacataaccggaggcaccgggctgttactgtgaataaggccaccatgaagacaagcacagttagtactgctcatgcctctaaagttcagcaccagacgtcctccacctctcctctgtcaagtccaaatcagactagttcagaaccccggccactgcctgcccctcggagaccaaaggttaacagcatcttgaatctctttggatcatggttatttgatgcagcatttgttcactgtaaacttcataatgggataaacagagacagcagcatgactgccattacaacacaagctagcatggagtttcgacggaaagggtcacaaatgtccacagacaccatggtttccaatcctatgtttgatgcaagtgaatttcctgataactatgaagcaggaagagctgaggcttgtgggacactgtgtaggattttttgtagcaagaagactggagaagagattctgccagcttatttatccagattttacatgcttttaattcaaggtttgcagataaatgattatgtgtgccatcctgtcttggccagcgttattctaaactctcctcctttgttctgctgtgacttgaaagggattgatgttgtggttccttactttatttcagctcttgaaaccattttgcctgacagagaactctcaaaattcaaaagctatgtaaatccaacagaattgcgaagatcctccattaatatcctgctttctttgttgcccctccctcatcattttggcacagtcaaatctgaggtggtcctggaaggaaagtttagtaacgatgacagctcttcttatgataaaccaataacttttctgtccctgaagttgagacttgtgaatatattaataggtgccttgcaaactgaaacggaccccaacaacacccaaatgatattaggggcaatgttaaatattgttcaagattcagcacttttggaagccattggttgccagatggagatgggtggtggagaaaataacctgaagagtcatagtcgcaccaatagtggtattagttcagcaagtggtggaagcacggagcccacgactcccgatagtgagagacctgctcaagctctcttaagagattatgctcttaatacagattcagctgctgggctcctgattcgcagcattcatctcgtcacccaaagactcaactcccagtggcgccaagacatgagcatatcactggcagctctagagctcctctctggccttgcaaaggtaaaagtgatggttgactcaggagaccggaagcgagccatcagttctgtgtgcacctacattgtttatcagtgtagtcggccagctcctttacactccagggatctgcactccatgatagtggcagcttttcagtgtctctgtgtctggctgacagagcaccctgatatgcttgatgaaaaggactgccttaaggaagtactggagattgtggaactgggtatctcaggaagtaagtccaagaacaatgagcaagaggtcaagtacaaaggagataaggagccaaaccctgcatctatgagggtaaaggatgctgctgaagccaccctaacatgcattatgcagttgctcggcgcatttccttcacctagtggtcctgcctctccttgtagtcttgtgaatgagaccactttgattaaatactccaggctgccaaccataaacaagcatagtttccggtactttgtcttggataacagtgtcatcctggcaatgctggaacaacctcttggaaatgagcagaatgattttttcccctctgtcactgtgctggtccggggaatgtctggaagacttgcttgggcacaacagctttgtcttttacccagaggagcaaaagcaaatcagaagctttttgtacctgaacctcgcccagttcctaaaaatgacgttggatttaaatattctgtgaaacatcggccatttcctgaagaggtggacaagattccttttgtgaaagcagatctcagcattccagatttgcatgaaatagtcactgaagaattagaagagagacacgaaaaattaaggagtggcatggcccagcagattgcttatgaaatacaccttgagcaacagagtgaggaggaattgcagaagagaagttttcctgacccagttacggattgcaagcccccgcctcctgcccaggaattccaaacagcccgcctttttctctcacactttggatttttgtccttagaagcactgaaggaacctgcaaatagtcgtctacctcctcaccttattgcacttgattccacgatacctggattttttgatgacattgggtatctggatctcttgccatgtcgtccttttgacacagtttttattttctatatgaagccaggtcagaaaacgaaccaagagattttaaagaatgtggagtcttccagaactgttcagccacatttcctagaatttttgctttcccttggctggtcagtagatgtgggcagacaccctggttggactgggcatgtttctaccagttggtctattaattgttgtgatgatggtgaaggatctcaacaagaagaagtgatttcctctgaagatattggagctagcattttcaatggacagaagaaggtgctgtattatgctgatgcccttacagaaattgcttttgtggttccttctcctgtggagtccttaactgattcattggaaagtaacatctcggaccaagatagtgattcaaatatggatcttatgccaggaattctgaaacagccatccctgacacttgagcttttccccaatcatacagacaatcttaattcctcacagaggctcagtcccagttccagaatgaggaagctgcctcagggtcgccctgttcctccccttggacctgagacaagagtttctgtagtctgggtggaacgctatgatgatatagaaaactttcccctctcagagctgatgacagagatcagtactggtgtggaaactactgcaaatagtagcacttcactgagatctacaactcttgaaaaagaagttcctgtcatcttcatccaccctttaaacactggattattccggataaaaattcaaggagccactggaaaatttaatatggtcatccctcttgtggatgggatgattgtcagcaggcgagctcttggctttctggtgaggcagactgtaattaacatttgtagaagaaagagactggaaagtgactcctacagtcccccccatgtccgccggaaacagaaaatcaccgacattgtcaacaagtaccggaacaagcagctggagccagagttttatacttcacttttccaggaggttggactcaagaactgcagttcttagaccactgaatttctaagactgttgaactccagtttgggaactataacacagcagaacagtttgataggtgatcactgtaaaaataaaaacaaatcactcccaagagcttactgtttaatcaccagaatagaagaaacacattataacccatttgatagaagactttgggctatctagtgaaatgggctcccagacacaatcacactcctgctgataatgatgatatacattttagccataaactttcttttaaaagtgacaattttagttaaacataagccttttgaggagaaaggcttttatgcatctcagttaaacacgtgcattggtagtatcaacaaatttgcaatatagaagttgaagatagttttttacctcactttttaggaggttgtattcaaaattaaaatctcagaatcttacaggacatttaaagactcatgttgatagcatggaggagaaggaaagaagtcacagccttctactcagttgtaggtcttcttgtcatccagctgtcacactgacaaaaagaaaagatgatacatgttttttgctcagataagaagcctgacattaaaagatgtcatatttttttctccacatttcaaaaagttgtccttctcatcactgcacagatctgtctgaaagcctcagtttctgagtgacccaggaacagatcagaaatggagcatggccttgtcctttaatggggatgcaaataaagtttgtggggttaaaagttataagacagcagtgataccccactctctccattattgtccagcggggtgacataatgacaggttaaatatttgtgattcattgattaaatattatttaaagaaatgtaaattcacaataagggttgaaaattatttggtttcatccattgtctcttatttcaggaccaagcagcaaactgcagtagtttgtgaaggattctaatatggggttcaggaatagcctctcaacgctactaattcagatctctcccagagaactactggatttcctcataattgacaaacatgagtgaccacctctttgggtggctactgttagaaatggctgttgtcatgttttctggactttgccagccaacagatccctgccaggttttggaaatacttctattacctcgctgctacttttctgcagggataaaacttttgaggtggccagacccagaacatccaaggattcctgttacagtgctacagtatacactgctcatttatcctattctcatgtgctttcttctttagtaagattattttaagaaaataagtgatatttaaagtccaaagaggaatgatcacagttgtataaggggtgttttcccacttgaactctgatgtcagtcgactgtgggtcagagctacaaccatctgtttggtttgatgttttggtggtttacttacggagtggggatagtgtgagacctaattccctgtgcaaatgtctcttattccagaaatgtgcattttgtcatctataagcaagaaatatgggcatagcagctcttggtttaaagtttgccataacctgttcatgtttgttttaagctcaggtaaagataacctcctctttctatgactccagtttccattcaggttatagtattattcaatagttgattttctttttaagctgggcaataaattgatgtttccagatggtaacatgggagagggcatataggataaagatgagcaaattctaccctaaaaatgttctagtagttcacaggaagaagatgaggtttaataactttcaaggtaattctagattgacattttgaggggaaaatgggctcttgttctagttgaagtgagcagagaaggctataaattaatatgtaacttacagcattccagaggttaaaaataactgatgcagatgtacttcttcagtgtgattcttcagatcaaacttttacttttggcatagttaatttcagaaaaatgtgctgtatgtgtgtgtgtatgagggttggtcttgctgatccttcagttagctctaaattctggcaactccttgtaattccaatgtatttgatacatgaacaatcatgttgaatgcatttgtgatctgggagacttcctcgtcttccagggaaggaaggatgtgcagcccctgaaggcatgaaactcccagtgtgtacggagccagtggaatatgggatacccataccttaccaggcgctggttccttctgctcacaataacatctgcccaaagagggagtgggaagaacgcttagctctttcactagtatggatttgagttcatggtcactatttttacccacctgcctttgttaaaaatcactttgagtagaatagcactggaggaacatatttagcacctaatattaatatttagtagtccattgataaatttgccagcatatgttctagcctctggggggaaaccaggaccacttttgtctgtggcttaaacagttcagttgctatatctgttgggtatgccgggggtggatgagtgtggcattccgtgaagaggaaggtggtaagtaaggtttcccttctactgccttcttaagttgcaggagggagcttttctcctcccctctggttgggagcactgaggacagtgaggagggcttttaccttgttaatcctttccttatttagctagctttcctttttgtctagggcttcctcttgagaccctcttccatccattgggcctttgaaaggactaatcagacacacacacacacacacacacacacacacacactcgcatactcatgcacattttccttcatttccagatcctttatttcagagcagcccattttcctctggattcattgatgaatacaagtacccacacctttggccagtaatgtcagttacctgctgcaggttctgtgtatgaggccttcatgaacggttaccttctccatacactagggaagcatttgtcagactctgcagactgggttctagagaggcagagtctttaagagtattcatttcttctggaaggtggagctttacccaaagtggaagttagccttgctcaaagatgtgttttgtggtaggtggtaaaaataaataaataaataaataataaaaaaagaaacatgtattggaggtaatttgacactgctgctggcagtagttctctattcaccattttaaagcccattcaggttctctcttcctgaaaagaactgattgctgtgtttacatgaaatgacattggagtcagatggtctgttttaaagatttccatgacagcctcttttcctgagttggagagattggaggtggtctatccgtacgatgtggaatcaaacggtgggtttcttagtagctaaagaagccatgtacttctagtgtgtttctcagaatatcaactcatgttcttcagatgcttttctttttttaatggtgagggaaaaggtataatttgggattccacagtgccttgcatatagtaggcgcccagtaaatacttgttgaagcaaaccaagtttcccaagtcctcatctcttatagtgaccaagacatctttctcctctgaagggcttggcagttgtggctaaaaaataagcagtatcattatttgcttgaaatcatatatacagtttgtatgaatttcagtatgttgccaagacatgattttttcttattgtattttctgtaaatatttctggcactgaactgtaaagtaaaggcaaagtgtaaatatgaaggcgtgcccgtgccccttgcctcctgtgtttcatcttcgtcggttagggaagaaggtccagaggtttgtttgtatttatgccgatcctttgtccagaagaagcccatggaatattgaatgtaatacatttagtcaattaaattttaaggagattcttatctaataa

SEQ ID NO: 276599 - DNA, 4075 bp, Artificial Sequence
  derived and/or modified sequence
attaacgacatacttctggccccaccaactgttcaaggtggcattgctgagaatctagcagagaagttgattggtgttctctttgaggtgtggttactagcttgtactcggtgcttcccaacacctccttattggaaaacagccaaggagatggtggctaactggaggcatcacccagcagtggtggagcagtggagcaaggtcatttgtgcactcacttccagattgctacgctttacatatggtccttcatttcctgcatttaaagttcccgatgaagatgccagtctgatccctccagaaatggataatgagtgtgttgcacagacatggtttcgctttttacacatgttaagtaatcctgtggatttgagtaacccagctattataagctctactcccaaatttcaggaacagttcttgaatgtgagcggaatgccgcaagaattgaatcagtatccctgccttaaacatctgcctcaaatattttttcgtgccatgcgtggaatcagctgtctggtggatgcattcttaggtatttctagaccccgatcagacagtgctcccccaacacccgtgaatagattaagtatgcctcaaagtgctgctgtcagtaccacccccccacataaccggaggcaccgggctgttactgtgaataaggccaccatgaagacaagcacagttagtactgctcatgcctctaaagttcagcaccagacgtcctccacctctcctctgtcaagtccaaatcagactagttcagaaccccggccactgcctgcccctcggagaccaaaggttaacagcatcttgaatctctttggatcatggttatttgatgcagcatttgttcactgtaaacttcataatgggataaacagagacagcagcatgactgccattacaacacaagctagcatggagtttcgacggaaagggtcacaaatgtccacagacaccatggtttccaatcctatgtttgatgcaagtgaatttcctgataactatgaagcaggaagagctgaggcttgtgggacactgtgtaggattttttgtagcaagaagactggagaagagattctgccagcttatttatccagattttacatgcttttaattcaaggtttgcagataaatgattatgtgtgccatcctgtcttggccagcgttattctaaactctcctcctttgttctgctgtgacttgaaagggattgatgttgtggttccttactttatttcagctcttgaaaccattttgcctgacagagaactctcaaaattcaaaagctatgtaaatccaacagaattgcgaagatcctccattaatatcctgctttctttgttgcccctccctcatcattttggcacagtcaaatctgaggtggtcctggaaggaaagtttagtaacgatgacagctcttcttatgataaaccaataacttttctgtccctgaagttgagacttgtgaatatattaataggtgccttgcaaactgaaacggaccccaacaacacccaaatgatattaggggcaatgttaaatattgttcaagattcagcacttttggaagccattggttgccagatggagatgggtggtggagaaaataacctgaagagtcatagtcgcaccaatagtggtattagttcagcaagtggtggaagcacggagcccacgactcccgatagtgagagacctgctcaagctctcttaagagattatgctcttaatacagattcagctgctgggctcctgattcgcagcattcatctcgtcacccaaagactcaactcccagtggcgccaagacatgagcatatcactggcagctctagagctcctctctggccttgcaaaggtaaaagtgatggttgactcaggagaccggaagcgagccatcagttctgtgtgcacctacattgtttatcagtgtagtcggccagctcctttacactccagggatctgcactccatgatagtggcagcttttcagtgtctctgtgtctggctgacagagcaccctgatatgcttgatgaaaaggactgccttaaggaagtactggagattgtggaactgggtatctcaggaagtaagtccaagaacaatgagcaagaggtcaagtacaaaggagataaggagccaaaccctgcatctatgagggtaaaggatgctgctgaagccaccctaacatgcattatgcagttgctcggcgcatttccttcacctagtggtcctgcctctccttgtagtcttgtgaatgagaccactttgattaaatactccaggctgccaaccataaacaagcatagtttccggtactttgtcttggataacagtgtcatcctggcaatgctggaacaacctcttggaaatgagcagaatgattttttcccctctgtcactgtgctggtccggggaatgtctggaagacttgcttgggcacaacagctttgtcttttacccagaggagcaaaagcaaatcagaagctttttgtacctgaacctcgcccagttcctaaaaatgacgttggatttaaatattctgtgaaacatcggccatttcctgaagaggtggacaagattccttttgtgaaagcagatctcagcattccagatttgcatgaaatagtcactgaagaattagaagagagacacgaaaaattaaggagtggcatggcccagcagattgcttatgaaatacaccttgagcaacagagtgaggaggaattgcagaagagaagttttcctgacccagttacggattgcaagcccccgcctcctgcccaggaattccaaacagcccgcctttttctctcacactttggatttttgtccttagaagcactgaaggaacctgcaaatagtcgtctacctcctcaccttattgcacttgattccacgatacctggattttttgatgacattgggtatctggatctcttgccatgtcgtccttttgacacagtttttattttctatatgaagccaggtcagaaaacgaaccaagagattttaaagaatgtggagtcttccagaactgttcagccacatttcctagaatttttgctttcccttggctggtcagtagatgtgggcagacaccctggttggactgggcatgtttctaccagttggtctattaattgttgtgatgatggtgaaggatctcaacaagaagaagtgatttcctctgaagatattggagctagcattttcaatggacagaagaaggtgctgtattatgctgatgcccttacagaaattgcttttgtggttccttctcctgtggagtccttaactgattcattggaaagtaacatctcggaccaagatagtgattcaaatatggatcttatgccaggaattctgaaacagccatccctgacacttgagcttttccccaatcatacagacaatcttaattcctcacagaggctcagtcccagttccagaatgaggaagctgcctcagggtcgccctgttcctccccttggacctgagacaagagtttctgtagtctgggtggaacgctatgatgatatagaaaactttcccctctcagagctgatgacagagatcagtactggtgtggaaactactgcaaatagtagcacttcactgagatctacaactcttgaaaaagaagttcctgtcatcttcatccaccctttaaacactggattattccggataaaaattcaaggagccactggaaaatttaatatggtcatccctcttgtggatgggatgattgtcagcaggcgagctcttggctttctggtgaggcagactgtaattaacatttgtagaagaaagagactggaaagtgactcctacagtcccccccatgtccgccggaaacagaaaatcaccgacattgtcaacaagtaccggaacaagcagctggagccagagttttatacttcacttttccaggaggttggactcaagaactgcagttcttagaccactgaatttctaagactgttgaactccagtttgggaactataacacagcagaacagtttgataggtgatcactgtaaaaataaaaacaaatcactcccaa

SEQ ID NO: 276600 - protein, 104 aa, Artificial Sequence
  derived and/or modified sequence
MYDRYRDMRDSRDPMYRREGSYDRYLRMDDYCRRKDDSYFDRYRDSFDGRGPPGPESQSRAKERLKREERRREELYRQYFEEIQRRFDAERPVDCSVIVVNKQT

SEQ ID NO: 276601 - DNA, 1740 bp, Artificial Sequence
  derived and/or modified sequence
atgaacactgctcccagcaggcctagccctacacgtcgcgacccttacggtttcggcgacagtagagattcgagaagagataggtctccgattagggggtcccctaggcgggagcctcgtgatggtcgtaatggcagagacgcccgggactctagagatatccgggatccaagggatctgcgcgaccaccgccacagcagagacttaagagatcatagagactctcggtctgtgagagatgtgcgggacgtgcgcgacttgcgtgacttccgggatctgcgcgactcccgcgatttccgcgaccaacgggaccccatgtacgatagatacagagatatgcgagactcgcgtgatccgatgtacaggagagaaggatcctacgaccgctatctgcgcatggacgattattgcagacgaaaggacgactcatattttgatcggtatcgggattcatttgatggtagaggtcctccagggcccgagtcccagtcacgagctaaagagcgcttgaaaagagaggagcggcgacgggaggaactgtatcgtcagtattttgaagagatccagcgcagatttgacgcagagcgtcccgtggattgctcagtaatagtcgttaacaagcagacaaaggactacgcagaatccgtgggaaggaaagtgcgggatcttggaatggtggtggacctcattttcttgaatacggaggtttcactgtctcaagccctggaggatgtaagtcgcggaggttccccctttgccattgtgatcacgcagcagcaccagattcacaggtcctgcacggtgaatatcatgttcgggacaccacaagaacacagaaacatgcctcaggccgatgctatggtcctcgtcgccaggaactacgagaggtataaaaacgagtgccgcgagaaggagcgcgaggaaattgctcgccaagcggcaaagatggcggatgaagcgatactgcaggagcgagagagaggggggcccgaggagggcgtgagagggggccatccccctgcgattcagtcactgatcaacctgcttgccgacaatcgatacttgacagccgaggagactgataaaatcattaattacttgagggaacgaaaggaacggctgatgcgtagctcaaccgacagcttgcccgggccgatttctaggcagcctctgggcgcaacatcaggagcctctctgaagactcaaccctcgtctcagcctttgcaatctgggcaggtgcttccttcagctacccccacccctagtgctccacccaccagccagcaggaattacaggccaagatcctctccctgttcaattcaggaactgtgaccgccaattcctccagcgcaagcccttcagtggccgccggtaatactcccaatcagaatttttccactgctgccaactcccagcctcagcagagatctcaggcttcaggaaaccagcccccttctattcttggccagggcggctctgcacagaatatggggcccaggcctggcgctccctcccaggggctctttggacagccctccagtcgactggcccctgcaagcaatatgacttcgcagcggccagtgagctcaactggaatcaactttgataatcccagcgttcaaaaagcactggatacactgatacaatcaggcccagccttgtctcatctggtgtctcaaacaactgcccaaatgggacagccacaagcccctatgggctcctaccagcggcactactag

SEQ ID NO: 276602 - DNA, 3220 bp, Artificial Sequence
  derived and/or modified sequence
cggccgccattgcctcgtgcccgcgccggtcggttggtggcgcctttgtcctacggcgggcaggtgggccgacgcggaggcggcagcggcgggcctgaggcgaaggagcggccgggagcccgccgcgctggtagcgatattaataaggcagcggaaagaagaaatatgaatacggctccatcaagacccagccccacacgaagggatccatatggctttggagacagtcgagattcaaggcgtgatcgatccccaattcgaggaagtccaaggagagagcccagggatggcagaaatggccgggatgcccgggacagcagagacattcgagacccccgagacttgcgggaccacagacatagtagagatttgcgggatcacagagacagcaggagtgtgcgcgacgttcgggacgtgagggatcttagagactttcgtgatctaagagactctagggattttcgagatcagcgagaccccatgtacgacagatacagagacatgagagactcccgagatcctatgtacaggagagaaggctcttatgaccgatacctacgaatggatgactattgcaggagaaaggatgactcttattttgaccgttacagagatagctttgatggacggggccctccaggcccagaaagtcagtctcgtgcaaaagagcgtttgaaacgtgaggaacggcgtagagaagagctttatcgtcaatattttgaggaaatccagagacgctttgatgccgaaaggcccgttgattgttctgtgattgtggtcaacaaacagacaaaagactatgctgagtctgtggggcggaaggtgcgagacctgggcatggtagtggacttgatcttccttaacacagaagtgtcactgtcacaagccttggaggatgttagcaggggaggttctccttttgctattgtcatcacccagcaacaccagattcaccgctcctgcacagtcaacatcatgtttggaaccccgcaagagcatcgcaacatgccccaagcagatgccatggtgctggtggccagaaattatgagcgttacaagaatgagtgccgggagaaggaacgtgaggagattgccagacaggcagccaagatggccgatgaagccatcctgcaggaaagagagagaggaggccctgaggagggagtgcgtgggggccaccctccagccatccagagcctcatcaacctgctggcagacaacaggtacctcactgctgaagagactgacaagatcatcaactacctgcgagagcggaaggagcggctgatgaggagcagcaccgactctctgcctggcccgatttcccgccaaccactcggggcgacctcgggtgcctcgctgaagacacagccaagctcccaaccgctccagagcggccaagtgctcccctctgctacacccactccatctgcaccccccacctcccagcaagagcttcaggccaaaatcctcagcctcttcaatagtggcacagtgacggccaatagcagctctgcatccccctcggttgctgccggaaacaccccaaaccagaatttttccacagcagcaaacagccagcctcaacaaagatcacaggcttctggcaatcagcctccaagcattttgggacagggaggatctgctcagaacatgggccccagacctggggctccttcccaagggctttttggccagccttccagtcgcctggcacctgctagcaacatgactagccagaggcctgtgtcttccacaggtatcaactttgacaatccaagtgtacagaaggctctggataccctgatccagagtggccctgctctctcccacctggttagccagaccacagcacagatggggcagccacaggcccccatgggatcttaccagaggcattactgaagctaaatctttcaactctccccagtcccctcatcccctggcctcctcccacttacttgttctaaatagagctgtttggaggatgttctctgcgctcccaggccggcatcgagtgtcatcaatttctaccacctgctctctcttctgcccaaggctgtgttgcttattccttacaaagtttatactgcatttggggctgtatctttttttgttttttgttttgtagaaaataaatatctccgggggcagtacaggtgtctgggcttgtatttgatggggtttctccggtccctgtttctactggatttggagccaggcccagctagccaagtttggaatggcatttgtcatgtcagtagccaccacctttgttcattgtgaacctaccaaggctttccagcttcatacacattgaccagagctcaagctcctgcctgcaactcctgcctagagttgaagaaaagcaaactggccttggcaggcacagtgtcatcataccctcaccccatatgtttggggtctgcttgaggattcataaatcagccactctggattgttgaggaatggccatggcagccacagaaaaaagaatttttctctctgagccaaggttgttttttgtttttttctcttttcttttttgttttcatttcattggaagatctccaatggactgaacagctccagtcagcagcagttaccacaaactgtgaatctgggccccaccactcttccctgttaaccagttctgtcagcatccccctctccagcagcacttccatgaagttggttctgagactctggccgtgaacacccgtttcttcagtgatttgttttgggcttttggctcaaaaccccaggctcttgtttttgtctagactcttattctgtttcctgagcagcaggaggtagggaccactttgatgtcagacttctggtagctggacatgttctcgagatgggtggctgttcgcgacttttgtaccagagtgaaattgttagaaggagggtttctggctgtggttctaaatggagccccaggaagctgccctctccccagggtttgtgctcagtagagccctgtggatcacagtcttgaggtcctctagcaggggtgagggagagcagcgacttcagctgagtccctgccagtggttaagcaaacaatggtttcaaaattcaaggtccccaaatggcagcattttatgttctgacctgtttgtgttatatagtggttttttttttcctctttggaactcttgtgttgttaataaaatgaaatgattactttttaattaaaatgaaaaaagtaaaa

SEQ ID NO: 276603 - DNA, 1740 bp, Artificial Sequence
  derived and/or modified sequence
atgaacacagcccccagccggcccagccccacccggcgggacccctacggctttggagacagccgggacagcagaagagacaggagccccatccggggcagcccccggcgggagcccagagatggaagaaatggaagagatgcccgggacagccgggacatccgggacccccgggacctgcgggaccaccgccacagccgggacctgcgggaccaccgggacagccgctctgtgagagatgtgagagatgtgcgggacctgcgggacttccgggacctgcgggacagccgggacttccgggaccagagggaccccatgtatgaccgctacagagacatgagggacagccgggaccccatgtaccgccgggagggcagctatgaccgctacctgaggatggatgactactgcaggaggaaggatgacagctactttgaccgctacagagacagctttgatggccggggccccccaggccctgagagccagagccgggccaaggagcggctgaagcgggaggagcggcggcgggaggagctgtaccggcagtactttgaggagatccagaggagatttgatgctgagaggcctgtggactgcagcgtgattgtggtgaacaagcagaccaaggactatgcagagagcgtgggcaggaaggtgcgggacctgggcatggtggtggacctgatcttcctgaacacagaggtgtccctgagccaggccctggaggatgtgtcccggggcggcagcccctttgccatcgtcatcacccagcagcaccagatccacaggagctgcaccgtgaacatcatgtttggcaccccccaggagcacaggaacatgccccaggctgatgccatggtgctggtggccaggaactatgaaagatacaagaatgaatgtcgggagaaggagcgggaggagatcgcccggcaggccgccaagatggctgatgaggccatcctgcaggagcgggagcggggcggccctgaggagggcgtgcggggcggccaccccccagccatccagagcctcatcaacctgctggccgacaaccgctacctgacagctgaggagacagacaagatcatcaactacctgcgggagaggaaggagcggctgatgaggagcagcacagacagcctgcccggccccatcagccggcagcccctgggcgccaccagcggggccagcctgaagacccagcccagcagccagcccctgcagagcggccaggtgctgcccagcgccacccccacccccagcgccccacccaccagccagcaggagctgcaggccaagatcctgagcctcttcaacagcggcaccgtgacagccaacagcagcagcgccagccccagcgtggccgccggcaacacccccaaccagaacttcagcacagctgccaacagccagccccagcagaggagccaggccagcggcaaccagccccccagcatcctgggccagggcggcagcgcccagaacatgggccccaggcctggggcccccagccagggcctgtttggccagcccagcagccggctggccccagccagcaacatgaccagccagaggcctgtgagcagcacaggcatcaactttgacaaccccagcgtgcagaaggccctggacaccctcatccagagcggccctgccctgagccacctggtgtcccagaccacagcccagatgggccagccccaggcccccatgggcagctaccagaggcactactag

SEQ ID NO: 276604 - DNA, 1740 bp, Artificial Sequence
  derived and/or modified sequence
atgaacaccgcccccagccggcccagccccacccggcgggacccctatggctttggcgatagtagagactcaaggcgtgatcgcagtccaatcaggggtagccctcgacgggagccaagagacggccgcaatggccgagatgcgagagactctcgcgacattcgcgatccacgcgatctacgcgaccacagacactcccgagatctacgtgatcacagagattcgaggagcgtgcgcgacgttagagacgtgcgggacttgcgtgactttcgcgacctgcgcgattcccgggatttcagagaccaacgcgatccgatgtacgaccgatacagagatatgcgcgacagtcgggaccctatgtaccgtagggaggggagctatgatcgctatctacgaatggatgactactgtcgccgaaaggacgactcatacttcgatagatatagggatagcttcgatggtagaggaccacctggaccagagagccaaagccgtgcaaaggagagactcaagagggaagagaggcggagagaggagttatacagacaatatttcgaggagatccagaggcggtttgacgctgagcgcccagtggattgttccgtgatcgtggtgaacaagcagacaaaggactacgccgagagcgtcgggcggaaagtgcgagatctggggatggttgttgacctcatatttctgaacaccgaagtgtcactatcccaggccctggaagatgtcagtcgcggcggcagcccattcgccattgtaattactcagcagcaccaaattcaccgatcgtgcactgtgaacattatgtttgggactccacaggaacaccggaacatgccccaggccgatgctatggtccttgtggcccgcaattatgagaggtataaaaacgaatgtcgcgagaaggaacgagaagagattgcacgacaagcagccaaaatggcagacgaggctatcctccaggagagagagcggggaggacctgaggaaggagtgaggggggggcaccctcccgcgatccagagcctaataaacttactggccgataacagatatctgactgcggaagaaactgacaagataataaattatcttagggagagaaaagagcggctgatgagatctagcaccgactccctgccaggcccaatctctagacagcccctaggcgctacttcaggcgcaagcctgaaaacccaaccaagctcccagcccctgcaatctggtcaggtactaccatcagccaccccaactccctcagcaccccctaccagccagcaagagttgcaggccaagatcttaagcctgtttaattccggaaccgtgacagccaattcgtcttctgcttcccccagtgtggctgccggtaacactcccaaccagaatttttccacagccgccaacagccagccccagcagcgcagtcaggccagcgggaatcagcctccttctatattagggcaagggggctcagcacagaacatgggcccccgtcctggtgccccctcacaggggctcttcggtcagccgagtagtaggctggctccggctagtaacatgactagtcaaagacccgtgtcctcaactggcatcaatttcgacaaccccagtgtgcagaaagctctcgacacccttatccaatcaggaccagctttgtcccacctggtctcacagacaacagcacagatggggcagccccaagcaccgatgggctcctatcagcggcattattag

SEQ ID NO: 276605 - DNA, 1740 bp, Artificial Sequence
  derived and/or modified sequence
atgaacactgccccatctaggccctcccccaccaggcgggacccctatggattcggcgacagccgtgatagccgcagggacagatcacctattagaggcagtccgaggcgggaaccgagagatggccgaaacggccgagacgcacgggattctagggacattagggatcctcgggatctgcgcgatcatcggcatagccgcgatttgcgcgaccacagagattcacgctccgtccgggacgtgcgggacgtgcgggacttgagagactttcgagacctgcgtgattctcgcgatttccgcgatcagagagatcccatgtacgaccggtaccgggatatgagagactccagggacccaatgtatcgcagggaagggtcctacgacagatacttacgaatggacgattactgcagaaggaaagatgactcatactttgatcggtaccgcgatagcttcgatggtcgcggtccacctggccctgagtcacagtctcgggcaaaagaaagactgaagagggaggagcggaggcgagaagaattgtatcggcagtacttcgaggaaatccagaggaggtttgatgccgagcggcctgttgactgctccgtgatcgttgttaacaagcagacaaaggattacgcagaaagcgtggggagaaaagtcagagacctgggaatggtggtcgatctcattttcctgaacactgaggtctccctgtctcaagccctcgaagacgtatcaaggggcggttctcccttcgctatcgtcataactcaacagcatcagatccatagatcatgcaccgtgaacatcatgtttgggacccctcaagaacatcgcaatatgcctcaagctgatgctatggtgctggtggcacggaactacgagcggtacaagaacgaatgtcgcgaaaaggaacgggaagagatcgccaggcaggcggctaaaatggctgacgaggccatccttcaggaacgcgagcgcggtggcccagaggagggagttcggggtggccacccgccagcaatacagtcactgattaacctgcttgcagacaataggtatctgaccgccgaagaaacagacaagataatcaattaccttcgggagagaaaggaacgcctgatgcggagcagcactgattcacttcctggacccatttcgagacagcctctcggcgctacaagtggggctagcctcaagacccagcccagctcccagcccttgcaatccggacaggtgctcccatcagctacacctactccctctgcgcctcccacctctcagcaggagctgcaggctaaaatactgtcactcttcaattctggcaccgtgacagccaactcatcttcagcgtcccccagcgtggccgcaggcaatacccccaaccagaattttagtaccgccgcaaatagccaaccacaacagcggtcacaggcatccggaaaccaaccacccagcattcttggccagggcggaagcgcccagaacatgggaccacggccaggagccccatcgcaagggctcttcggacagcccagtagtcgcctggctccagccagcaatatgaccagccaaaggcctgtatcctctacaggcattaacttcgacaaccccagtgtgcagaaggccctggataccctcatacagtctggccctgccctaagccatctggtgagtcagactaccgcccagatgggacagcctcaagcaccgatgggatcttaccagcgccattactag

SEQ ID NO: 276606 - DNA, 1740 bp, Artificial Sequence
  derived and/or modified sequence
atgaacaccgcccccagcagacccagccccaccagaagagacccctacggcttcggcgacagcagagacagcagaagagacagaagccccatcagaggcagccccagaagagagcccagagacggcagaaacggcagagacgccagagacagcagagacatcagagaccccagagacctgagagaccacagacacagcagagacctgagagaccacagagacagcagaagcgtgagagacgtgagagacgtgagagacctgagagacttcagagacctgagagacagcagagacttcagagaccagagagaccccatgtacgacagatacagagacatgagagacagcagagaccccatgtacagaagagagggcagctacgacagatacctgagaatggacgactactgcagaagaaaggacgacagctacttcgacagatacagagacagcttcgacggcagaggcccccccggccccgagagccagagcagagccaaggagagactgaagagagaggagagaagaagagaggagctgtacagacagtacttcgaggagatccagagaagattcgacgccgagagacccgtggactgcagcgtgatcgtggtgaacaagcagaccaaggactacgccgagagcgtgggcagaaaggtgagagacctgggcatggtggtggacctgatcttcctgaacaccgaggtgagcctgagccaggccctggaggacgtgagcagaggcggcagccccttcgccatcgtgatcacccagcagcaccagatccacagaagctgcaccgtgaacatcatgttcggcaccccccaggagcacagaaacatgccccaggccgacgccatggtgctggtggccagaaactacgagagatacaagaacgagtgcagagagaaggagagagaggagatcgccagacaggccgccaagatggccgacgaggccatcctgcaggagagagagagaggcggccccgaggagggcgtgagaggcggccacccccccgccatccagagcctgatcaacctgctggccgacaacagatacctgaccgccgaggagaccgacaagatcatcaactacctgagagagagaaaggagagactgatgagaagcagcaccgacagcctgcccggccccatcagcagacagcccctgggcgccaccagcggcgccagcctgaagacccagcccagcagccagcccctgcagagcggccaggtgctgcccagcgccacccccacccccagcgccccccccaccagccagcaggagctgcaggccaagatcctgagcctgttcaacagcggcaccgtgaccgccaacagcagcagcgccagccccagcgtggccgccggcaacacccccaaccagaacttcagcaccgccgccaacagccagccccagcagagaagccaggccagcggcaaccagccccccagcatcctgggccagggcggcagcgcccagaacatgggccccagacccggcgcccccagccagggcctgttcggccagcccagcagcagactggcccccgccagcaacatgaccagccagagacccgtgagcagcaccggcatcaacttcgacaaccccagcgtgcagaaggccctggacaccctgatccagagcggccccgccctgagccacctggtgagccagaccaccgcccagatgggccagccccaggcccccatgggcagctaccagagacactactag

SEQ ID NO: 276607 - protein, 146 aa, Artificial Sequence
  derived and/or modified sequence
GTYTLYLIIGDATLKNPILWNVADVVIKFPEEEAPSTVLSQNLFTPKQEIQHLFREPEKRPPTVVSNTFTALILSPLLLLFALWIRIGANVSNFTFAPSTIIFHLGHAEQHISSRRKMEILKTECQEKESRTIHSMRRKMEKKNFI

SEQ ID NO: 276608 - protein, 147 aa, Artificial Sequence
  derived and/or modified sequence
  misc_feature (1)..(1): Xaa can be any naturally occurring amino acid
XGTYTLYLIIGDATLKNPILWNVADVVIKFPEEEAPSTVLSQNLFTPKQEIQHLFREPEKRPPTVVSNTFTALILSPLLLLFALWIRIGANVSNFTFAPSTIIFHLGHAEQHISSRRKMEILKTECQEKESRTIHSMRRKMEKKNFI

SEQ ID NO: 276609 - DNA, 804 bp, Artificial Sequence
  derived and/or modified sequence
gaagaaataactgtggggcagctgatctctcatcttcaggtgtcaaaccaagagatccagacctacgccatcgctcttattaacgcactgtttttgaaggctcccgaggacaagagacaagatatggcaaatgcctttgctcaaaagcatctccggagtatcatcctcaaccatgtgatcagggggaataggccaattaagaccgagatggctcaccaactctacgtgctgcaagtcctgacatttaatctgctggaagagcgaatgatgacaaagatggatcctaacgaccaggcacagcgggatatcatctttgagttacggcgtattgctttcgacgccgaatcggatccatccaatgccccaggaagcggcaccgagaaaaggaaggccatgtacacgaaggactacaaaatgctgggtttcactaaccatatcaacccggcaatggacttcacgcagacccctcccggcatgctggcacttgacaacatgttatatctcgccaaggtgcaccaagacacttacattagaattgtactggaaaatagtagccgcgaggacaagcacgagtgccctttcgggcgttctgcgatcgaattaaccaagatgctctgcgagatcctgcaggtcggcgaattgcccaatgagggacgcaacgactatcatcctatgttttttacccatgatcgggctttcgaggagctattcggaatttgtattcagctgctgaataaaacatggaaggagatgagagcaaccgccgaagattttaacaaagtctcggtttccggactgctttag

SEQ ID NO: 276610 - DNA, 852 bp, Artificial Sequence
  derived and/or modified sequence
taccaccccatgttttttacacatgaccgggccttcgaggagctgttcggaatatgcatacagctcctgaacaaaacgtggaaggagatgagagctaccgcggaagacttcaacaaagtgatgcaagttgtgagagaacagatcacacgggcactgccatctaagcctaacagcctagaccagtttaagagtaagctgagaagcctgtcttacagcgagatcctgagactgaggcagtctgagcggatgtcccaggatgatttccaatctccgcctatcgtggagctgagggagaagatccagcccgagattctggagttgatcaagcagcagagacttaatagactctgtgagggtagttcattcaggaaaatcgggaaccggcgcagacaggaaagattctggtattgtaggttagccctgaaccacaaagtactccactacggtgatctggacgataaccctcagggtgaggtgactttcgagagcctgcaagagaagaatattaaagcaatcgtgactggaaaagattgcccccacatgaaagaaaaatcagccttgaagcagaacaaggaggtgctggaattagcgttcagcattctttatgatcctgacgaaaccctgaactttattgcacctaacaagtatgaatattgcatttggattgatggtttgagcgccctgctgggcaaagacatgtcatccgaattgacaaagtcagatctggacactctgctgtcgatggagatgaaactaagattactggacctagagaatattcagatcccggaggcgcctccccctatccccaaggagcctagttcatacgatttcgtgtatcattacggctag

SEQ ID NO: 276611 - DNA, 1359 bp, Artificial Sequence
  derived and/or modified sequence
atgcacgtgattagggggaaccgaccgattaagactgagatggcccaccagctgtatgtactgcaagtgcttaccttcaatttgttggaggaacgcatgatgaccaagatggacccaaatgaccaggcacagcgggatataatttttgagctccgcaggattgcgttcgacgccgagagcgaccctagcaacgcccccggaagcggaactgagaaacgaaaagccatgtacacgaaagactataaaatgctgggctttaccaatcacatcaatcccgccatggatttcacccagacgcctccaggcatgttggctttggataatatgttgtacctggccaaggtgcatcaggacacatatataaggatcgtgctagaaaattcgagccgagaggacaagcacgaatgtccctttggacgctccgccatcgaattaaccaagatgttatgtgaaatactacaggtcggagaactgccgaacgagggacgcaatgactaccatccaatgttctttacacacgaccgagcttttgaggagctctttgggatctgtatccaacttctaaacaagacctggaaagagatgagagctacagcggaagatttcaataaggtgatgcaggtggtgagggagcagataacgagggccctgcctagcaagccaaatagcttggatcagtttaaatcaaagttgcgctcactcagctattccgaaattcttcgccttcgacaaagcgagcgcatgtctcaggacgatttccaaagcccacccatagtggagcttagggagaagatacagcctgaaatacttgaactgataaagcagcagcggctgaacagactttgtgaggggagctcttttcgcaaaattggcaaccgccgaagacaggaacgcttttggtattgtagactggccctgaatcacaaagtactgcactatggcgaccttgatgataatccccagggcgaagtgacctttgagtccctgcaggagaagatacccgtggccgacatcaaggccatcgtgaccgggaaggactgtccacacatgaaagagaaatccgcactgaaacagaataaggaggtcctcgaactcgctttctcaatcctttacgatcccgatgagaccctgaacttcattgctcccaataagtacgagtattgtatctggatcgacggcctgtcagcactgctgggaaaggatatgtcctctgaattgaccaagagtgatttggacacactgctgtccatggagatgaaactgaggctccttgacttggagaacatccagattcctgaggcccccccccccatccccaaggaaccttcttcttatgactttgtttatcattacggttag

SEQ ID NO: 276612 - DNA, 804 bp, Artificial Sequence
  derived and/or modified sequence
gaggagatcaccgtgggccagctgatcagccacctgcaggtgagcaaccaggagatccagacctacgccatcgccctgatcaatgccctcttcctgaaggcccctgaggacaagaggcaggacatggccaatgcctttgcccagaagcacctgcggagcatcatcctgaaccacgtgatccggggcaaccggcccatcaagacagagatggcccaccagctgtatgtgctgcaggtgctgaccttcaacctgctggaggagaggatgatgaccaagatggaccccaatgaccaggcccagagggacatcatctttgagctgcggcgcatcgcctttgatgctgagagtgaccccagcaatgcccctggcagcggcacagagaagaggaaggccatgtacaccaaggactacaagatgctgggcttcaccaaccacatcaacccagccatggacttcacccagaccccacctggcatgctggccctggacaacatgctgtacctggccaaggtgcaccaggacacctacatcagaattgtgctggagaacagcagccgggaggacaagcatgaatgtcccttcggccgcagcgccatcgagctgaccaagatgctgtgtgagatcctgcaggtgggggagctgcccaatgaaggaagaaatgactaccaccccatgttcttcacccatgaccgggcctttgaggagctgtttggcatctgcatccagctgctgaacaagacctggaaggagatgagggccacagctgaggacttcaacaaggtgtctgtgtctggcctgctgtag

SEQ ID NO: 276613 - DNA, 852 bp, Artificial Sequence
  derived and/or modified sequence
taccaccccatgttcttcacccatgaccgggcctttgaggagctgtttggcatctgcatccagctgctgaacaagacctggaaggagatgagggccacagctgaggacttcaacaaggtgatgcaggtggtgcgggagcagatcacccgggccctgcccagcaagcccaacagcctggaccagttcaagagcaagctgcggagcctgagctacagcgagatcctgcggctgcggcagagcgagaggatgagccaggatgacttccagagcccccccatcgtggagctgcgggagaagatccagcctgagatcctggagctgatcaagcagcagaggctgaaccggctgtgtgagggcagcagcttcaggaagattggcaacagaagacggcaggagcgcttctggtactgccgcctggccctgaaccacaaggtgctgcactacggggacctggatgacaacccccagggcgaggtgacctttgagagcctgcaggagaagaacatcaaggccatcgtgacaggcaaggactgcccccacatgaaggagaagagcgccctgaagcagaacaaggaggtgctggagctggccttcagcatcctgtatgaccctgatgagaccctgaacttcatcgcccccaacaagtatgagtactgcatctggattgatggcctgagcgccctgctgggcaaggacatgagcagcgagctgaccaagagtgacctggacaccctgctgtccatggagatgaagctgcggctgctggacctggagaacatccagatccctgaggcccccccacccatccccaaggagcccagcagctatgactttgtgtaccactacggctag

SEQ ID NO: 276614 - DNA, 1359 bp, Artificial Sequence
  derived and/or modified sequence
atgcacgtgatccggggcaaccggcccatcaagacagagatggcccaccagctgtatgtgctgcaggtgctgaccttcaacctgctggaggagaggatgatgaccaagatggaccccaatgaccaggcccagagggacatcatctttgagctgcggcgcatcgcctttgatgctgagagtgaccccagcaatgcccctggcagcggcacagagaagaggaaggccatgtacaccaaggactacaagatgctgggcttcaccaaccacatcaacccagccatggacttcacccagaccccacctggcatgctggccctggacaacatgctgtacctggccaaggtgcaccaggacacctacatcagaattgtgctggagaacagcagccgggaggacaagcatgaatgtcccttcggccgcagcgccatcgagctgaccaagatgctgtgtgagatcctgcaggtgggggagctgcccaatgaaggaagaaatgactaccaccccatgttcttcacccatgaccgggcctttgaggagctgtttggcatctgcatccagctgctgaacaagacctggaaggagatgagggccacagctgaggacttcaacaaggtgatgcaggtggtgcgggagcagatcacccgggccctgcccagcaagcccaacagcctggaccagttcaagagcaagctgcggagcctgagctacagcgagatcctgcggctgcggcagagcgagaggatgagccaggatgacttccagagcccccccatcgtggagctgcgggagaagatccagcctgagatcctggagctgatcaagcagcagaggctgaaccggctgtgtgagggcagcagcttcaggaagattggcaacagaagacggcaggagcgcttctggtactgccgcctggccctgaaccacaaggtgctgcactatggagacctggatgacaacccccagggcgaggtgacctttgagagcctgcaggagaagatccctgtggccgacatcaaggccatcgtgacaggcaaggactgcccccacatgaaggagaagagcgccctgaagcagaacaaggaggtgctggagctggccttcagcatcctgtatgaccctgatgagaccctgaacttcatcgcccccaacaagtatgagtactgcatctggattgatggcctgagcgccctgctgggcaaggacatgagcagcgagctgaccaagagtgacctggacaccctgctgtccatggagatgaagctgcggctgctggacctggagaacatccagatccctgaggcccccccacccatccccaaggagcccagcagctatgactttgtgtaccactatggatag

SEQ ID NO: 276615 - DNA, 804 bp, Artificial Sequence
  derived and/or modified sequence
gaggagatcaccgtgggccagctgatcagccacctgcaggtgagcaatcaggaaattcagacctatgctatagccctgataaatgcactcttcctcaaagctcccgaagacaaaaggcaggacatggctaatgcctttgcacagaaacacctaaggtcaattatcctgaatcacgtcatccgcgggaacaggccaatcaagactgaaatggcccaccaactatacgttttgcaggtgctcactttcaacctgcttgaggagagaatgatgaccaaaatggatccaaacgatcaagcacagagagacatcatattcgagcttcggcgtatcgcattcgacgccgaaagcgacccctcgaacgctccagggtctgggacagagaaacgaaaggctatgtatacgaaggactataagatgctgggctttacaaaccacatcaatccagccatggacttcacccagaccccccccgggatgctcgcccttgataacatgctctacctggctaaggtccatcaggacacatacatacggatcgtcttagagaattcttcgagagaagataagcatgagtgccccttcggaagatcagcaatcgagcttactaagatgttgtgcgagattctgcaagttggcgagcttcctaacgaaggccggaatgactatcatcctatgttctttacacatgacagagcctttgaagagctctttgggatctgcatccagctgctgaataaaacctggaaggaaatgcgggccaccgcagaagacttcaataaagtgtctgtttcgggcttgttgtag

SEQ ID NO: 276616 - DNA, 852 bp, Artificial Sequence
  derived and/or modified sequence
taccaccccatgttcttcacccacgaccgggccttcgaggagctgtttggaatttgcatccagctgctgaataagacgtggaaggagatgcgagcaaccgcagaagatttcaacaaagtgatgcaggtggtgcgggagcaaatcacgcgggccctgcctagcaaaccaaatagtctcgaccaatttaaatcgaaacttagatcgctatcttacagcgaaattctgcgcctccgccaaagcgagcggatgtctcaggacgattttcagagcccaccaattgttgaactgagagagaagatacaacctgagatcctggagctcatcaagcaacagaggcttaaccggctgtgcgaaggctcaagcttccggaagatcggcaatcgccgccgccaggaacgattctggtattgtagactcgccctgaatcataaggtactgcattacggcgatctggacgacaaccctcagggagaggtgaccttcgagtctctccaggagaagaacatcaaagcaatcgtgactggcaaggactgcccccatatgaaggaaaaatctgccttgaaacagaataaggaggtcctggagttggcattttctatcctgtacgatccagatgagacccttaacttcatcgcacccaacaagtacgagtattgtatctggatcgatggcttgtctgcactcttgggaaaggatatgagtagcgagctcactaagagcgacctggataccttactaagtatggagatgaagctccgacttctggatctcgaaaacatccagattccagaagccccacctcccattcctaaggagccttcttcatacgactttgtttatcattatggatag

SEQ ID NO: 276617 - DNA, 1359 bp, Artificial Sequence
  derived and/or modified sequence
atgcacgtgatccggggcaaccggcccatcaagaccgagatggcccatcagctgtatgtgttgcaggtcctgacctttaatcttctcgaagaaagaatgatgacgaaaatggatccaaacgatcaggcacagagggatattatcttcgagctgaggcggatcgcctttgatgctgaatctgatccaagcaatgcgcccggatctgggacagagaaaaggaaagcgatgtataccaaagattacaagatgctagggtttacgaatcacatcaacccagctatggacttcacccaaaccccacccggaatgctggcccttgataatatgctttacctagcgaaggttcatcaggatacctacatcagaattgtcctggaaaattcctctcgcgaagataaacatgagtgcccatttggcaggtccgcaattgagttgaccaaaatgttgtgcgagatactgcaagtcggagagctccccaacgaaggccgcaatgattatcacccaatgttcttcactcatgatagagcttttgaagagctctttggaatctgtattcagctgctgaataaaacctggaaagagatgcgggctacagcggaggatttcaacaaggtcatgcaggtggtccgcgaacagatcacacgcgctctgccctcaaagccaaattctctggatcaattcaaatcgaagctgcggagtctaagctactccgaaattctccgcttacgtcaatcagaacggatgtcccaggatgatttccagtcgccccctattgtggagctgagagaaaaaatccaacctgaaatcctggaactgatcaagcagcagaggctgaatcgactatgcgagggatcctcttttaggaaaattggcaaccggaggcggcaagaaagattttggtattgtcgcctggcccttaaccataaggtgttacactacggagatctggatgataatccccagggcgaggtgacattcgagtccctgcaggagaaaatcccggttgccgacattaaggcgatcgtgacaggcaaagactgcccccacatgaaggagaaatctgcactgaaacagaacaaggaggttctggagctggcattcagcatactatatgatcctgacgaaactctcaattttatcgcccccaacaaatatgaatactgtatttggatcgacggcctctccgctttgctcggtaaagacatgagcagcgagttgaccaagagtgatctcgataccctcctgagtatggaaatgaagctgcggctcctagatctggagaacatacaaattcccgaggccccgccacccattccgaaagagccctcaagctacgacttcgtttaccactacggatag

SEQ ID NO: 276618 - DNA, 804 bp, Artificial Sequence
  derived and/or modified sequence
gaagagataacagtggggcagttaattagccacttacaggtcagcaaccaggagatccagacatatgccatcgcactaatcaacgcactgttcctgaaagcaccagaggacaagaggcaggacatggcaaacgccttcgcccagaagcatttacgaagcattatcttaaatcacgtgatccgcggtaatagacctatcaagacagaaatggcccaccagttgtacgtcctccaggtgctgacatttaatctcttggaggagaggatgatgactaaaatggatcccaacgatcaggcccagagagacataattttcgaactgcggagaattgcattcgatgcagagtcagatcccagcaacgctccaggatcaggaaccgagaaaaggaaggccatgtataccaaggattacaaaatgctagggtttactaatcacatcaacccagccatggatttcacccagactccccctggcatgctcgccctcgataacatgctatatctggcaaaggtccaccaggatacatacattagaatcgtgctggagaatagctctagagaggataagcacgagtgtccattcggcagatctgcgatcgagctgacaaaaatgctttgcgagatcttgcaggtcggggagttaccgaacgagggcaggaacgattaccaccccatgttcttcactcacgacagggcatttgaggaactgttcggtatttgtattcagttactgaacaaaacctggaaggaaatgcgggcaaccgccgaggattttaataaggtatcagtctctggactgctttag

SEQ ID NO: 276619 - DNA, 852 bp, Artificial Sequence
  derived and/or modified sequence
tatcacccgatgtttttcacacacgacagggcatttgaagaactgtttgggatatgtatccagctgctcaataagacctggaaggagatgcgggctaccgccgaggatttcaataaggtaatgcaggtagtgagagagcagatcacaagagccctcccgtccaaacccaatagtctggaccagttcaaaagcaagctgaggtcactgtcctatagtgagattctgcgcctgagacaaagtgagcgcatgtctcaagatgacttccagagcccaccaattgtagagctgagagaaaagattcagccggaaatcttggagttgatcaagcaacaacggctcaatagactgtgcgaaggatcaagttttcgcaagattgggaaccggagaagacaggaaagattctggtactgcagactggccttgaaccataaggtcctccactatggagaccttgacgacaaccctcagggggaagtcactttcgaatctttgcaggagaaaaatataaaagctattgtaaccggaaaggactgcccccacatgaaggagaaaagtgcactcaaacaaaataaagaggtgctcgagttagcgttctcaatcttgtatgatccagacgagaccctgaactttatagcaccaaataaatacgagtactgcatatggattgatggactgtccgccctgttgggaaaggatatgagctccgaactgaccaagtccgatcttgacacacttctatctatggagatgaaactgcgcttactcgacctcgagaatatacagatccctgaggctccgcctccgatccctaaagagccttcttcgtacgactttgtctaccactacggctag

SEQ ID NO: 276620 - DNA, 1359 bp, Artificial Sequence
  derived and/or modified sequence
atgcatgtgatcaggggaaataggccaatcaagacagagatggctcaccagctgtatgtgctacaggtactcacgttcaatctcttggaggaaagaatgatgacgaagatggaccctaatgaccaggcccaaagggacattattttcgaattgcgcagaattgcgtttgacgccgaatcagacccctctaatgcaccgggtagcggcacagagaagaggaaagcgatgtacacgaaggactacaaaatgctgggatttactaaccacattaaccccgctatggatttcacacaaacgcctccagggatgctggctttggacaacatgctctacctggctaaggtgcaccaggacacttacattcgcatcgtcctcgaaaactccagccgcgaggacaagcatgagtgccccttcggaagatccgctatcgaactcacgaagatgctgtgcgagatcctgcaggttggagaattaccgaacgagggaaggaatgactatcatccaatgttttttacgcatgacagagccttcgaggagctcttcggaatttgtatccagctcctaaataaaacatggaaggaaatgcgcgctacagcagaggacttcaataaggtaatgcaggttgttagggaacagatcacccgtgccctgccatctaagccgaactcattggaccagtttaagtccaagctccggagtctgtcttattctgagatcctcaggttacgacaatccgagcgaatgagccaggatgacttccaatccccacctattgtcgagctgcgggaaaagattcagccggaaatcctggagctgattaagcagcagagactgaatcgcctgtgtgaagggtcttcattccggaagattggcaatagaaggagacaggagcggttttggtattgcaggcttgcattgaaccataaggtcctgcactacggcgacctcgacgacaatccccaaggggaggtgacatttgagagcttacaggaaaaaataccagtagcagatattaaagcgatagttaccgggaaggactgcccccacatgaaggagaaatcagctctgaagcagaataaggaagtgctcgaactggcattctccatactgtatgatccggacgaaaccctcaattttatagccccaaacaaatacgagtactgcatctggatcgatggcctctctgctttactgggaaaggatatgagtagtgaactaaccaaatccgacctcgacactctattaagcatggaaatgaaactgagattgctggacctggagaacatccagatccctgaagcaccccctcctatccctaaagagccaagcagttatgatttcgtgtatcattatgggtag

SEQ ID NO: 276621 - DNA, 804 bp, Artificial Sequence
  derived and/or modified sequence
gaggagatcaccgtgggccagctgatcagccacctgcaggtgagcaaccaggagatccagacctacgccatcgccctgatcaacgccctgttcctgaaggcccccgaggacaagagacaggacatggccaacgccttcgcccagaagcacctgagaagcatcatcctgaaccacgtgatcagaggcaacagacccatcaagaccgagatggcccaccagctgtacgtgctgcaggtgctgaccttcaacctgctggaggagagaatgatgaccaagatggaccccaacgaccaggcccagagagacatcatcttcgagctgagaagaatcgccttcgacgccgagagcgaccccagcaacgcccccggcagcggcaccgagaagagaaaggccatgtacaccaaggactacaagatgctgggcttcaccaaccacatcaaccccgccatggacttcacccagaccccccccggcatgctggccctggacaacatgctgtacctggccaaggtgcaccaggacacctacatcagaatcgtgctggagaacagcagcagagaggacaagcacgagtgccccttcggcagaagcgccatcgagctgaccaagatgctgtgcgagatcctgcaggtgggcgagctgcccaacgagggcagaaacgactaccaccccatgttcttcacccacgacagagccttcgaggagctgttcggcatctgcatccagctgctgaacaagacctggaaggagatgagagccaccgccgaggacttcaacaaggtgagcgtgagcggcctgctgtag

SEQ ID NO: 276622 - DNA, 852 bp, Artificial Sequence
  derived and/or modified sequence
taccaccccatgttcttcacccacgacagagccttcgaggagctgttcggcatctgcatccagctgctgaacaagacctggaaggagatgagagccaccgccgaggacttcaacaaggtgatgcaggtggtgagagagcagatcaccagagccctgcccagcaagcccaacagcctggaccagttcaagagcaagctgagaagcctgagctacagcgagatcctgagactgagacagagcgagagaatgagccaggacgacttccagagcccccccatcgtggagctgagagagaagatccagcccgagatcctggagctgatcaagcagcagagactgaacagactgtgcgagggcagcagcttcagaaagatcggcaacagaagaagacaggagagattctggtactgcagactggccctgaaccacaaggtgctgcactacggcgacctggacgacaacccccagggcgaggtgaccttcgagagcctgcaggagaagaacatcaaggccatcgtgaccggcaaggactgcccccacatgaaggagaagagcgccctgaagcagaacaaggaggtgctggagctggccttcagcatcctgtacgaccccgacgagaccctgaacttcatcgcccccaacaagtacgagtactgcatctggatcgacggcctgagcgccctgctgggcaaggacatgagcagcgagctgaccaagagcgacctggacaccctgctgagcatggagatgaagctgagactgctggacctggagaacatccagatccccgaggcccccccccccatccccaaggagcccagcagctacgacttcgtgtaccactacggctag

SEQ ID NO: 276623 - DNA, 1359 bp, Artificial Sequence
  derived and/or modified sequence
atgcacgtgatcagaggcaacagacccatcaagaccgagatggcccaccagctgtacgtgctgcaggtgctgaccttcaacctgctggaggagagaatgatgaccaagatggaccccaacgaccaggcccagagagacatcatcttcgagctgagaagaatcgccttcgacgccgagagcgaccccagcaacgcccccggcagcggcaccgagaagagaaaggccatgtacaccaaggactacaagatgctgggcttcaccaaccacatcaaccccgccatggacttcacccagaccccccccggcatgctggccctggacaacatgctgtacctggccaaggtgcaccaggacacctacatcagaatcgtgctggagaacagcagcagagaggacaagcacgagtgccccttcggcagaagcgccatcgagctgaccaagatgctgtgcgagatcctgcaggtgggcgagctgcccaacgagggcagaaacgactaccaccccatgttcttcacccacgacagagccttcgaggagctgttcggcatctgcatccagctgctgaacaagacctggaaggagatgagagccaccgccgaggacttcaacaaggtgatgcaggtggtgagagagcagatcaccagagccctgcccagcaagcccaacagcctggaccagttcaagagcaagctgagaagcctgagctacagcgagatcctgagactgagacagagcgagagaatgagccaggacgacttccagagcccccccatcgtggagctgagagagaagatccagcccgagatcctggagctgatcaagcagcagagactgaacagactgtgcgagggcagcagcttcagaaagatcggcaacagaagaagacaggagagattctggtactgcagactggccctgaaccacaaggtgctgcactacggcgacctggacgacaacccccagggcgaggtgaccttcgagagcctgcaggagaagatccccgtggccgacatcaaggccatcgtgaccggcaaggactgcccccacatgaaggagaagagcgccctgaagcagaacaaggaggtgctggagctggccttcagcatcctgtacgaccccgacgagaccctgaacttcatcgcccccaacaagtacgagtactgcatctggatcgacggcctgagcgccctgctgggcaaggacatgagcagcgagctgaccaagagcgacctggacaccctgctgagcatggagatgaagctgagactgctggacctggagaacatccagatccccgaggcccccccccccatccccaaggagcccagcagctacgacttcgtgtaccactacggctag

SEQ ID NO: 276624 - DNA, 1344 bp, Artificial Sequence
  derived and/or modified sequence
gaggaaatcaccgtgggacagctcatctcacacctccaggtctccaaccaggagattcagacctacgccattgcactgattaatgcactttttctgaaggctcctgaggacaaacgacaggatatggcaaatgcatttgcacagaagcatctccggtctataatcctgaatcatgtgatccgagggaaccgccccatcaaaactgagatggcccatcagctatatgtccttcaagtcctaacctttaaccttctggaagaaaggatgatgaccaagatggaccccaatgaccaggctcaaagggacatcatatttgaactgaggaggattgcatttgacgcagagtctgatcctagcaatgcccctgggagtgggaccgaaaaacgcaaagccatgtacacaaaggactacaaaatgctgggatttaccaaccacatcaatccagccatggactttacccagactcctcctggaatgctggccttggacaacatgctgtacttggctaaagtccaccaggacacctacatccggattgtcttggagaacagtagccgggaagacaaacatgaatgcccctttggccgcagtgccattgagctcaccaaaatgctctgtgaaatcctgcaggttggggaactaccaaatgaaggacgcaatgactaccacccgatgttctttacccatgaccgagcctttgaagagctctttggaatctgcatccagctgttgaacaagacctggaaggagatgagggcaacagcagaggacttcaacaaggtcagtgtctccgggctgctctgaggcccacgggaggagaccatcacacgacagcctttgacagctggctggcacctggagaatccctgagctggaaaagcagcttggtctgcagaactgagtcacaagactgaggcactggggagcctcagccccatctggttgttgctccctctgtgaccttgagcttgtcttccacttggtgccgtaggccctcatttgtccattgaagttagcacctgtccctcccgtcctccagagaggtcaggaggataagcattagaagactcactgtggtttattgagtgcttactgtgcaggtactgctgtagttttgtgaactgggaaggttaggagagaagagtggactggcatgatgtgcacaccctgggtacttaatcgatagttatccctcggtgctttcagtcctcactctatgcagagcactgttgtgccaggccctcaaaagctgatcatctaggggtcgagtgttttgaagttgatcatctcatcataaaaaatttggaaagtataaagaataaaaagttacctgtatttacacca

SEQ ID NO: 276625 - DNA, 2158 bp, Artificial Sequence
  derived and/or modified sequence
taccacccgatgttctttacccatgaccgagcctttgaagagctctttggaatctgcatccagctgttgaacaagacctggaaggagatgagggcaacagcagaggacttcaacaaggttatgcaagtcgtccgagagcaaatcactcgagctttgccctccaaacccaactctttggatcagttcaagagcaaattgcgtagcctgagttactctgagattctacgactgcgccagtctgagaggatgagtcaggatgacttccagtccccgccaattgtggagctgagggagaagatccagcccgagatccttgagctgatcaagcagcagcgcctgaaccggctctgtgagggcagcagcttccgaaagattgggaaccgccgaaggcaagaacggttctggtactgccggttggcactgaaccacaaggtccttcactatggtgacttggatgacaacccacaaggggaggtgacatttgaatccctgcaggagaaaaacattaaggccattgtcactgggaaagattgtccccacatgaaagagaaaagtgctctgaaacagaacaaggaggtgttggaattggccttctccatcctgtatgaccctgatgagaccttaaacttcatcgcacctaataaatatgagtactgcatctggattgatggcctcagtgcccttctggggaaggacatgtccagtgagctgaccaagagtgacctggacaccctgctgagcatggagatgaagctgcggctcctggacctggagaacatccagattcccgaagccccaccccccatccccaaggagcccagcagctatgactttgtctatcactatggctgagcctggagccagaaacgacggtacccaggagaagggattttgggcccaggagaaacacttacattctggtgccttgtcttttgcttgtacagaatctgtagtgattttggtggccagtaaatgccagccatttctcaaacccacctcggaccacccagagtttcctcttggtccctgtctactaagagtcatgaaggcagggtgctctgcccactccatcaccatgaagcctgggattgggccacgaggaacaaacagcagatgcccttgccttccagtccaagaaactgcttcttgaaatggatttaacaacagccactcaccttttcctcctgagcctgctctctgatcagctggatccccacgtgagcaacagctggcccaggaaaggctgcctgcagaggacaggtgtgttgggcgtgttgagagccttgaagtgactacctgtatcttagatctgagtacaagcctgaggcttttgcttttgtcttttttgatgagggctcactccagcttcatatggtgccaagacgttgctgcttctgaggttggctctaacatctctggtctttagagccaccagatctctctggcccatacagatatcagagcagacggaaatttctccctgcaagcgctcagtctcatcccagcaagtcaaagacctcctggccaagtcctgccctcttaagtctccaggaacgctgcagggaaaacccagctgaggcctgggcctagactgtggtgaggtcactagattctactgctcttcccccacattaataccttttccttcctcagagagaaatctcccctaacctgaattgcagccccctccagtttgctttcctttggccttccagaccccaggaagttggccttcccttcctagtgctatggtttctgccattggccatgatttcagggagctggctgaggccggctgaggccacacctgtgccagtggggcttccctggtgctgcagcacttgtaaaccacacacacagcctctctccctggacatacgttagcacattggcattcagtattggtggcctggcatggtaggtactacccaatgaagagtgtactatatattttcattactataggccatacttatacagacgtgtatatatatttatataagatctacctatcttaggatggaaccttggggaaaaataaaattgaggggaagtaaaaagtatgtaacacttccagttgtgagccaagattgtaaccagagagcagccaggagcttcctgtcagtaaccatgttttcaataaatactctttcatgta

SEQ ID NO: 276626 - DNA, 1741 bp, Artificial Sequence
  derived and/or modified sequence
aagcacttaaaatgtggctggtgcaactaaggaaccaaattttcaacttaaatttgttttaactgatttaaatgcaaatagctgcatatggctagtggctgctatactggacagcacagccctagagacagagctactgagtagggaaattgaaggacatagtggtggtacatgtggaaaatggaggagagcctcatttgggcaagaaagaaccaagagggacaggattcataatgcatgtgatccgagggaaccgccccatcaaaactgagatggcccatcagctatatgtccttcaagtcctaacctttaaccttctggaagaaaggatgatgaccaagatggaccccaatgaccaggctcaaagggacatcatatttgaactgaggaggattgcatttgacgcagagtctgatcctagcaatgcccctgggagtgggaccgaaaaacgcaaagccatgtacacaaaggactacaaaatgctgggatttaccaaccacatcaatccagccatggactttacccagactcctcctggaatgctggccttggacaacatgctgtacttggctaaagtccaccaggacacctacatccggattgtcttggagaacagtagccgggaagacaaacatgaatgcccctttggccgcagtgccattgagctcaccaaaatgctctgtgaaatcctgcaggttggggaactaccaaatgaaggacgcaatgactaccacccgatgttctttacccatgaccgagcctttgaagagctctttggaatctgcatccagctgttgaacaagacctggaaggagatgagggcaacagcagaggacttcaacaaggttatgcaagtcgtccgagagcaaatcactcgagctttgccctccaaacccaactctttggatcagttcaagagcaaattgcgtagcctgagttactctgagattctacgactgcgccagtctgagaggatgagtcaggatgacttccagtccccgccaattgtggagctgagggagaagatccagcccgagatccttgagctgatcaagcagcagcgcctgaaccggctctgtgagggcagcagcttccgaaagattgggaaccgccgaaggcaagaacggttctggtactgccggttggcactgaaccacaaggtccttcactatggtgacttggatgacaacccacaaggggaggtgacatttgaatccctgcaggagaaaattcctgttgcagacattaaggccattgtcactgggaaagattgtccccacatgaaagagaaaagtgctctgaaacagaacaaggaggtgttggaattggccttctccatcctgtatgaccctgatgagaccttaaacttcatcgcacctaataaatatgagtactgcatctggattgatggcctcagtgcccttctggggaaggacatgtccagtgagctgaccaagagtgacctggacaccctgctgagcatggagatgaagctgcggctcctggacctggagaacatccagattcccgaagccccaccccccatccccaaggagcccagcagctatgactttgtctatcactatggctgagcctggagccagaaacgacggtacccaggagaagggattttgggcccaggagaaacacttacattctggtgccttgtcttttgcttgtacagaatctgtagtgattttggtggccagtaaatgccagccatttctcaaacccacctcgg

SEQ ID NO: 276627 - DNA, 3360 bp, Artificial Sequence
  derived and/or modified sequence
gccgccgaggagagaggctggagacccagaagatgcagaagccagagaggcacctggctgagaaagcccagaagcgaggtgcccagaccctacgcccccctgagcggcagcccccccatcagatggagaagaaccagatggagagccgccgccaccagacccctgggcctggccggccccagaagccccctgagagccgcctgggtgtgggcccccagcagagtgagaagacagcagagaagaagaggcagacccggcgccggcagaggcatcgacgacctggaggaggacagcgactacaaccccgccgaggacgagcccagaggcagacagctgagactgcagagacccacccccagcacccccagacccagaagaagacccggcagacccagaaagctgcccagactggagatcagcgacctgcccgacggcgtggagggcgagcccctggtgagcagccagagcggccagagcccccccgagccccaggaccccgaggcccccagcagcagcggccccggccacctggtggccatgggcaaggtgagcagaacccccgtggaggccggcgtgagccagagcgacgccgagaacgccgcccccagctgccccgacgagcacgacaccctgcccagaagaagaggcagacccagcagaagattcctgggcaagaagtacagaaagtactactacaagagccccaagcccctgctgagacccttcctgtgcagaatctgcggcagcagattcctgagccacgaggacctgagattccacgtgaacagccacgaggccggcgacccccagctgttcaagtgcctgcagtgcagctacagaagcagaagatggagcagcctgaaggagcacatgttcaaccacgtgggcagcaagccctacaagtgcgacgagtgcagctacaccagcgtgtacagaaaggacgtgatcagacacgccgccgtgcacagcagagacagaaagaagagacccgaccccacccccaagctgagcagcttcccctgccccgtgtgcggcagagtgtaccccatgcagaagagactgacccagcacatgaagacccacagcaccgagaagccccacatgtgcgacaagtgcggcaagagcttcaagaagagatacaccttcaagatgcacctgctgacccacatccaggccgtggccaacagaagattcaagtgcgagttctgcgagttcgtgtgcgaggacaagaaggccctgctgaaccaccagctgagccacgtgagcgacaagcccttcaagtgcagcttctgcccctacagaaccttcagagaggacttcctgctgagccacgtggccgtgaagcacaccggcgccaagcccttcgcctgcgagtactgccacttcagcaccagacacaagaagaacctgagactgcacgtgagatgcagacacgccagcagcttcgaggagtggggcagaagacaccccgaggagccccccagcagaagaagacccttcttcagcctgcagcagatcgaggagctgaagcagcagcacagcgccgcccccggccccccccccagcagccccggcccccccgagatcccccccgaggccaccaccttccagagcagcgaggcccccagcctgctgtgcagcgacaccctgggcggcgccaccatcatctaccagcagggcgccgaggagagcaccgccatggccacccagaccgccctggacctgctgctgaacatgagcgcccagagagagctgggcggcaccgccctgcaggtggccgtggtgaagagcgaggacgtggaggccggcctggccagccccggcggccagcccagccccgagggcgccaccccccaggtggtgaccctgcacgtggccgagcccggcggcggcgccgccgccgagagccagctgggcccccccgacctgccccagatcaccctggcccccggccccttcggcggcaccggctacagcgtgatcaccgccccccccatggaggagggcaccagcgcccccggcaccccctacagcgaggagcccgccggcgaggccgcccaggccgtggtggtgagcgacaccctgaaggaggccggcacccactacatcatggccaccgacggcacccagctgcaccacatcgagctgaccgccgacggcagcatcagcttccccagccccgacgccctggccagcggcgccaagtggcccctgctgcagtgcggcggcctgcccagagacggccccgagccccccagccccgccaagacccactgcgtgggcgacagccagagcagcgccagcagcccccccgccaccagcaaggccctgggcctggccgtgccccccagcccccccagcgccgccaccgccgccagcaagaagttcagctgcaagatctgcgccgaggccttccccggcagagccgagatggagagccacaagagagcccacgccggccccggcgccttcaagtgccccgactgccccttcagcgccagacagtggcccgaggtgagagcccacatggcccagcacagcagcctgagaccccaccagtgcagccagtgcagcttcgccagcaagaacaagaaggacctgagaagacacatgctgacccacaccaaggagaagcccttcgcctgccacctgtgcggccagagattcaacagaaacggccacctgaagttccacatccagagactgcacagccccgacggcagaaagagcggcacccccaccgccagagcccccacccagacccccacccagaccatcatcctgaacagcgacgacgagaccctggccaccctgcacaccgccctgcagagcagccacggcgtgctgggccccgagagactgcagcaggccctgagccaggagcacatcatcgtggcccaggagcagaccgtgaccaaccaggaggaggccgcctacatccaggagatcaccaccgccgacggccagaccgtgcagcacctggtgaccagcgacaaccaggtgcagtacatcatcagccaggacggcgtgcagcacctgctgccccaggagtacgtggtggtgcccgagggccaccacatccaggtgcaggagggccagatcacccacatccagtacgagcagggcgcccccttcctgcaggagagccagatccagtacgtgcccgtgagccccggccagcagctggtgacccaggcccagctggaggccgccgcccacagcgccgtgaccgccgtggccgacgccgccatggcccaggcccagggcctgttcggcaccgacgagaccgtgcccgagcacatccagcagctgcagcaccagggcatcgagtacgacgtgatcaccctggccgacgactag

SEQ ID NO: 276628 - DNA, 3360 bp, Artificial Sequence
  derived and/or modified sequence
gcagccgaagagcggggatggcgacctcgccggtgtcgcagccaacggggaacatggcttaggaagccacgatcagaggtacccagaccatatgctccattgtcaggttcgcctccgatcaggtggagacggacccgctggagagccgcagctacacggcccctgggtcttgccggtccaaggtcacccctgagggcagcatgggtttgggcgccgtcccgcgtccggagacaacagcgacgtcggggcagacctggcgccgggagaggcatcgacgacctcgaagaagattccgattacaatccagccgaagacgaacccagaggccgtcaactgagacttcagcggcctacaccttctactccaagaccacgaagaagaccaggccggcctagaaagctgcctcggctggagatctccgaccttcccgatggtgtcgaaggggaacccctggtgagctcccagtcaggtcagtctcctcctgaaccccaggatcctgaagcccctagcagctcaggtccgggccatctcgtggccatgggaaaggtgagccgcactcctgtggaagccggagtttcccaatcggacgccgagaacgcagccccttcctgtcccgacgagcacgataccctgcctcgccggaggggtcgaccgtccaggaggtttctggggaagaaatacaggaaatactactacaagtctccaaaacctctgttgcgccccttcctgtgtcggatctgcgggtctagattcttaagccacgaggatttgaggttccatgttaattcgcacgaagccggcgaccctcagctttttaaatgcctgcagtgctcttatcgaagtcggcgatggagtagcctgaaagaacacatgtttaatcacgtcggtagcaaaccttacaagtgtgacgaatgctcctacacctccgtgtatcggaaagacgtgattagacacgccgccgtacactcgcgtgaccgtaagaagagaccagatcctacacctaagctgagcagctttccttgtcccgtctgcggacgcgtctacccgatgcagaaaaggctaacccagcacatgaaaactcattcaaccgaaaagccccatatgtgcgataaatgtggcaagagtttcaagaagcggtacacattcaagatgcatctcctgacccacatacaggcagtcgctaataggcggttcaaatgcgagttttgcgaatttgtttgtgaagacaaaaaggcgctcctcaaccaccagcttagtcatgtgtccgacaaaccttttaaatgtagcttctgcccctaccgcacctttagggaggacttcctcctcagccacgtcgcagtcaaacatacaggagcaaaaccgttcgcctgtgagtattgccacttttccacgcggcacaagaagaatctccgcctgcacgttcgatgtcgacacgcaagttcatttgaagagtggggtagaaggcatccagaagagcccccctcccgccgacgaccctttttcagtctgcagcagatcgaggagctgaaacaacaacactcagcagcccctggacctccaccctcttctcccggtccacctgagatcccacccgaggctaccacctttcagtcttcagaagcgccatccctgctctgttccgataccctcggtggagccaccatcatataccagcaaggggccgaggaaagtacagccatggcaacacagactgctctggatctcttgctgaacatgtccgctcagcgggaactagggggcacggccctgcaagtcgccgtggtcaaatcagaagatgtggaggctgggcttgcctcaccgggcggccagcccagcccagagggcgccaccccccaggtggtgacactgcatgtagccgaaccaggcggaggcgcggccgccgagtctcagctcggcccaccagacctgccacaaatcactttggccccaggacctttcggcgggaccggctacagcgtgatcaccgccccccccatggaggaaggcacctcagcccctggtacaccatacagtgaagagcccgccggggaggctgcacaggcagttgtggtttccgacacactgaaggaggctggaacccactatatcatggccaccgatgggacacaactgcaccatatcgagctcacagccgacgggagtatttcttttcccagccccgacgctttagcgtcaggcgccaagtggccgctgcttcagtgtggaggcctccctcgtgatgggccagagcctccttcccctgctaagacccattgcgtgggagacagccagtcatcagcttcatcaccaccggccacctctaaggcactgggcttagcggtacctccaagccctccttctgcagccaccgcggcttccaagaagttttcctgtaaaatctgcgccgaggcctttcctggcagagccgagatggaatcacacaaaagggcccacgcgggacctggagcattcaagtgtccagattgcccgttttcagcccgacagtggccagaggtccgggcacacatggcccagcattcaagcctgaggccccaccaatgctcacaatgtagtttcgcctctaagaacaaaaaagatcttcggagacacatgctcactcacactaaggaaaagccattcgcctgccatctgtgtgggcaacgcttcaatcgcaacgggcatctcaagtttcacattcaaagacttcattcacccgatgggaggaaatctggaaccccgaccgccagggcccccacacagacacccacccagactattatccttaattccgacgacgagacacttgctactctgcacaccgccttacagtcgtcacacggggtcctgggaccggaacgactgcagcaggctttgagccaggagcacataatagttgctcaggaacagactgtgacgaaccaggaggaagctgcctacattcaggagatcacaacggctgatgggcagaccgttcagcacctcgttacgagcgacaatcaagtccaatacatcatttcgcaggatggggtccaacatttgctgccccaggagtatgttgtcgtcccagagggacatcatatccaggtccaggaggggcaaataacccacatccagtacgagcagggcgcaccgttccttcaggagagccagatacagtacgttcccgtgtctcccggccagcagctagtgacccaggctcaattagaggccgctgctcacagcgcagtcacggccgtagctgacgcagcgatggcccaggctcagggtctcttcgggaccgatgagaccgttccagaacatatccaacagctccagcatcaaggaattgaatatgatgtaataacccttgccgatgactag

SEQ ID NO: 276629 - DNA, 3360 bp, Artificial Sequence
  derived and/or modified sequence
gctgctgaggagcggggctggaggccccggcgctgccgcagccagaggggcacctggctgaggaagcccaggtctgaggtgccccggccctatgcccccctgagcggcagcccccccatccgctggaggaggacccgctggagggctgctgccacccggcccctgggcctggccggccccaggagccccctgcgggccgcctgggtgtgggcccccagccgggtgcggcggcagcagaggagaagaggccggcctggagctggccggggcattgatgacctggaggaggacagcgactacaacccagcagaagatgagccccggggccggcagctgcggctgcagaggcccacccccagcaccccccggccccggcggcggcccggccggcccaggaagctgccccggctggagatcagtgacctgcctgatggagtggagggggagcccctggtgagcagccagagcggccagagccccccagagccccaggaccctgaggcccccagcagcagcggccctggccacctggtggccatgggcaaggtgtccaggacccctgtggaggccggcgtgtcccagagtgatgctgaaaatgctgcccccagctgcccagatgaacatgacaccctgccccggcggcggggccggcccagccgccgcttcctgggcaagaagtacaggaagtactactacaagagccccaagcccctgctgcggcccttcctgtgccgcatctgtggcagccgcttcctgagccatgaggacctgcgcttccacgtgaacagccatgaggccggggacccccagctgttcaagtgcctgcagtgcagctaccgcagccgccgctggagcagcctgaaggagcacatgttcaaccacgtgggcagcaagccctacaagtgtgatgagtgcagctacacctctgtgtacaggaaggatgtgatcagacatgctgctgtgcacagccgggacaggaagaagaggccagaccccacccccaagctgagcagcttcccctgccctgtgtgtggccgggtgtaccccatgcagaagaggctgacccagcacatgaagacccacagcacagagaagccccacatgtgtgacaagtgtgggaagagcttcaagaagcgctacaccttcaagatgcacctgctgacccacatccaggccgtggccaacagacgcttcaagtgtgagttctgtgaatttgtgtgtgaggacaagaaggccctgctgaaccaccagctgagccacgtgtctgacaagcccttcaagtgcagcttctgcccctaccgcaccttccgggaggacttcctgctgagccacgtggccgtgaagcacactggagccaagccctttgcctgtgagtactgccacttcagcaccaggcacaagaagaacctgcggctgcacgtgcgctgcagacatgccagcagctttgaggagtggggcagaagacaccctgaggagccccccagcagaagaagacccttcttcagcctgcagcagatcgaggagctgaagcagcagcacagcgctgcccctggccccccacccagcagccctggccccccagagatccccccagaggccaccaccttccagagcagcgaggcccccagcctgctgtgcagcgacaccctgggcggggccaccatcatctaccagcagggcgctgaggagagcacagccatggccacccagacagccctggacctgctgctgaacatgtctgcccagcgggagctgggcggcacagccctgcaggtggccgtggtgaagtcagaagatgtggaggccggcctggccagccctgggggccagcccagccctgagggcgccaccccccaggtggtgaccctgcacgtggccgagcccggcggcggcgctgctgctgagagccagctgggccccccagacctgccccagatcaccctggcccctggcccctttggaggcaccggctacagcgtcatcacagccccacccatggaggagggcaccagcgcccctggcaccccctacagcgaggagcctgctggggaggccgcccaggccgtggtggtgtctgacaccctgaaggaggccggcacccactacatcatggccacagatggcacccagctgcaccacatcgagctgacagcagatggcagcatctccttccccagcccagatgccctggccagcggggccaagtggcccctgctgcagtgtggcggcctgcccagagatggccctgagccccccagccctgccaagacccactgtgtgggggacagccagagcagcgccagcagccccccagccaccagcaaggccctgggcctggccgtgccccccagccccccatctgctgccacagctgccagcaagaagttcagctgcaagatctgtgccgaggccttccctggccgggcagagatggagagccacaagagggcccatgctggccctggggccttcaagtgcccagactgccccttcagcgcccggcagtggccagaggtgcgggcccacatggcccagcacagcagcctgcggccccaccagtgcagccagtgcagctttgccagcaagaacaagaaggacctgcggcggcacatgctgacccacaccaaggagaagccctttgcctgccacctgtgtggccagcgcttcaacagaaatggccacctgaagttccacatccagaggctgcacagcccagatggcaggaagagcggcacccccacagcccgggcccccacccagacccccacccagaccatcatcctgaacagtgatgatgagaccctggccaccctgcacacagccctgcagagcagccacggcgtgctgggccctgagcggctgcagcaggccctgagccaggagcacatcatcgtggcccaggagcagacagtgaccaaccaggaggaggccgcctacatccaggagatcaccacagcagatggccagacagtgcagcacctggtgaccagtgacaaccaggtgcagtacatcatcagccaggatggagtgcagcacctgctgccccaggagtatgtggtggtgcctgagggccaccacatccaggtgcaggagggccagatcacccacatccagtatgagcagggcgcccccttcctgcaggagagccagatccagtatgtgcctgtgtccccaggccagcagctggtgacccaggcccagctggaggccgccgcccacagcgctgtgacagctgtggctgatgctgccatggcccaggcccagggcctgtttggaacagatgagaccgtgcctgagcacatccagcagctgcagcaccagggcattgaatatgatgtgatcaccctggctgatgactag

SEQ ID NO: 276630 - DNA, 3360 bp, Artificial Sequence
  derived and/or modified sequence
gccgccgaggagcggggctggcggccccggcggtgccggagccagagagggacatggttacgtaagcctcggtctgaagtaccaaggccctacgcccccctctccggaagccccccaattcggtggagaaggactcggtggagggccgctgccactaggcccttggggctcgccggcccacgctcgccgctgagagcagcatgggtatgggcccctagccgggtccgccggcagcagagaaggcgggggcggcccggcgcgggcagaggcatcgacgatttggaggaagatagtgactataaccccgcagaagacgaaccaagggggcgccaactgaggttacagcgccccacaccaagcaccccgcgtccgaggaggagacctggcaggccgcgcaaactgccccgcctcgagatcagtgatcttcccgacggggtggagggggaacccctggtttccagccagtctggccagtcacccccagaacctcaggaccccgaagctccatcaagtagtggtcctgggcacctcgtggccatggggaaagtgtcccggacccctgtcgaagctggtgttagccagagcgacgcagagaacgcagctcctagttgccccgacgaacacgacacactgcctaggcggcggggaaggccatcccgcaggtttctcggcaagaaatatcgtaaatactattacaagtcacctaagcctctgttaagaccatttctttgtcgtatttgtgggtcccggttcctctctcatgaggatcttcggttccatgtcaatagccacgaggctggagacccacaactctttaagtgtctccaatgttcctatcgcagtcggagatggagctccctcaaggaacatatgtttaaccatgtggggtctaagccctacaagtgcgacgaatgctcctataccagcgtctatcgcaaggacgtgatccgtcacgcggcagtccattctagagacaggaagaagaggccagaccccactccaaaactttcgtccttcccgtgccctgtatgcggtagggtatatcccatgcagaagcgcctgacgcagcatatgaagacacattccacagagaagccacacatgtgcgataagtgtggcaagagtttcaagaaacggtatacatttaaaatgcacctgctaactcacatacaagcagttgccaaccgtaggtttaagtgtgagttctgcgagttcgtctgcgaagacaaaaaagccttgttgaatcaccagttaagccacgtctctgacaaaccattcaaatgttcgttctgtccctataggacgttcagagaagatttcttgctgagccacgtggccgttaagcacaccggcgccaagcctttcgcctgcgagtactgtcacttttctacccgccacaaaaagaacctacggttgcatgtgagatgtcgtcacgcttcctcttttgaagagtggggcagaagacatcccgaggagcctccgtcacgccggcgtcctttcttttctcttcagcaaatcgaagaactcaaacagcagcacagcgccgcccctgggcccccacccagctcaccgggcccacccgagatcccccctgaggcaacaactttccagtcctctgaggcaccatcgcttctgtgttcagataccctaggaggagcaactatcatctatcagcaaggggcagaagaatcaactgccatggccactcagaccgccctggatctcctccttaacatgtctgcccagcgtgagctcggcggtacagctctgcaggtggccgtcgttaaaagcgaggacgtggaagcagggttagcttcacccgggggacagccaagtcctgaaggtgccaccccacaggtggtgacactccacgtcgcagaacccggaggtggagccgccgctgagagccaacttggaccccccgacctgccacaaattaccctggcgcctggacccttcggtggcacagggtatagcgtgatcaccgcgccaccaatggaggagggcacatcagcaccgggcactccctacagcgaggagcctgcgggagaggccgcccaggccgttgtggtctccgacacactgaaagaggcaggcacccattatataatggccacagacggaacccagcttcaccacatcgaacttaccgccgacgggtctatctcatttccttctcccgatgctctcgcctccggcgctaaatggcccctgttacaatgcggaggtctcccgcgagacggtcccgagcctccttcccctgctaagacacactgcgtaggcgatagccagtcctctgcatcttcgcctccggcgacaagcaaagctctgggcttggctgttccacctagcccacccagcgccgctacggccgcctcgaagaagttcagttgtaaaatctgtgccgaggccttccccgggcgagcagagatggagagtcataaaagagctcatgcaggccccggtgcctttaaatgccctgactgtcctttttccgctaggcagtggcccgaagtacgggcgcacatggctcagcactccagtctgaggcctcaccaatgttcacagtgctcctttgcctcgaagaataaaaaggacctgagaaggcacatgctgacccacacaaaggaaaagccgtttgcttgtcatctgtgcggccaaaggttcaatcggaatggccacctcaaattccatatccagaggctgcacagccctgatggccgaaagtcaggcactcccaccgcccgggctcctacgcagacacccacgcagacgataattctgaacagcgatgacgagaccctggcaaccttgcacactgccttacagtcctctcacggtgtactcggccctgaaagattacagcaggccctgtcacaggaacacattatcgtagcccaggaacagacagtgacaaaccaggaagaggcggcttatatacaggaaatcacgaccgccgacggacagaccgtccagcatctagtgacgtcagacaaccaggtgcagtacattattagtcaggacggggtccagcatctgctgccccaagaatatgtggtcgtccccgagggacaccatattcaagtccaggaggggcagatcacccacatccagtatgagcagggagcacccttcctacaggaatctcagattcagtacgtaccagtgagtccgggccagcagttagtcacacaggctcagctggaggctgccgctcactcagcagtcaccgccgtggcagatgccgccatggcccaggcccagggactattcggtacagacgagactgttcccgagcacattcaacagttacagcaccagggaatcgaatacgacgttatcacactggcagacgactag

SEQ ID NO: 276631 - DNA, 3360 bp, Artificial Sequence
  derived and/or modified sequence
gctgctgaggaacgcggatggcgacccaggcgctgtcggtcacagagaggtacatggctgagaaaacctcggagtgaagtaccgcgtccatacgcccctctgtccggaagtcccccaatcagatggcgcagaaccaggtggcgggctgcagcaactagaccattaggactggctggaccgaggagccccctgcgggctgcatgggtctgggcaccaagtagagtccggagacagcagcgccgaagaggccgacccggtgcagggagaggtatcgacgatctggaggaggattcagattataatcccgctgaggacgaaccgagaggtaggcagttacggctccaaaggccaacaccttctaccccacggccacgcaggaggccaggaaggccgagaaagctgcccagactagagatcagcgatctgcccgacggagtcgagggagagcccttggttagcagccagtcaggccagagcccccctgagccccaggacccagaggcaccatcgtcaagcggtcctggccacctggtggctatgggcaaggtttcccgcactccagtggaggccggagtgtcccagtccgacgccgagaacgccgcaccttcatgtccggacgagcatgacaccctgccaagacgaagaggcaggccaagccggagattcctgggtaaaaaataccggaagtattactacaagtctcctaagcccctgctacggccttttctctgcaggatctgtggttccagatttctatctcacgaagacttgagattccatgtgaactcacacgaggctggtgatccacaactgtttaagtgcctgcaatgctcctatcgctctcggagatggtctagcttaaaagagcatatgtttaaccatgtcggctctaagccatataagtgtgacgagtgttcctacaccagcgtgtatcgcaaggatgtcatccgacacgccgctgtgcattccagggaccggaagaagaggcccgatcccacacctaagttgtctagtttcccatgcccagtctgcggcagggtttatcctatgcaaaagcggttgacacagcatatgaagacccatagtacagagaaaccccacatgtgtgataagtgcggaaaatcattcaaaaaacgctatacattcaagatgcatctcctaacacatatccaggctgtggccaatcgtcgcttcaagtgcgaattctgtgagttcgtgtgtgaggacaagaaagcgctgctaaatcaccagctcagccacgttagcgataaacctttcaagtgttcattctgtccctacagaacttttcgcgaagatttccttctcagccatgtggcagtgaagcataccggcgcaaaacccttcgcgtgtgaatactgtcacttttcaactcgccataagaagaacctgaggctgcacgtgaggtgtagacacgcctcctcgtttgaagaatggggccgtcgacacccagaagagcccccatcaagacgtcgcccatttttcagtcttcagcagattgaagagctgaaacagcagcatagtgcagctcccggacctccacctagctctccaggtcctcctgaaatccctcctgaggcgaccacctttcagtcttcggaagctccgagcctcctctgctcggataccctcggaggtgccacgataatctaccagcagggggctgaagaatctacagccatggccactcagaccgctttggacttgctcctgaacatgtccgctcagcgcgagcttgggggtacggcgctgcaggttgccgtggtgaaaagcgaggatgttgaagccggtttagcttctccagggggtcaaccctctcccgaaggagccacccctcaagtggtcacactccatgtcgcagagccaggcggtggcgcagccgcagaatcccagctcggtccccctgacctgccccagatcaccctggctcccggaccatttggaggcaccggatactcggtgataacagccccaccgatggaggagggtacctcagccccagggacaccatactctgaggaacccgctggcgaagcggctcaggctgtcgtggtctccgacaccctgaaggaggcaggaacacactatattatggccaccgacggcacccagctccatcatatcgagttgactgccgatggcagcatcagtttccctagccctgatgcgctagccagcggagcaaagtggcccttactgcaatgcggagggctcccacgcgatggcccagaaccaccctctcccgctaagacccactgtgtaggagatagccagagcagcgccagctcacctccagccactagcaaggctctcgggttggcagtgccacctagccccccttcggctgccaccgctgcatcgaagaaattttcctgtaagatctgcgccgaggcctttccaggcagggccgagatggaatcacacaaacgagcacacgccggtcccggagcctttaaatgtccagattgcccattctccgccagacaatggccagaagtaagagctcatatggcccagcacagttctctgcgccctcatcagtgcagccagtgttcctttgccagtaaaaacaaaaaagacctgagacgccacatgctaactcataccaaggagaagccatttgcctgccacctgtgtgggcaaagatttaaccgcaacggacaccttaagtttcatattcaaaggttgcactcccccgatggccgtaagtcgggtacgcccacggctcgagcgcctactcaaactcccacccagaccatcatcctcaatagcgacgatgaaacgctggctaccttgcatacggctctgcaaagttcacatggtgtgttaggcccagagcgacttcagcaggctctatcccaagagcacatcattgtcgcccaggaacaaactgtgacgaatcaagaggaggcagcctatatccaggaaatcacaactgccgacggacagaccgtgcagcacttggtcacatccgataatcaagtgcagtacattatttcacaagacggggtgcagcacctcttaccccaggagtacgttgtagtgcccgaaggacatcacattcaggttcaggagggccagatcacccacattcaatacgagcagggggcacctttcctgcaggagagccaaatccaatacgtgcccgtctccccagggcaacagctagtgacacaggcccaactggaagccgcagcacattcagccgtcactgcggtggcagatgccgctatggctcaggcccaaggtctattcggcacagatgaaaccgttcccgagcacatccagcagctgcagcatcaaggtatcgaatacgacgtcatcaccttggcagatgactag

SEQ ID NO: 276632 - DNA, 3660 bp, Artificial Sequence
  derived and/or modified sequence
cgcagcggaggaaagaggatggcgacctcgtcgatgccggagtcagagaggaacgtggctacgaaagcctcggagtgaagttcccagaccctacgccccgctgtcaggcagcccgccgatcagatggaggagaacgaggtggagagcagcagcgacgcggcccctgggcctggccggcccgaggagccctctgagagcggcctgggtgtgggcacctagccgtgtccgccgacagcagcgacgccgcggccgccccggggcaggcagaggcattgatgacctggaggaggatagcgactataatccagctgaggatgagccccgaggccggcagcttcggctccagcgccccacccccagtaccccaaggccccgaaggagacctggccggccccggaagctgccccgcctggagatctcagacctcccagatggtgtggaaggagagcctctagtgagttcccagagtggacagagccctccagagccacaggatcccgaggctcccagctcctcaggcccaggacacctggtggccatgggcaaggtgagcaggacccctgtggaagctggtgtgagccagtcagatgcagagaacgcagccccctcctgcccggatgagcatgacactctgccccggcgccgaggtcgaccttccaggcgcttcctaggcaagaaataccgcaagtactattacaagtcgcccaaaccacttttgaggcccttcctgtgccgcatctgtggttctcgctttctgtcccacgaggacctgcgcttccacgtcaactcccatgaggctggcgatccccagctcttcaagtgcctgcagtgcagctatcgttcccgccgctggtcctcgctcaaggagcacatgttcaaccacgtgggcagcaagccctacaagtgtgacgagtgcagctacaccagtgtctaccggaaggacgtcattcggcacgccgctgtgcacagccgggaccggaagaagaggccagatccgactccaaagctgagctctttcccctgccctgtgtgtggccgtgtgtaccccatgcagaaaagactcacgcagcacatgaagacgcacagcactgagaagccccacatgtgtgacaagtgtggaaagtcctttaagaagcgctacaccttcaaaatgcacctgctcacgcacatccaggctgttgccaaccgcaggttcaagtgtgagttctgtgagtttgtttgtgaagacaagaaggcactgctgaaccaccagttgtcccacgtcagtgacaagcccttcaaatgcagcttttgtccctaccgcaccttccgagaggacttcttgctgtcccatgtggctgtcaagcacacaggggccaagcccttcgcctgtgagtactgccacttcagcacacggcacaagaagaacctgcgcctgcacgtacggtgccgacacgcaagcagcttcgaggaatgggggaggcgccaccctgaggagcccccctcccgccgtcgccccttcttctctctgcagcagattgaggagctgaagcagcagcacagtgcggcccctggaccacctcccagttccccaggacctcctgagatacccccagaggcgacaactttccagtcatctgaggctccctcattgctctgttctgacaccctgggcggcgccaccatcatctaccagcaaggagctgaggagtcgacagcgatggccacgcagacagccttggatcttctgctgaacatgagtgctcagcgggaactggggggcacagccctgcaggtggctgtggtgaagtcggaagatgtggaagcagggttagcatcccctggtgggcagccctcccctgaaggtgccactccacaggtggtcaccctccacgtggcagagccagggggcggtgcagcagccgagagccagctaggccctcctgacctaccgcagatcaccctggcacctggtccatttggtgggactggctacagtgtcatcacagcaccccctatggaggagggaacatcagctcctggcacaccttacagcgaggagcccgcaggagaggcagcccaggctgtggttgtgagtgacaccctaaaagaagctggcacccactacatcatggctactgatggtacccagttgcaccacattgagctcaccgcagatggctccatctccttcccaagtccagatgctctggcctctggtgccaaatggcccctgctgcagtgtgggggactgcccagagacggccctgagcccccatctccagccaagacccactgcgtaggggactcccagagctctgcctcctcacctcctgcaaccagcaaagccctgggcctggcagtgcccccgtcaccgccatctgcagccactgctgcatcaaagaagttttcctgcaagatctgtgccgaggccttccctggccgagctgagatggagagtcacaagcgggcccacgctgggcctggtgccttcaagtgccccgactgccccttcagtgcccgccagtggcccgaggtccgggcgcacatggcacagcactcaagcctacggccccaccagtgtagccagtgcagctttgcctccaagaacaagaaggacctgcgtcggcacatgctgactcacacaaaggagaagccttttgcatgccacctctgcgggcagcgtttcaaccgtaacgggcacctcaagttccacatccagcggctgcacagtcctgatgggaggaagtcaggaacccctacagcccgggcccctacccagaccccaacccagaccatcatcctgaacagtgatgacgaaacactggccaccctgcacactgcactccagtccagtcacggggtcctgggcccagagcggctacagcaggcactgagccaggaacacatcatcgttgcccaggaacagacagtgaccaatcaggaggaagccgcctacatccaagagatcaccacggcagatggccagaccgtacagcacctggtgacctccgacaaccaggtgcagtatatcatctcccaggatggtgtccagcacctgctcccccaggaatatgttgtggtccctgaaggccatcacatccaggtacaggagggccagatcacacacatccagtatgaacaaggagccccgttccttcaggagtcccagatccagtatgtgcctgtgtccccaggccagcagcttgtcacacaggctcaacttgaggctgcagcacactcagctgtcacagcagtggctgatgctgccatggcccaagcccagggcctgtttggtacagacgagacagtgcccgaacacattcaacagctgcagcaccagggcatcgagtacgacgtcatcaccctggccgatgactgagccccgagggcccaacacagatcatggatttgcggccagctctcctgggggtagggggccaccaggactcacctccctcttcatttaggatctccagatactggatagccagcatcctctcattcccagggagccagacctgtgctgttggggttaggggcagccatgggccccagccaggacatgctgggtgccccagcctgcaggcaggctttgggagagaaatttatttttgtttgggtggacccactggcctgtcagtctcaataaagggaccggagtccagtcctgaacagctt

SEQ ID NO: 276633 - protein, 289 aa, Artificial Sequence
  derived and/or modified sequence
MACAGLLTVCLLRPPAPQPQPQTPRHPQLAPDPGPAGHTLFQDVFRRADKNDDGKLSFEEFQNYFADGVLSLGELQELFSGIDGHLTDNLETEKLCDYFSEHLGVYRPVLAALESLNRAVLAAMDATKLEYERASKVDQFVTRFLLRETVSQLQALQSSLEGASDTLEAQAHGWRSDAESVEAQSRLCGSRRAGRRALRSVSRSSTWSPGSSDTGRSSEAEMQWRLQVNRLQELIDQLECKHILMAQRQVQVAEEGLQDFHRALRCYVDFTGAQSHCLHVSAQKMLDGA

SEQ ID NO: 276634 - DNA, 870 bp, Artificial Sequence
  derived and/or modified sequence
atggcttgtgctggtttgttgaccgtctgtctattgagaccacctgccccacagccacagccccagacacccagacacccacagctggctcccgatcccggccccgcaggacacaccctgttccaggacgtgttccgcagagcagataagaatgacgatggcaagcttagctttgaagaatttcagaactattttgctgacggagttcttagcttaggtgaactccaagagttatttagcggcatcgatgggcacctgactgataacttggagactgagaagctctgcgattacttctcggaacatttgggagtctatagacccgttctggcagctttagagtccctgaatagagctgtcttggctgccatggatgccacaaaactcgaatacgagagggctagtaaggtagaccagttcgtcacacgcttcctgttgcgagagacagtgagccagctgcaggctctgcagtctagtttggagggagcttcggatacactggaagcacaggcacacgggtggagatcagatgcggaatcagtagaggcacaatccagattatgcggcagccgcagagccggacgccgggctttgcggtctgtgtctaggtcttccacctggagtcctggctcatcggacacagggaggtcaagcgaggctgagatgcagtggcggctacaggtgaaccggctacaagaacttatagatcagctcgaatgcaagcatattctgatggcacagcggcaggttcaggtggccgaggagggcctgcaggactttcatagggcccttagatgttatgtggactttactggtgcccagtcccattgtctgcatgtcagcgcgcagaaaatgctggacggcgcgtag

SEQ ID NO: 276635 - DNA, 870 bp, Artificial Sequence
  derived and/or modified sequence
atggcctgtgccggcctgctgactgtgtgcctgctgcggcccccagccccccagccccagccccagacccccaggcacccccagctggccccagaccccggccctgctggccacaccctcttccaggatgtgttccggcgggctgacaagaatgatgatggcaagctgagctttgaggagttccagaactactttgctgatggagtgctgagcctgggggagctgcaggagctgttcagcggcattgatggccacctgacagacaacctggagacagagaagctgtgtgactacttcagcgagcacctgggcgtgtacagacctgtgctggccgccctggagagcctgaacagagctgtgctggccgccatggatgccaccaagctggagtatgagcgggccagcaaggtggaccagtttgtgacccgcttcctgctgcgggagaccgtgtcccagctgcaggccctgcagagcagcctggagggcgccagtgacaccctggaggcccaggcccacggctggaggagtgatgctgagagcgtggaggcccagagccggctgtgtggcagcagaagagctggaagaagagccctgcggtctgtgagccgcagcagcacctggagccctggcagcagtgacaccggccgcagcagcgaggccgagatgcagtggaggctgcaggtgaaccggctgcaggagctgattgaccagctggagtgcaagcacatcctgatggcccagaggcaggtgcaggtggccgaggagggcctgcaggacttccaccgggccctgcgctgctacgtggacttcaccggggcccagagccactgcctgcacgtgtctgcccagaagatgctggatggagcctag

SEQ ID NO: 276636 - DNA, 870 bp, Artificial Sequence
  derived and/or modified sequence
atggcctgcgccggcctgctgaccgtgtgcctgctgcggccccccgccccacaaccccagccccaaacccccagacaccctcagctcgcccccgatcctggccccgccggtcataccctatttcaagacgtcttccgtagggcagataagaacgacgacggcaaactttctttcgaagagttccagaattactttgctgatggggttctgtcgctaggcgaactgcaggagttgttttctggcatcgatggacacctgacggacaatcttgaaaccgagaaactgtgtgattacttcagcgagcaccttggggtctaccggcccgtccttgctgctcttgagagccttaacagagcagtgctcgccgcgatggatgctactaagctggaatacgaaagagccagtaaagtagaccagttcgtgacccgcttcctactcagagaaaccgttagtcagctccaggccttgcagtctagccttgagggcgcttcagataccctggaggctcaagcccacggctggcggagcgacgcagagagcgtggaggctcaaagccgtttgtgcgggagtcggcgagcaggtagaagggccctgcgaagcgtatctagatcttccacttggagcccaggaagcagcgataccgggagaagtagtgaagctgaaatgcagtggcgtctgcaggttaaccgtcttcaagaactgatagaccaactggaatgcaagcatattctaatggctcagcggcaggtccaggtggccgaggagggtctgcaagactttcatagggctctgcggtgttatgtcgactttaccggggcgcaaagtcattgcctgcacgtgtccgcccagaaaatgcttgatggggcctag

SEQ ID NO: 276637 - DNA, 925 bp, Artificial Sequence
  derived and/or modified sequence
gccgcggcgtccagggtcggcagcaaccgcagccgagcccgagcgggtggcggcgccatggcgtgcgcggggctgctcaccgtgtgcctgctccggccgcccgcgccccagccccagccccagaccccgcggcacccccagctcgcgcccgacccggggcccgccggacacacgctcttccaggacgttttccgcagagcagacaagaatgatgatgggaagctctcatttgaggaattccagaattactttgccgatggggttctcagcctgggggagctgcaggaactgttcagcggcattgatgggcatctcaccgacaatttagaaacagaaaaactgtgtgactacttctcagagcacctgggtgtctaccggccggtgctggctgcattggaatcgctgaaccgtgcagtgctcgctgccatggatgccaccaagctggagtacgagagggcctccaaagtggaccagtttgtgacgcgcttcctgctgcgggagacggtgagccagctgcaagcccttcagagctcgctggagggggcgtcagataccctggaggcccaggcccatggctggcggtcagatgcagagagcgtggaggcgcagagcaggctctgcggcagccggcgggcaggacgccgagccctgaggagtgtcagccggtcatccacctggtcccccggctcttctgacacagggcgcagctcagaggccgagatgcagtggcggctccaggtgaaccgcctccaggagctcatcgaccagctcgagtgcaagcacatcctcatggcccagaggcaggtccaggtggcagaggaaggcctgcaggacttccaccgagccctgcgctgctatgtggacttcacaggggcccagagccattgtctgcatgtgtccgcccagaagatgctggacggtgcct

SEQ ID NO: 276638 - DNA, 870 bp, Artificial Sequence
  derived and/or modified sequence
atggcctgtgccggactgcttactgtatgcttgttacgcccacccgctccacagccacaaccacagacccctcggcaccctcagctggcccctgaccccggtccagctggacatacactcttccaagacgtgttccgcagggccgataagaatgacgacggaaagctatcatttgaagaatttcagaactacttcgctgatggcgttttgagcctgggcgaactccaagaattgttttcagggatcgacggccatttgaccgacaacctggaaactgagaagctctgtgactatttctcagaacacctcggagtttataggcccgtacttgccgcactggagtctctcaatagagcagtgctggcggctatggatgctacgaagctcgaatatgaaagggccagcaaagtggaccagtttgtaactagatttctgttgcgcgaaactgtcagtcaactgcaggctctacagtccagccttgaaggcgcaagtgataccctcgaagctcaggcccatggttggcggagcgacgcagaaagtgtggaggctcagtcgaggctctgcggctcccgacgggcaggcagaagagctctgcgaagcgtgtcaagaagctcaacgtggtcccccggatctagcgatacaggacggtcctctgaagccgaaatgcagtggcggctgcaggtgaacagattgcaggagttgatcgaccagctggagtgtaagcatatcctcatggctcagagacaggtgcaggttgctgaagagggtttgcaagacttccatagggcactgaggtgttatgttgacttcactggtgcccagtctcattgtctgcatgttagcgcccagaaaatgctcgacggtgcctag

SEQ ID NO: 276639 - DNA, 870 bp, Artificial Sequence
  derived and/or modified sequence
atggcctgcgccggcctgctgaccgtgtgcctgctgagaccccccgccccccagccccagccccagacccccagacacccccagctggcccccgaccccggccccgccggccacaccctgttccaggacgtgttcagaagagccgacaagaacgacgacggcaagctgagcttcgaggagttccagaactacttcgccgacggcgtgctgagcctgggcgagctgcaggagctgttcagcggcatcgacggccacctgaccgacaacctggagaccgagaagctgtgcgactacttcagcgagcacctgggcgtgtacagacccgtgctggccgccctggagagcctgaacagagccgtgctggccgccatggacgccaccaagctggagtacgagagagccagcaaggtggaccagttcgtgaccagattcctgctgagagagaccgtgagccagctgcaggccctgcagagcagcctggagggcgccagcgacaccctggaggcccaggcccacggctggagaagcgacgccgagagcgtggaggcccagagcagactgtgcggcagcagaagagccggcagaagagccctgagaagcgtgagcagaagcagcacctggagccccggcagcagcgacaccggcagaagcagcgaggccgagatgcagtggagactgcaggtgaacagactgcaggagctgatcgaccagctggagtgcaagcacatcctgatggcccagagacaggtgcaggtggccgaggagggcctgcaggacttccacagagccctgagatgctacgtggacttcaccggcgcccagagccactgcctgcacgtgagcgcccagaagatgctggacggcgcctag

SEQ ID NO: 276640 - protein, 19 aa, Artificial Sequence
  derived and/or modified sequence
IKISGKWKAQKRFLKMSGC

SEQ ID NO: 276641 - DNA, 806 bp, Artificial Sequence
  derived and/or modified sequence
gggaaataagagagaaaagaagagtaagaagaaatataagagccaccatgggtgtaaggcacccgccctgctcccacagactcctggcggtgtgtgccttggtatcgcttgcgaccgccgcactgcttgtcaatccgggggtagtcgtgcgcatcagccagaagggactggattacgcctcgcagcagggtaccgcggcacttcagaaagagcttaagcggatcaagattccagactattcagatagctttaagatcaagcatttgggaaaaggtcactattcgttttactcgatggacattagagaattccagctcccttcgtcccaaatttccatggtcccgaatgtggggctgaaattcagcatttcgaacgcgaacatcaagatctcagggaaatggaaggcacagaagcgatttctcaaaatgtcaggaaactttgatctctccatcgaggggatgtcaatctcggcggacttgaaactcggctccaatcctacatcgggaaagcccactattacggcctcgtcgtgttcgagccatatcaactcggtgcacgtccatatctcaaagtccaaagtaggatggcttatccagctcttccacaaaaagattgagtcggctttgcgcaacaagatgaatagccaagtgtgcgagaaagtcacaaattccgtgtcatcagaattgcagccctacttccaaacgctgtaatgagctgccttctgcggggcttgccttctggccatgcccttcttctctcccttgcacctgtacctcttggtctttgaataaagcctgagtaggaag

SEQ ID NO: 276642 - DNA, 660 bp, Artificial Sequence
  derived and/or modified sequence
atgggagtgcggcaccctccctgcagccacaggcttctggcagtgtgtgccctggtgtcactcgcgactgcggccctcctggtcaacccgggagtcgttgttcgcatcagccaaaagggtttggactatgcgtcccaacaggggacggcagctctccagaaggagctgaagcgaatcaaaattccggattactcggactcattcaagatcaaacatcttggaaaaggacattactcgttctacagtatggacattagagaatttcaactgccaagcagtcagattagtatggtgccgaacgtcggtctgaagttctccatctcaaacgctaatatcaagatctctggaaaatggaaagcccagaagcggttcctcaagatgagcggcaatttcgatttgagcatagagggcatgagcataagcgcagacttgaagctgggtagcaacccaactagcggcaagccgactatcaccgcctcgtcatgctcttcgcatatcaattccgttcacgtgcacatctccaaatcgaaggtgggatggttgatccagctgttccacaaaaagatcgaatcagctctgcgcaacaagatgaattctcaagtgtgcgagaaggtcaccaactccgtgtcgagcgaactgcagccatactttcagaccttg

SEQ ID NO: 276643 - DNA, 660 bp, Artificial Sequence
  derived and/or modified sequence
atgggagtaaggcatccaccttgctcccatcggttactcgccgtgtgcgctctggtcagcctggctacagcagccctgttggtcaacccgggagtggttgtgaggatctcgcaaaagggcctggattacgctagccaacagggcaccgctgctctgcagaaggaactcaaaaggatcaaaatccctgactacagtgactcttttaaaatcaagcacctgggcaaaggccattacagcttttactccatggacatcagggaatttcagctccctagctctcaaatcagcatggtgccaaacgtaggtctgaagttttctatcagcaatgctaatattaaaatctctggaaaatggaaagctcagaaacgcttccttaagatgagcggcaacttcgatctgagcattgagggaatgtccatcagcgccgatcttaaattgggaagcaaccctacaagtggcaagccaacaatcacagccagcagttgctcatcccatatcaacagcgtgcatgttcacatcagcaaatctaaggtgggatggctaatacagctttttcacaagaagatcgaatctgcattacgcaataaaatgaatagtcaggtttgcgagaaggttaccaactctgtcagcagcgagctgcagccttacttccagacactt

SEQ ID NO: 276644 - DNA, 660 bp, Artificial Sequence
  derived and/or modified sequence
atgggggtacgtcatccaccatgtagccatagactgcttgcagtctgcgcactcgtgtcgctggcgactgcagctctgcttgttaaccctggtgtggtggtccgtattagccaaaaaggattggactacgccagtcaacagggcaccgcagcactccagaaagaacttaagagaattaagataccagattactcagactcatttaagataaagcaccttggcaagggtcattactcgttttactcaatggatattcgcgaatttcaactgccctcgtcgcagatctccatggtccctaacgtgggtcttaagttttcgatttcgaacgccaatatcaagattagcgggaagtggaaggctcaaaaaaggtttctcaaaatgtctgggaatttcgatctttctatcgaagggatgagcatttcagcagatctgaaacttggatcgaaccccacgtccggtaagcctaccataaccgccagcagctgttcctcgcatatcaactcagtccacgtgcacatttccaagtcaaaggtgggttggcttattcaattgttccataagaaaatagagtccgcactccgaaacaagatgaattcccaggtatgtgagaaggtgaccaattccgtgtcctcggaactccagccttactttcagactctg

SEQ ID NO: 276645 - DNA, 660 bp, Artificial Sequence
  derived and/or modified sequence
atgggcgtacgacacccgccctgctctcaccgcctcctggcagtgtgcgctttggtgtccttagctacagctgccttgctggtaaacccaggtgtggtggtgaggatcagtcaaaagggcctggactatgctagccaacaaggcacagctgccctgcagaaggagttgaaaagaatcaagattccagactacagcgatagctttaagatcaaacacctgggcaaaggccactatagcttttacagcatggacataagggaattccagctgccttctagtcagattagcatggtgcccaatgtgggcctgaaatttagtattagtaatgcaaacattaaaattagcggtaagtggaaggcacaaaagcgcttcctcaagatgtctggtaactttgacttgtctatcgaggggatgagtattagtgctgacctcaagctcgggagcaaccccactagcgggaaacccacgatcaccgcttcctcgtgcagctcacacataaacagcgtccacgtgcacatttcaaaatccaaggttggctggctgatccagctatttcataaaaagatagaaagtgctctccgcaataagatgaactctcaggtttgcgagaaagtgaccaatagtgtgagctccgagttgcaaccctactttcagaccttg

SEQ ID NO: 276646 - DNA, 660 bp, Artificial Sequence
  derived and/or modified sequence
atgggtgtgcgacaccctccctgtagccataggctgcttgcggtctgtgcactggtatcgctcgccacggcggctttactggtgaaccctggagtggtagtgcgaatctctcagaaggggctggactacgcctctcagcaagggaccgctgccctgcaaaaagagttaaagcgaatcaagattcccgactacagcgattccttcaaaatcaaacacctagggaaaggccactactccttctactccatggacatcagagagtttcagctcccatctagtcagatttcaatggtgcctaacgtgggactcaagttctcgattagtaacgccaacatcaaaatctccggaaagtggaaagctcagaaaagattccttaagatgagtggaaactttgacctctcaatcgaggggatgtccatttctgccgacttgaagctgggatctaatcccacatccggcaagcctactattacggcgtccagctgctcctcacacattaactccgtgcatgtgcacatctcgaagagcaaggttggctggttgatccaactcttccataagaagattgagtccgctctaagaaacaagatgaacagtcaagtttgcgaaaaagttacaaatagcgtaagctccgaactgcagccttactttcagactctt

SEQ ID NO: 276647 - DNA, 660 bp, Artificial Sequence
  derived and/or modified sequence
atgggtgttcgacatccgccgtgttcgcatcgattattagcggtatgtgcgttagtatcgctagcgacggcggcgctactagtaaatccgggtgtagttgtacgtatatcgcaaaaaggtttagattatgcgtcgcaacaaggtacggcggcgttacaaaaagaactaaaacgaataaaaataccggattattcggattcgtttaaaataaaacatttaggtaaaggtcattattcgttttattcgatggatatacgtgaatttcaactaccgtcgtcgcaaatatcgatggtaccgaatgttggtttaaaattttcgatatcgaatgcgaatataaaaatatcgggtaaatggaaagcgcaaaaacgttttttaaaaatgtcgggtaattttgatctatcgatagaaggtatgtcgatatcggcggatctaaaattaggttcgaatccgacgtcgggtaaaccgacgataacggcgtcgtcgtgttcgtcgcatataaattcggtacatgttcatatatcgaaatcgaaagttggttggctaatacaattatttcataaaaaaatagaatcggcgttacgaaataaaatgaattcgcaagtatgtgaaaaagtaacgaattcggtttcgtcggaattacaaccgtattttcaaacgcta

SEQ ID NO: 276648 - DNA, 660 bp, Artificial Sequence
  derived and/or modified sequence
atgggagtccgacatccaccatgcagccacagactgcttgcggtgtgcgctctcgtctcgctagctacggcagccctcctggtcaaccctggggtggtcgtgcgaatcagccaaaagggtttggactacgcttctcagcaggggaccgctgcgcttcagaaggagctgaagcgaatcaaaatcccagattacagcgatagcttcaagatcaaacatctcggaaaggggcactacagtttctactctatggacatccgagagttccaactccctagctcacaaatatcaatggtgcccaacgtaggtcttaagttctctatcagtaacgccaacattaagatctccggaaaatggaaggcccaaaaacgatttctcaaaatgagcggcaattttgacttgtcaatcgagggaatgagtatatctgccgacctgaagctcggatccaatccaacttcaggcaagccaaccatcactgcatcgagttgttcgagccatattaacagtgttcacgttcacatctctaagtctaaagtcggctggctcatccagctgtttcacaagaagattgaatctgccctaaggaacaaaatgaactcacaagtctgcgagaaggtcaccaacagcgtaagcagcgaactgcagccatattttcagacgctg

SEQ ID NO: 276649 - DNA, 660 bp, Artificial Sequence
  derived and/or modified sequence
atgggggtgcgtcacccaccgtgctctcacagacttttggcagtgtgcgcactcgtgtccttagccacagctgcgctccttgtgaacccaggcgtggttgtgagaatctcacagaagggactggactatgctagccaacagggcacagctgctctgcagaaggagcttaaaagaattaagataccggactactctgattcctttaagataaagcatctaggtaaaggccactactctttctatagtatggatattcgtgagttccagctcccgtcttctcagatctccatggtcccaaacgtggggttaaaatttagcatctcaaatgccaacatcaagatcagcggcaaatggaaggcccaaaagcgctttctgaaaatgtcgggcaacttcgatctatctatcgagggcatgtcgatcagcgccgacctcaaactggggtccaatccaactagcggcaagccgactatcacagcgagttcctgcagtagccatatcaatagcgtgcatgtgcacattagcaaatccaaagtgggatggctgattcagctgttccacaagaagatcgagagcgccctgaggaataaaatgaattcacaggtctgcgagaaggtcactaacagcgttagttctgagctacagccttacttccagacgctc

SEQ ID NO: 276650 - DNA, 660 bp, Artificial Sequence
  derived and/or modified sequence
atgggcgtgagacatccaccctgctctcaccgtctgctcgccgtttgcgccctcgtttcactggctactgcggcactgcttgtgaatccaggtgtggtggtccgcatctctcagaagggactggactacgcgagccagcagggcaccgctgcactgcagaaagaactcaagaggatcaagataccggattacagtgacagtttcaagataaaacaccttggcaaggggcattactccttttatagcatggacattcgtgagttccagctcccttcctctcagataagcatggtacccaatgtcggcctcaagttctctatctccaatgcaaacattaagatatctggtaaatggaaggcccagaagaggttcctgaaaatgagtggaaactttgacttgagcatagagggtatgagtattagcgcggatctgaagctgggaagcaatcccacctcaggaaagcccaccataaccgctagctcatgtagcagccacattaactctgttcacgtacatatctcaaaatctaaagtggggtggctgatccagctttttcacaaaaagattgagagcgctcttcgcaataaaatgaactctcaggtatgcgagaaagtgacaaactcagtgtcctctgaactccagccttatttccagacattg

SEQ ID NO: 276651 - DNA, 660 bp, Artificial Sequence
  derived and/or modified sequence
atgggagtacgacatcctccatgcagccaccggttgctggctgtttgcgcacttgtgtccttggccacggctgcactcctggtaaacccgggcgtggttgtacgcatcagccaaaaaggcctggactacgcgagtcagcagggcacggcagctcttcagaaagaactgaagcgtatcaaaatccccgactacagcgacagctttaaaattaagcatctgggaaagggacattattcgttctactcaatggatatccgggagttccagctcccgtcctcccagattagcatggttcctaatgttggcctgaagttcagcattagcaatgctaacatcaagatttccggcaaatggaaagcacagaagaggtttctcaagatgtctggtaactttgatctgagcattgagggtatgtccatctcggcagatctgaaactcgggtctaacccaacctcaggtaagccaacgattaccgcatcctcctgtagctcccatattaactctgtgcatgtgcatataagtaagagcaaggttggatggctaatccagctatttcataagaagatagaatccgccttgcggaacaagatgaattctcaggtgtgcgagaaggtcacaaactctgtgtcctccgaactccagccgtacttccagacactg

SEQ ID NO: 276652 - DNA, 660 bp, Artificial Sequence
  derived and/or modified sequence
atgggagtgcgccatccaccatgcagccatagacttctcgctgtgtgcgctttggtaagcctggccactgctgccctgctggtgaacccaggagtggttgttaggatttcacagaagggactggattacgcctctcagcagggtacagctgccctgcagaaagaactgaaaagaatcaagatcccagactacagtgacagctttaagatcaagcacctgggaaagggacactactccttctattctatggatattcgcgaattccagctgccttcttctcaaatttctatggtgcctaacgtcggccttaagttttccatcagtaatgctaacatcaaaatctctggaaaatggaaggctcagaagcgtttcctgaaaatgtccggcaactttgatctcagcattgagggtatgagtattagtgcagacctcaagcttggctccaatccaaccagcggcaagccaactatcacagctagtagctgctccagtcatattaactccgtccacgtgcatatttccaagtccaaagtgggttggctgatccagctgttccacaagaagatcgaatccgctctgcgcaacaaaatgaacagccaagtgtgcgaaaaggtgacaaactcagttagctccgagctgcaaccatactttcagaccctg

SEQ ID NO: 276653 - DNA, 660 bp, Artificial Sequence
  derived and/or modified sequence
atgggagtccgacatcctccttgttcacacagacttctcgcagtatgtgctctcgttagcctcgctacggcagccttactggtcaacccaggcgtagtagttaggatctctcagaagggcctggattatgccagccagcagggaactgcggctttgcagaaagagcttaaacggattaagatcccagactattctgactcttttaagattaagcacttgggaaagggccactactccttttatagtatggacatccgagagtttcagttgccgagcagccaaatatcaatggtaccgaacgtgggcttaaagttcagcatctctaatgctaatattaagatatccggaaagtggaaggcccagaaacggtttctgaagatgtcgggcaacttcgacctgtccatcgaagggatgtctatatcagccgatttgaagctgggatcaaatccgaccagtggcaagcccaccatcaccgcctcctcctgttccagccacatcaatagcgttcatgtgcatatcagcaagtctaaggtgggttggctcattcagttgtttcataagaaaattgagtccgccttgcgcaataagatgaatagtcaggtctgtgagaaagtgaccaactccgtttccagtgaactacagccatacttccagaccctc

SEQ ID NO: 276654 - DNA, 660 bp, Artificial Sequence
  derived and/or modified sequence
atgggtgtgagacatcctccgtgctctcataggctgctggctgtgtgcgcactggttagcctggcaaccgcggcacttcttgttaacccgggggtagtggtccggatttctcaaaaaggcctggactatgcgagtcagcaagggacagccgcacttcaaaaggaattgaaacgaataaaaataccggattactccgacagttttaaaatcaagcacctgggcaaggggcactacagtttttacagtatggacatccgggaattccagcttcccagtagccagatttcaatggtgcccaatgtgggcctgaaattctcaatcagcaacgccaacataaagattagtggaaaatggaaggcacagaagcgtttcctgaaaatgagtgggaatttcgacttatcgattgaaggcatgtccatttcagctgatctcaaactgggaagcaaccctacatctggaaagcccaccatcactgccagtagctgcagtagccacataaattctgtccatgtacacatttcgaaaagcaaagtaggctggctgatccagctttttcacaagaaaatcgaatcagccctcaggaacaagatgaacagtcaggtctgtgagaaggtgacaaactctgtttcctcggagctgcaaccctatttccagaccctc

SEQ ID NO: 276655 - DNA, 660 bp, Artificial Sequence
  derived and/or modified sequence
atgggcgtccgccatccgccctgttctcaccggttacttgcagtttgtgcattggtgtctctagccacagcggcacttctggtcaaccctggggtcgtggtccgcattagccagaagggcttggactacgcatcacagcaggggacagccgccctccagaaggagctgaagagaataaagatacccgattatagcgatagctttaagatcaaacacttgggtaaggggcattactctttctatagtatggacatccgagagttccagctcccgtctagccagatctcgatggtgccaaacgttgggctgaagttttcaatttcaaacgccaatattaagatttctggaaaatggaaggcgcagaagcgtttcttgaagatgagcgggaacttcgacttgtccatagagggaatgtctatctccgccgatttgaagttgggcagcaaccccacaagcgggaagccaaccattactgcctcatcctgctccagccatattaacagcgtgcacgtgcacatcagcaaaagcaaggtaggctggctcatccagctcttccataagaagattgagtctgcgctcagaaataagatgaactcccaggtgtgcgagaaggttaccaattccgtgagtagcgagctccagccctacttccagaccttg

SEQ ID NO: 276656 - DNA, 660 bp, Artificial Sequence
  derived and/or modified sequence
atgggtgttcgccacccaccctgcagccacaggcttcttgccgtatgcgcgctcgtgtctcttgctactgctgctttgctggtaaatcccggcgttgtggttaggatttcacagaaggggttagactacgcctctcagcagggcacagccgccctacagaaggagcttaaacggattaagatcccagattatagtgacagttttaagatcaaacatcttggcaaaggccactatagtttctactccatggatattcgggaattccagctgccatcttctcaaatctctatggttcctaatgtgggcctgaagttctcaatctcaaatgccaacatcaaaatttcgggtaagtggaaggcccagaagcgcttcctgaaaatgtctgggaactttgacctgagcatcgaaggaatgagcatcagcgccgatctgaaactgggcagtaatcccacgtcaggaaagccaacgatcacagcatcctcctgctcaagtcatattaattcagtgcacgtccacatttccaaatcaaaagtcggctggctgatccaactcttccacaagaagattgagtccgccttgagaaataaaatgaactctcaggtgtgcgagaaggtgactaattcagtgtcctcagagcttcaaccatactttcaaacgctt

SEQ ID NO: 276657 - DNA, 660 bp, Artificial Sequence
  derived and/or modified sequence
atgggagtgagacaccctccgtgctcccatcgcctccttgcggtgtgcgctctggtgagcttggccactgccgctctccttgtgaacccgggagtggtggttcggatctcacaaaaaggcctcgactacgcctcacagcaaggcaccgccgccctgcaaaaagaacttaaacggatcaagatcccggattatagcgacagcttcaagattaaacacctgggcaagggacattactcgttctactcaatggacattagggagttccaactcccgtccagccagatctcaatggtgccgaacgtgggactcaagttttccatctctaacgccaacatcaagatttcggggaagtggaaagcccagaagcgcttcctgaagatgtctggaaatttcgacctgtcaattgaaggcatgagcatctcggctgatctcaagctggggtcgaatcctacctcgggtaagcctaccatcactgccagctcgtgctcgtcgcatatcaactcggtccacgttcatatttcgaaaagcaaggtgggctggctgatccagctgtttcataagaaaattgaatcagcgctgaggaacaagatgaatagccaggtctgcgagaaggtgaccaattccgtgtcctcagaactccagccttactttcagaccctg

SEQ ID NO: 276658 - DNA, 660 bp, Artificial Sequence
  derived and/or modified sequence
atgggagtgcgacatcccccttgttcccacaggcttctggctgtgtgcgccctcgtttctctggccaccgccgctctccttgtgaatccaggtgtggttgtcaggattagtcagaaaggtctggattacgcttcacagcagggaacagccgcactgcagaaggaattgaagagaatcaaaatacccgactatagtgattcattcaaaatcaaacacctggggaagggacactattctttctactcaatggatattcgcgaattccaacttccatcaagccagatcagcatggttcccaacgtgggcctcaaattctccattagtaacgctaacatcaaaatcagtggaaagtggaaggcccagaagaggttcctcaaaatgtccgggaatttcgacctcagcatcgaagggatgtcaattagtgccgacctgaagctgggaagcaacccaacaagcggaaagcctaccattacagcatcttcatgcagctcacacatcaactctgtgcacgtccacattagcaaatcaaaggtgggctggttgatacagctttttcataagaaaattgagagcgccctgcggaacaaaatgaattcccaagtctgcgaaaaggtgaccaattctgtgtccagcgaactccagccctacttccagactctg

SEQ ID NO: 276659 - DNA, 660 bp, Artificial Sequence
  derived and/or modified sequence
atgggggtccggcacccgccctgcagtcatcgcctgctcgccgtgtgcgctcttgtctccctcgcaaccgcagccctgctggtgaatccgggcgtcgtggtcagaatcagccagaaaggactcgactatgcctcccaacaaggtacggcggcgttgcagaaggagctcaagcggatcaagatcccagactactcagattcatttaagattaagcacctcggaaaaggtcactactcgttctacagcatggatatcagagaattccagttgccgtcgagccagatctcgatggtcccgaatgtgggcctgaaattctccatcagcaacgcaaacatcaaaatttcgggaaagtggaaggcccagaagaggtttctgaagatgagcggaaacttcgacctctcaattgaaggcatgagcatctccgcggacttgaaactgggatctaaccctacctcggggaagcctaccatcactgcctcctcgtgttcaagccatataaactcggttcacgtgcatatctccaagtcaaaggtgggatggctgatccaactgttccacaagaagatcgagtcagctctgcgcaataagatgaactcgcaggtgtgcgagaaagtgactaattccgtgtcgtccgaactgcaaccatacttccagactctt

SEQ ID NO: 276660 - DNA, 660 bp, Artificial Sequence
  derived and/or modified sequence
atgggcgtaagacatccaccgtgctcacatagactcctagctgtttgtgctttggtgtccttagccactgccgccttgttagtaaaccccggggtggtggtcagaatctcacagaaggggctcgactatgccagccaacagggaacggccgccctgcagaaggagctgaagagaattaagattcccgattacagcgattccttcaaaatcaagcacttgggaaagggacattattccttctatagcatggacattcgcgagttccagctgcctagctcacagatttcgatggtccccaacgtggggctaaagtttagtatctctaatgccaacatcaagataagtggaaagtggaaggcacagaagcgttttcttaagatgtctggcaacttcgacctgtccattgagggcatgtccatctcagcagatctgaaactaggttcaaacccaacctctggcaagccaactatcactgcctccagctgttcgtcacatatcaactcagtccacgtgcatattagtaaatcaaaagttggatggctcattcagctctttcataaaaagatcgaatccgccctgaggaacaaaatgaactcccaagtgtgcgagaaagtgaccaactccgtcagtagtgaactgcagccttactttcaaaccctt

SEQ ID NO: 276661 - DNA, 660 bp, Artificial Sequence
  derived and/or modified sequence
atgggggttcggcaccctccatgttcacataggcttcttgccgtgtgcgcgttggtgagccttgctaccgccgcattgctggtgaatccaggtgtcgtcgtcagaatctcccagaaggggcttgactacgcatcgcagcaaggtacggcagcgctccagaaggagctgaaacgtattaagatccctgattacagcgatagcttcaagataaagcacctcggaaagggacattattcgttttactccatggatatccgcgaatttcagctgccaagttcacagatttcgatggtgccaaacgtgggccttaagttttccatctcaaatgccaacattaagatttcgggtaagtggaaggcccagaaaagattcctgaagatgtcgggaaatttcgatctgtcaattgaaggcatgtccatttcggcagatctgaagctcggatcgaatcctacctcgggaaaacctaccattaccgcttcgagctgttccagccatatcaattccgtccatgtgcacatcagcaagtccaaggtgggctggctgattcagcttttccataagaagatagaatcggcactcagaaataagatgaactcgcaggtgtgtgaaaaagtgaccaactccgtctcctcggagctgcagccttactttcaaaccctg

SEQ ID NO: 276662 - DNA, 660 bp, Artificial Sequence
  derived and/or modified sequence
atgggagtacgacatccgccttgtagccatagattactggctgtgtgtgcgcttgtgagccttgccacagccgctttactagttaatcccggcgttgtcgttcggatctcccaaaaagggctcgattatgcgagccaacaaggcactgccgccttacagaaggagctgaaacgaatcaaaatccctgattattctgattcatttaagattaaacatctcggtaaaggacattatagcttttattctatggatattagagaatttcaacttccgtctagccaaatcagcatggtgcctaatgtcgggctgaagttttcgattagtaacgcgaacattaaaatctcaggaaagtggaaagcccagaagagatttttgaaaatgtcaggcaactttgatctaagcatcgagggaatgtcaattagcgccgaccttaaattaggcagtaatccgacgtccgggaaaccgacaattaccgcatccagctgttcctcgcatattaattctgtccatgtacacatttcgaaatctaaggtaggatggctgatccagctcttccataaaaaaatcgaaagtgcgttacggaataagatgaattcgcaggtgtgtgaaaaagttacaaactccgtcagtagcgagcttcagccttattttcaaacccta

SEQ ID NO: 276663 - DNA, 660 bp, Artificial Sequence
  derived and/or modified sequence
atgggcgttaggcatccaccatgtagccacagacttctggccgtatgcgccttggtgtcactggccactgctgcattgttggtcaatccaggtgtagtagttcgcatctctcaaaaaggactggactatgcttcacaacagggaacagccgcacttcagaaggagttgaagagaatcaagatcccagactactctgactctttcaagatcaagcatctgggcaagggtcattactccttttactccatggatattagagagtttcaactgccaagctcacagatttctatggtacccaacgtgggccttaagttttctatatcaaacgccaacattaagatttccggcaagtggaaggctcagaagcgcttcttgaagatgtctggtaactttgatctgtccatcgaaggcatgtctatcagcgccgatctcaagctgggaagcaaccccaccagcggaaaaccaactatcacggcgtcctcttgttctagtcacatcaactccgtacacgtgcatatctctaaaagtaaggttggctggttgatccagctgttccacaaaaaaatcgagtctgccctccgcaataagatgaatagccaagtatgtgagaaagtcacgaactcagtgtcttccgagttgcaaccatacttccagaccctg

SEQ ID NO: 276664 - DNA, 660 bp, Artificial Sequence
  derived and/or modified sequence
atgggcgtcagacacccaccttgttcgcacaggttgctggccgtgtgtgccctggtgagccttgctaccgctgcccttcttgtaaaccccggagtcgtggtgcgaatctcccaaaaaggcctcgattacgcatcccaacaaggtacggcagcacttcagaaagaactgaagcggattaagattcctgattactcagattcctttaagattaagcatcttggcaaggggcattattccttttactccatggacatcagagaatttcaactgccctcgtcccaaattagcatggtgccgaatgtgggcttgaaattcagcatatctaacgcaaacatcaagatcagcggtaaatggaaggcgcagaaacgatttttgaaaatgagcggtaacttcgacctgtcgattgagggtatgtcaataagcgcggatctgaaacttgggtccaacccaacctctgggaagcctactattactgcatcgtcatgctcatctcacataaacagtgtccatgtgcacatttccaaatccaaggtgggatggctgatacagctcttccataagaagatagagtcggcactgcggaacaagatgaactcgcaggtgtgtgagaaagtgacgaactccgtttcgtccgagttgcagccatactttcagaccctg

SEQ ID NO: 276665 - DNA, 660 bp, Artificial Sequence
  derived and/or modified sequence
atgggtgtgcggcaccctccttgctctcatcgcctgctggcagtctgcgccttagtatccctggcgaccgctgcgctgctcgtgaacccaggtgtcgtggtcagaattagtcagaaggggctggactacgcatcgcagcaggggaccgcagcactgcagaaggaacttaagcgtatcaagattccagattattccgattccttcaaaatcaagcacctcgggaaaggtcactatagcttttactcaatggatattagggaatttcagctgccgtcaagccagattagcatggtgcctaacgtgggcctcaaattctcgattagcaacgccaacataaagataagcggcaagtggaaagcacagaaacgttttctcaaaatgagcggcaacttcgacttaagcatcgaaggcatgagtatttctgctgacctcaagctgggctccaacccaactagtggcaaaccgaccatcaccgcctcctcatgctcaagtcacattaactcggtgcatgtccatatatctaaaagtaaggtcggctggctgatacaattattccacaagaagatagagtctgcgctgcgtaataaaatgaactcccaagtgtgcgagaaagtgaccaactcagtgtcttccgaactacagccttacttccagaccctt

SEQ ID NO: 276666 - DNA, 660 bp, Artificial Sequence
  derived and/or modified sequence
atgggcgtccgtcatcccccctgcagccatcgactgctggcagtgtgtgccctggtcagtctcgcaaccgccgcactgcttgtgaacccaggggtggtggtcagaatcagccaaaaagggctcgactacgcttcgcagcaaggcaccgcagcactgcagaaggagcttaaaaggataaagataccagactactccgattcgtttaagatcaagcacctgggcaaaggacattattctttttacagtatggatataagagaatttcagctcccttcatcacaaatctcgatggtgccaaacgtgggtcttaagtttagcatctcaaatgccaatatcaaaatctccggtaaatggaaagctcaaaagagattcttgaagatgtccgggaacttcgatctgagcattgaaggcatgtcgatttccgcggatctcaagctcggttcgaaccccacgagcggaaagcccaccatcactgcctcttcatgctcgtcgcatatcaacagtgtgcatgtccacatttcaaagtcgaaggtcggatggctgattcaattgtttcacaagaaaattgagtccgcactccgcaacaagatgaattcgcaagtgtgtgaaaaagtgacgaactccgtctccagcgagttgcagccttacttccaaaccctt

SEQ ID NO: 276667 - DNA, 660 bp, Artificial Sequence
  derived and/or modified sequence
atgggagtgcgccacccgccttgctcccacaggctgctcgccgtgtgcgcactggtatccctcgcaactgctgctctgttggtgaatccgggagtggtggtccgcattagccaaaaaggcctcgactatgcctcccaacaggggacggccgccctgcagaaagagctgaagcggatcaaaattccggactactcggattcgttcaagatcaagcacctgggtaaaggccattactcattttactcaatggacatccgcgaattccagctgccgtcctcgcagatatccatggtccccaatgtcggactgaagttctcaatctcgaacgcgaacatcaaaatctcaggtaaatggaaggctcagaagcggttccttaagatgtcaggaaacttcgacttgtccatcgaaggaatgagcattagtgccgatctgaagctggggtcgaacccaactagcggcaagcctaccatcactgcatccagctgctcaagccacatcaactcagtacatgtgcacatatcgaagagcaaggtcggatggctgatccaactctttcataagaaaatcgaatcggcgttgagaaataagatgaattcgcaggtgtgtgagaaggtgaccaacagcgttagcagtgagctccaaccatactttcagaccctc

SEQ ID NO: 276668 - DNA, 660 bp, Artificial Sequence
  derived and/or modified sequence
atgggtgtccgtcaccccccttgttcacataggcttctggcagtgtgcgcccttgtgtcgcttgcaaccgcagcactgctcgtcaaccccggtgtcgtggtgcgcatctcccagaagggcttggactatgcatcgcaacaaggaaccgcggctctgcagaaagaactgaagcgcattaagatccccgattactccgattcattcaagatcaaacatctcggtaagggacactacagcttttactccatggatattagggaattccagctcccttcgtctcaaatttctatggtgccaaacgtcggacttaagttttcgatttcgaacgcgaacattaagatttcggggaagtggaaggcacagaaacgatttctgaagatgtctggtaactttgacctctcaatcgagggaatgtcgattagcgcagatcttaaacttggcagcaatcctacttcaggtaagccaaccataaccgcgagctcctgttcctcacacattaactccgtccacgtacatattagcaagtcaaaagtgggctggctcatccagctgtttcacaagaaaatagaatccgcacttcgaaacaagatgaactcacaagtctgtgaaaaggtcacgaacagcgtgagctcggagcttcagccatacttccaaactctg

SEQ ID NO: 276669 - DNA, 660 bp, Artificial Sequence
  derived and/or modified sequence
atgggagtgagacacccgccctgttcccacagactgctggctgtttgcgctttggtgtccctcgccaccgctgcgttgctggtgaacccgggagtggtggtgagaatcagccagaaaggcctggactacgcctcacagcagggcacggccgcgctgcagaaggaactgaagagaatcaagatcccagactactcggactcttttaagatcaagcatctgggcaaaggccattattccttctactccatggatatccgagaatttcagctcccgtcctcccagatctccatggtcccgaacgtcggcctcaagttctcgatttcaaacgccaacatcaaaatctcaggaaagtggaaagcccagaagcgcttcctgaagatgtccggtaacttcgacctctccatcgaaggaatgtctatcagcgcagacctcaagttgggatcgaatccaactagcggaaaaccgactatcactgcatcctcatgctcctcccatatcaactccgtgcacgtccacatctccaagtcgaaggtgggatggcttattcagctgttccacaagaagattgaaagcgccctgcgcaataagatgaatagccaggtctgcgagaaagtgactaactcagtctcgagcgagcttcagccgtactttcaaacgctc

SEQ ID NO: 276670 - DNA, 660 bp, Artificial Sequence
  derived and/or modified sequence
atgggagtgaggcaccccccatgctcacaccgtctgttggctgtgtgtgcattagtgtccttagccacagctgctctgctggtgaaccctggcgtggtagtgagaatatcacagaagggcctcgattatgcgtcgcagcaaggtaccgccgctctccagaaagaactgaaacgcatcaaaatccccgattactccgatagttttaaaatcaaacatctgggcaaagggcactattccttctattcgatggacataagagagtttcagctcccctcatctcagattagtatggtgccaaatgtgggccttaagtttagcatctctaatgccaatatcaagatatctggcaaatggaaagcccagaaacggttcctcaaaatgtcaggaaatttcgacttgtctatcgaaggtatgtccatctctgctgacttgaagctgggctctaatcccacctctggaaaaccaacaattacggctagctcatgcagttcccacatcaattctgtgcacgtgcacatctctaagtcaaaagttggttggttgatacagctgttccataagaaaattgagtctgccctgcggaacaaaatgaactcacaggtctgcgaaaaggttaccaacagcgtcagctctgaactgcagccgtatttccagacactc

SEQ ID NO: 276671 - DNA, 660 bp, Artificial Sequence
  derived and/or modified sequence
atgggtgtgaggcaccctccttgctcgcatcggcttctggccgtgtgcgccctcgtgtcactggcaactgcagcacttctcgtcaacccaggagtcgtcgtgcggattagccaaaagggtctggattacgcatcgcaacagggtacggcagcgttgcagaaggaacttaagcggatcaagatacctgactacagcgattcattcaaaatcaaacatctcggtaagggacattacagcttttactcaatggatattagagagtttcagctcccatcctcgcagatatccatggtgcctaatgtgggccttaagttcagcatttccaacgccaacataaagatctcaggaaagtggaaggcacaaaagcggttcctgaaaatgagcggcaactttgatctttccatcgaagggatgtcgatttccgctgacctgaagctgggctcaaaccctacttcaggaaaacctactattacggcctcatcctgttccagccacattaactccgtgcatgtccatatatcgaagtctaaggtgggatggctgattcagctttttcataagaagattgagtcagcattgcgaaacaagatgaactcgcaggtgtgtgaaaaggtgaccaactccgtctcatccgaattgcagccatactttcaaactctg

SEQ ID NO: 276672 - DNA, 660 bp, Artificial Sequence
  derived and/or modified sequence
atgggagtccgccaccctccctgctctcatcgcctgcttgcagtgtgcgccctcgtctcactggccacagcagcccttttggttaaccctggcgtggttgttcgcatttcccaaaaggggctagattacgcgtcacaacagggaactgccgcgctccagaaggagctcaaacggatcaaaatcccagattactccgattctttcaaaataaagcacctgggcaaaggacattacagtttttactctatggacattagagaattccagcttccttcttctcagattagcatggtgcctaacgtgggattgaagttctccatatctaacgccaacatcaagatttctgggaagtggaaagcccaaaagcgctttctcaagatgtcaggaaacttcgacctgtccattgagggcatgtccattagtgcagacctgaaactggggagcaatcctacatcaggaaagcctaccatcacagctagtagctgttcatcacacataaactccgtgcacgtccacatctctaagtctaaagtgggttggctcatccagctgttccacaaaaaaatagaaagcgctctgcgaaacaaaatgaactctcaagtgtgcgagaaagtgactaacagtgtgtcaagcgagctgcagccctacttccagactctt

SEQ ID NO: 276673 - DNA, 660 bp, Artificial Sequence
  derived and/or modified sequence
atgggagtgcggcatcccccttgtagccatcggctgctggccgtctgtgccctggtatcgctcgctactgcagccctgcttgtcaatcccggcgtcgtcgtgagaataagccagaagggtttggattatgcgagtcagcagggcaccgccgctttgcagaaggagctgaaaaggataaagatccctgattacagcgattcctttaagattaaacatctcggcaagggccactactctttttacagcatggacatccgggagttccaactgcccagctcacaaatctctatggtacctaatgttggcttaaaatttagtatttccaacgccaatataaagatcagtggtaaatggaaagcccagaaacggtttctaaaaatgtcaggaaattttgatctgtccattgaaggcatgtcaatatctgctgatttgaaactgggttcaaaccccacaagcggaaagccaaccatcacggctagttcatgttcctctcacattaattccgtgcatgttcacatctccaagagcaaagttggatggcttatacagcttttccataagaagatcgagagcgccttacggaataaaatgaattctcaggtttgcgaaaaagtgacgaattctgtctcttctgagctgcagccttacttccagacacta

SEQ ID NO: 276674 - DNA, 660 bp, Artificial Sequence
  derived and/or modified sequence
atgggtgtgcgacatcctccatgcagccacaggctgctggcggtctgtgccctggtgtcgctggccaccgctgctctgcttgtaaacccaggcgtggttgttcgcatctcccaaaaaggtctcgactacgccagccagcagggtaccgcagcgctgcagaaggagctgaagcggatcaagatcccagattactccgacagttttaagatcaagcacttgggtaaaggacactacagcttctattcaatggatattagagaattccagctgccaagctcccaaatctcgatggtgcctaacgtggggctcaaattctccatttccaacgccaacatcaagatctctggtaaatggaaagcgcagaagcgcttcctaaagatgagcgggaatttcgatttgagcatcgaaggtatgagtataagcgcggatttgaagctgggcagcaacccgaccagcggtaaaccgacgattactgcttctagctgcagtagtcatatcaacagcgttcacgttcacatctctaagagtaaggtaggttggctgattcaattgttccacaagaagatcgagagcgccctgcgtaacaaaatgaacagccaagtttgtgagaaggtgaccaacagcgtgagttccgagttgcagccctactttcaaacccta

SEQ ID NO: 276675 - DNA, 660 bp, Artificial Sequence
  derived and/or modified sequence
atgggggtccggcaccccccatgcagccatcgcctgctggccgtctgtgcactggtcagcttggctacagctgccctcctggtcaatccgggagtggtggtgaggattagccagaaaggattggattacgcctcgcagcagggcaccgcggctcttcagaaagagttgaagagaatcaagattcctgattactcagattcctttaaaattaaacacctcggaaaaggacattactcgttttactccatggatattcgcgaatttcaattgccaagctcacagattagcatggtacccaacgtcgggcttaagttcagcatcagcaatgcaaacataaagatctccggcaagtggaaggcccagaagcgctttctaaaaatgagtggcaactttgacttaagtatcgaaggcatgagcattagtgccgatctgaaactgggcagtaatcccacctccggcaaacccaccattactgccagtagctgttcttctcacattaactccgtccatgtccacatctctaaatcaaaagtcggttggctcattcagcttttccataaaaagatcgagagcgcactgaggaacaaaatgaactcacaggtttgtgaaaaggtcacaaatagcgtgtccagtgaattgcagccctactttcagaccctg

SEQ ID NO: 276676 - DNA, 660 bp, Artificial Sequence
  derived and/or modified sequence
atgggtgtgcgccatccgccgtgttcgcatcggctgctcgctgtctgtgcgctcgtctcactggcaacggctgcgctcctggtcaaccccggcgttgtggtccggatctcgcaaaagggtctggattacgcctcgcagcagggtactgcagccctgcaaaaagagctgaagaggataaagatcccagattattccgatagcttcaagatcaagcacctggggaaagggcattactcgttctacagtatggacatccgcgaattccagcttccgtcgtcgcagatctccatggtgccaaacgtgggactcaagttctcaatctccaacgcaaacatcaagatctcgggcaagtggaaagcacagaagagattcttgaagatgtcgggaaacttcgacttgtcaattgaaggaatgtctatctcggccgacttgaagctgggcagcaacccaaccagcggaaagccaactatcacggcctcatcctgctcgagccacattaactccgtgcatgtgcacatctctaagtctaaggtgggatggctgatccagctgtttcataagaaaatcgaatcagcgttgcgcaataagatgaacagccaggtttgcgaaaaagtgactaacagcgtctcgtccgaattgcagccttatttccaaaccctg

SEQ ID NO: 276677 - DNA, 660 bp, Artificial Sequence
  derived and/or modified sequence
atgggggtgcgccacccaccctgctcccaccggcttctggcggtgtgcgccctggtgtcactcgcgaccgcggccttgctcgtgaatcccggagtggtggtgcgcatctcgcagaaaggcctggactacgccagccagcagggaaccgccgcgttgcagaaggaactgaagcggatcaagatccctgactacagcgactcgttcaagattaaacacctcggaaagggacactattcgttctactcgatggatatccgggagttccaactgccatcctcacagatctccatggtgccgaacgtcggtctgaaattctcaatctcgaacgcaaacatcaagatcagcggcaagtggaaagcacagaagcgcttcctcaagatgtcgggcaattttgacctttctatcgaaggaatgtcgatctcggcggaccttaagctgggatccaatcccacctcaggcaagcccactatcactgctagctcctgctcatcgcacattaactcagtccatgtccacatctccaagtcgaaggtgggatggctgattcagctgttccataagaagatcgagtcggccctgcggaacaagatgaactcccaagtctgtgaaaaagtgactaattcagtgagctccgaactgcagccgtacttccaaactctt

SEQ ID NO: 276678 - DNA, 660 bp, Artificial Sequence
  derived and/or modified sequence
atgggcgtccgccatccgccatgttcgcaccggctgctggcggtgtgcgccctcgtgtcactggcaaccgcggcactgctggtgaacccaggagtggtcgtcaggatctcgcagaagggtttggactacgccagccagcaaggcaccgccgcattgcaaaaggaacttaaacgcatcaagattcccgattactccgacagctttaagattaaacatctgggaaaggggcattactcgttttactcgatggatattcgggagtttcaacttccatcttcgcaaatttcaatggttcctaacgtgggcctgaagttttcgatcagcaacgcgaacattaagatctcgggaaaatggaaggcacagaagcgttttctgaaaatgtcagggaactttgacctgtcgatcgagggaatgtcgatttcggccgatcttaaactgggtagcaacccaacttcaggtaagcccactatcactgcctcttcatgttcctcccacattaacagcgtgcatgtgcatatttccaagagcaaggtgggttggctcattcaactgtttcataagaagatcgaatccgccctgcggaacaagatgaattcccaagtctgtgaaaaggtgactaacagtgtgtcctccgaactccaaccatacttccaaaccctt

SEQ ID NO: 276679 - DNA, 660 bp, Artificial Sequence
  derived and/or modified sequence
atgggtgtgaggcacccaccttgctctcaccggcttctcgcagtgtgtgcacttgtcagcctggcaacggctgccctgcttgtgaaccctggtgtcgtggtgagaatttcgcaaaagggcctggattatgcaagccaacagggaaccgctgcgcttcaaaaggagctgaaacggatcaagattcctgactattcagattcgttcaaaatcaaacacttgggcaaggggcattacagcttttactcgatggatatcagagagttccaacttccctcgtcgcagatttcgatggtccccaatgtggggctcaagttttctatttcaaatgccaacataaagatttcgggcaagtggaaagcacaaaagcgctttcttaagatgtccggtaacttcgacctgagcatagaaggcatgtcaatctcggccgatttgaagctgggatcaaaccccacttcgggtaaacctaccataaccgcaagcagctgttcgtcccatatcaatagcgtgcacgtgcatatctcaaaaagcaaggtcggctggctcattcaactttttcataagaaaattgaatccgccctccgaaacaagatgaactctcaagtctgcgaaaaggtgactaactcggtttccagcgaactgcagccatactttcaaactctt

SEQ ID NO: 276680 - DNA, 660 bp, Artificial Sequence
  derived and/or modified sequence
atgggcgttaggcatcccccgtgttcccatagactcctggccgtgtgcgctctggtcagccttgctactgccgctcttcttgtaaatcccggcgtggtggtcaggatctcacagaagggcctggactacgcgtcccaacagggcacagccgcgctccagaaggagctgaaaaggatcaagattcctgactatagcgactcattcaagattaaacaccttggcaaaggccattatagcttttattcgatggacatcagggagtttcagttgccctccagccaaatctccatggtgcctaatgttggactgaaattcagtatatctaatgctaacattaaaatcagtggaaagtggaaggcacagaaaagattcctgaagatgtccggaaacttcgatctgtccattgagggtatgagcatttccgcggacttgaagttaggatccaacccaaccagtggcaaaccgaccatcaccgcgtcttcctgcagcagccacatcaactcggttcacgttcacatctccaaatctaaggtcgggtggctgattcagttatttcataaaaaaatcgaaagtgctctaagaaataaaatgaactcccaggtgtgtgagaaagtaactaactcggtgagtagtgaactgcagccgtatttccagactctg

SEQ ID NO: 276681 - DNA, 660 bp, Artificial Sequence
  derived and/or modified sequence
atgggagtccgccacccaccttgtagccaccgcctgctggccgtgtgcgcccttgtcagcctggcaactgcggccctcctcgtgaatccgggtgtagtggtgcgcatttcccaaaagggcctggactacgcaagccaacagggaacggccgctctgcagaaggagctcaagcggatcaaaatcccagactattctgacagcttcaaaatcaagcacctcgggaaagggcattacagcttctatagcatggatatccgcgagttccagctgccgtcaagccagatcagcatggtgcccaacgtgggcctgaagttttccatctctaacgcgaacattaagatcagtggtaagtggaaagcgcaaaagcgctttctgaagatgtcaggaaacttcgatctctccatcgaaggtatgtcgatctccgctgacctgaagctcggatctaacccgacctcaggcaagcctacgatcaccgcctcgtcatgttcgtcgcatatcaacagcgtgcatgtccacatttccaagtcgaaggtgggttggctcatccagttgttccacaaaaagatcgaatccgcgctcagaaacaagatgaattcgcaggtttgcgagaaggtgactaattccgtttcgtcggaactccagccgtacttccagactttg

SEQ ID NO: 276682 - DNA, 660 bp, Artificial Sequence
  derived and/or modified sequence
atgggcgttcgccacccaccgtgttctcatcggctgctggcagtgtgcgcccttgtgtccctggcaaccgctgcccttttggtgaaccctggcgtggtggtccggatttcgcagaagggattggattacgcttcgcaacagggtaccgcagccctccagaaggaactgaagaggatcaagattcctgattactccgatagctttaagatcaagcatctgggaaaggggcactactctttttactcaatggacattagggaatttcaactcccaagctcacagatttccatggtgccgaacgtgggattgaaattcagcatatccaatgcgaatatcaagatttcgggtaagtggaaggcacagaagcgctttcttaagatgagcggtaactttgatctgagcattgaaggaatgagcatttcagctgacctcaagttgggttcaaatcctactagcggcaaacccacgattactgcatcctcctgttcctcacatatcaacagcgtccatgtgcacatctcaaagagcaaagtcggttggttgattcaacttttccacaagaaaatcgagtccgcattgagaaataagatgaactcccaagtctgtgagaaagtaactaactccgtgtcgtcagaacttcaaccttactttcagactctt

SEQ ID NO: 276683 - DNA, 660 bp, Artificial Sequence
  derived and/or modified sequence
atgggggtacggcaccccccatgtagtcatagactcctcgccgtctgtgctctagtttctcttgccactgctgccctcctagtgaatcctggagtcgttgtccggatatctcagaaaggacttgattatgcatcccagcaggggacagcagctctccagaaggaactaaaacggatcaaaatacccgattactctgattcattcaaaatcaaacatctgggaaaaggacactattctttttactctatggacattcgagaattccagctaccctcatcacagatctcaatggtcccaaacgttggattaaaatttagtatcagtaacgctaacataaaaataagtgggaaatggaaagcacagaaacggttcctcaaaatgtccgggaactttgatctctccatcgaagggatgtccatcagtgctgatctcaaactaggatccaatcctacttctggaaaacctacaataacagcttcttcctgcagttcacacataaattccgtccacgtgcacatcagtaaatcaaaggtagggtggctcattcagctgtttcacaaaaaaatagaatcagctcttcgaaacaaaatgaattcccaggtatgtgagaaagtcactaacagtgtgtcttctgagctacagccatatttccagacactg

SEQ ID NO: 276684 - DNA, 660 bp, Artificial Sequence
  derived and/or modified sequence
atgggtgtgcgacaccccccctgcagtcacagactcctggccgtgtgtgcacttgtgtccttagccacggcagcactactggtcaacccaggggtggtcgtgcggatctcccaaaaaggccttgattacgctagtcaacagggcactgctgctcttcagaaggagctgaaaagaataaaaatcccggattattccgactcattcaagatcaaacatcttggaaagggacactattctttttattcaatggacatacgggagtttcagctgccgagctcccagatttccatggtgcctaatgtcggcctcaagttcagtattagcaacgcaaacattaagatctctgggaagtggaaagctcaaaaacgcttcctgaagatgagcgggaattttgaccttagcattgagggtatgagtatctcagccgacttgaaactaggttccaatcccacttctggcaaacctacgatcacagcctcctcttgctcgtcccacattaattctgtgcacgtgcacatctctaagagcaaagtgggatggctgatccagttgttccataagaagatcgagtctgctctgagaaacaagatgaactcccaggtgtgcgagaaagtcacaaattccgtaagcagcgaactgcagccttatttccagaccctt

SEQ ID NO: 276685 - DNA, 660 bp, Artificial Sequence
  derived and/or modified sequence
atgggggtgcgacacccaccctgctcgcacaggcttctcgcagtgtgtgctttggtcagtctggccactgctgctctgttggttaatcccggggtggtggtcaggatatcccaaaaagggctcgattatgctagtcagcagggaactgccgcactgcagaaagaattaaaaagaataaagattccagattattctgattccttcaaaatcaaacatctcggaaaagggcactattccttttactcaatggacataagggaatttcagctcccctcatcacagatctcgatggtgcctaatgttggattaaaattttctatttcaaatgctaatataaaaataagtggaaaatggaaagctcagaaacggtttctcaaaatgtctgggaattttgatctatctatagaagggatgagtatatccgccgatcttaaactaggatctaaccctacttctggaaaacccacaatcactgcctcctcttgtagttcacatatcaacagtgtccacgtacacatatccaaatccaaagtaggatggttaatccagctctttcataaaaagatcgaatctgcccttcgaaataaaatgaactctcaggtgtgtgaaaaagtcacaaatagtgtgagttcagaactccaaccctattttcagactctg

SEQ ID NO: 276686 - DNA, 660 bp, Artificial Sequence
  derived and/or modified sequence
atgggagtgcgccacccgccttgctcgcacaggctgttggcagtatgtgctctggtgtcattggctactgctgccctgctggtgaatcccggagtcgtggtgcgaatttcgcaaaaggggcttgactacgccagtcagcagggaaccgcggcactccaaaaagagctgaagcggattaagatcccggactactcagattcgttcaaaatcaagcatttgggcaaaggccactactccttctactccatggatatcagagaattccagctcccaagctcgcagatttctatggttccgaacgtcggcctgaagttttcgatcagcaatgctaacatcaagatctcagggaagtggaaggcccagaagcgcttcctcaagatgtctggtaacttcgacctctcgatcgagggaatgtccattagcgccgatctcaagctgggatcaaatcctacgtccggtaaaccaactatcaccgcatcttcatgttcatcgcacatcaattccgtgcacgtgcatatctcgaagtccaaagttggttggctcattcagcttttccataagaagatcgagtccgcgttgcgtaacaagatgaactcccaagtctgtgaaaaggtgactaactctgtcagctccgaacttcagccgtactttcaaaccctg

SEQ ID NO: 276687 - DNA, 660 bp, Artificial Sequence
  derived and/or modified sequence
atgggagtgagacatcctccatgttcccatagacttcttgcagtgtgtgcactggtttcgttggcaaccgccgcactgcttgtgaacccgggtgtggtggtgaggatctcccagaaggggctcgattacgcgagccagcaaggtactgcagcgcttcaaaaggaacttaagcgcattaagattccggattacagcgattcctttaagatcaaacaccttggtaagggacattacagcttttactcgatggatataagagaatttcagctgccctcatcccaaatatcgatggtgcctaatgtcgggctgaagttttccatttcgaacgcaaacatcaagatttcggggaaatggaaggcacaaaagagatttctcaaaatgtccggaaatttcgatttgagcatcgagggaatgtcaatcagcgcagatctgaagttgggatccaatccaacttccgggaagcctactataaccgcatcatcgtgctcgtcccatatcaactcggtgcatgtgcatatctcgaagtccaaagtgggctggctgattcaactgtttcacaaaaagattgaaagcgcattgagaaacaagatgaactcgcaggtgtgtgagaaggtgacgaacagcgtctcgagcgaactgcaaccctactttcagaccctg

SEQ ID NO: 276688 - DNA, 660 bp, Artificial Sequence
  derived and/or modified sequence
atgggagtcagacaccccccttgttcacacaggctcctggcagtctgtgctctggtaagcctggccaccgccgccttactggtgaacccaggggttgtggtgagaatctcacagaaagggttggattatgcctcgcagcagggaaccgcagcacttcaaaaggagttgaaacgaattaaaattccagattacagcgactccttcaaaatcaagcaccttggtaagggacattattcattctattctatggacatccgagaatttcagttgccaagtagccagatctccatggtccccaatgttggacttaagttcagcattagcaatgcgaacatcaaaataagcgggaagtggaaggctcaaaagcgattcctcaaaatgagtggcaacttcgacctgtcgatcgagggtatgagcatatccgctgatctaaaattgggctctaatcccactagcggtaaacctactattaccgcaagttcctgctcatcccatatcaattcagtgcacgttcacatatcaaagtctaaagtcggctggctcattcagctgttccataagaagatagaaagcgcactgcgtaataagatgaattcgcaggtgtgcgagaaagtcacaaactcagtgtctagtgaattgcagccgtatttccaaacactg

SEQ ID NO: 276689 - DNA, 660 bp, Artificial Sequence
  derived and/or modified sequence
atgggagtgagacacccaccgtgtagtcaccgacttcttgctgtctgtgctttggtttcactggccacagcagctctgttagtcaatcctggagttgttgtaagaatttcacaaaaaggacttgactatgcatcccagcagggaacagctgcccttcaaaaggaattgaaacggattaaaattccagattactcagattcgtttaaaattaaacatcttgggaaaggacattatagtttttatagtatggatatccgagagtttcaattaccatcgagtcaaattagcatggttccaaatgttggattgaaattcagtatctcaaacgccaatatcaaaatctccgggaaatggaaagctcaaaaaagattcctcaaaatgtcgggaaacttcgatttgagtattgagggtatgtcaatttcagcagatctcaaattggggagtaatccaactagtggcaagccaactatcacggcgtcctcttgttcgtcccacattaatagtgttcatgttcatatttccaaaagcaaggtgggatggctcatccaactgttccataaaaaaattgaatcagccctgcgtaataaaatgaacagtcaggtatgcgagaaagttacgaattcggtctcttctgaattgcaaccctatttccagactctc

SEQ ID NO: 276690 - DNA, 660 bp, Artificial Sequence
  derived and/or modified sequence
atgggcgtgaggcaccctccatgctcccaccgactgctagctgtgtgcgccctagtttcgctggcaaccgctgccctgctggtgaatcccggtgtggtggttaggattagtcaaaaagggctagactacgcttctcagcaaggtactgcggccctgcagaaagagttgaaacggattaagatcccagactacagcgattcttttaagataaaacacttgggaaaaggccattactccttttactctatggatattagggagtttcagcttccctcgtcccagatcagcatggtgccaaacgtgggactcaagttttcgatcagtaacgccaacatcaagatcagtggcaaatggaaggctcagaaacggtttctgaaaatgtcggggaattttgatctcagtattgagggcatgagcattagcgctgacctcaagcttgggtctaatcccacaagtgggaaacccactatcacagcatctagctgcagttcccatatcaactccgtgcatgttcacatatccaagtctaaggtggggtggctgattcagttgttccacaaaaaaattgaatccgctctgcggaacaagatgaactcccaggtgtgcgagaaagttactaatagtgtgtcttccgagctgcaaccatattttcagactctg

SEQ ID NO: 276691 - DNA, 660 bp, Artificial Sequence
  derived and/or modified sequence
atgggcgttcggcacccgccttgcagccatcgcttgttggccgtgtgcgcactggtgtccctggctactgcagcactgctggtgaacccaggcgtcgttgtgcggatctcacagaagggactggactacgcttcccagcaggggactgcagcccttcagaaagaactgaaacgaataaagatacctgactattccgacagctttaagatcaagcacctgggaaagggacactactcgttctacagcatggatatccgcgagttccagttgccctcgtctcaaatcagcatggtgcccaatgtgggactgaagttctcgatttcaaacgccaacatcaaaatctccgggaagtggaaagctcaaaagcggttccttaagatgtcgggaaacttcgacctctcaatcgaaggcatgtcgatctccgcggatctgaaactcggatctaacccgacctcaggcaagccgactatcaccgcctcatcgtgttctagccacatcaatagtgtgcacgtccatatttctaaatcgaaggtgggctggcttatccagctgttccacaagaagattgagtcggccctgcgcaataagatgaatagccaagtgtgcgaaaaggtgacgaattccgtgtcctcggaactgcagccgtactttcagactctg

SEQ ID NO: 276692 - DNA, 660 bp, Artificial Sequence
  derived and/or modified sequence
atgggagttaggcaccctccgtgctcacaccgcctcctcgccgtgtgcgctctggtgtcactggcgaccgctgccctcctcgtgaacccgggcgtggtggtccgcatcagccagaagggactggactatgcctcacaacagggcactgcggccctgcagaaggaactgaaacggatcaaaatcccggactactcggacagcttcaagatcaaacacctgggaaagggacactactcgttctacagcatggatattagagagtttcaactcccgtcgagccaaatctccatggtcccgaacgtgggtctgaaattctctatctccaacgccaacatcaagatcagcggaaaatggaaggctcagaaacggttcctgaagatgtcaggcaatttcgacctgagcattgaaggaatgagcatttccgcggatctcaagctcggaagcaatccgacctccggcaagccgactattaccgcatcgagctgctcgtctcatatcaattcagtgcacgtgcatatctcgaagtcaaaagtcggttggctcatccaactcttccataagaagattgaatcagcgctgagaaacaagatgaacagccaagtctgcgaaaaggtcaccaactcggtttccagcgagctgcagccatacttccagaccctc

SEQ ID NO: 276693 - DNA, 660 bp, Artificial Sequence
  derived and/or modified sequence
atgggcgtgcgccaccccccctgcagccacagactcttagccgtttgcgccctcgtctcgctagcgacagccgccctcctggtcaaccccggagtggtcgtgcgcatttctcaaaagggcctcgattatgcgtcacagcaaggaacagccgcacttcagaaggaattgaagaggattaagatcccggattatagtgattccttcaagatcaagcacctgggcaagggccactacagtttttactcgatggacattcgcgagttccaactgccatcgagtcaaattagtatggtgccaaacgtcggactgaagttctccatcagcaatgcgaatataaagatctcgggcaaatggaaggctcagaagcgcttcctcaagatgtcgggcaactttgacctttcgatcgaagggatgagcatttcggctgacctgaagctaggttccaacccaacgagtggaaagccgacaatcaccgccagtagctgtagtagccacatcaatagcgttcacgtccatatatccaagtcaaaggtcggttggttaatccaactgtttcacaagaagattgagtcagccctccgcaacaagatgaactcgcaagtgtgtgagaaggtgaccaacagtgttagttctgagctgcaaccatactttcaaacgctg

SEQ ID NO: 276694 - DNA, 660 bp, Artificial Sequence
  derived and/or modified sequence
atgggagtgcgtcaccctccatgcagccatcggctgctggcagtgtgcgcgttggtgtcacttgcaacggcagcactgcttgtgaaccccggagtggtcgttaggatttcccagaagggccttgactacgcctcgcagcaaggtaccgcagcacttcaaaaggagctcaagcggattaagattcctgattacagtgactcttttaagattaaacaccttggaaaaggtcactactcgttttactccatggatatccgtgaatttcaacttccttcgtcccagatttccatggtgcctaacgtgggccttaagttttcgatatccaacgcgaacattaagatttcagggaagtggaaggctcagaagagatttcttaagatgagcggaaacttcgacctgtccatcgaaggcatgagtatttcggcagaccttaagctcgggtcaaatccaacttctggtaaaccaactattaccgcctcgtcctgttcatcgcatatcaactcggtccatgtccatatctccaaatcaaaagtcggctggctgatccaactctttcacaagaagatcgaatcagccctgagaaacaagatgaactcgcaagtgtgcgagaaggttactaattcagtgtcatcagaattgcagccatactttcaaaccctt

SEQ ID NO: 276695 - DNA, 660 bp, Artificial Sequence
  derived and/or modified sequence
atgggtgtgagacaccctccctgctcacatagacttcttgcagtctgtgcactcgtgtcgctcgccaccgccgcccttctggtcaatcccggtgtggtggtgcgcatcagccaaaagggacttgattacgcaagccagcagggcactgcagcacttcaaaaagaactgaagagaattaagattccggactattccgattcattcaagataaagcatctcggtaagggtcattattcattctactcaatggatatccgagaattccaacttccttcctcccaaatcagcatggtgccaaacgtcggcctgaagttcagcatcagcaacgcaaacatcaagatatctggtaagtggaaagctcaaaagcggttcctcaagatgagcggaaacttcgacctgagcatcgagggaatgtccatttcggcggatctgaaactgggatccaatccaacctcaggcaaacctaccataaccgcgtcctcgtgctcaagccacatcaattcggtgcacgttcatatctccaaatcaaaagtgggttggctgatccaactttttcataagaaaattgagtcggcgttgcgaaataagatgaactcccaggtctgcgagaaagtgactaactccgtgtcatcagaactccagccatacttccagactctg

SEQ ID NO: 276696 - DNA, 660 bp, Artificial Sequence
  derived and/or modified sequence
atgggagtgcgccacccgccatgcagccaccggctgttggctgtgtgcgccctggtgtccctggccactgccgcccttctggtgaacccaggagtcgtggtcagaatctcccaaaagggcctggattacgcttcacagcaaggcaccgcagccctgcagaaagagctgaaaagaataaagatcccggattacagcgactcgtttaagattaaacacttgggaaagggtcattattccttctactccatggacattcgcgaatttcagcttccctcgagccaaatctctatggtgcctaacgtgggtcttaagttctcgatctccaacgcgaacatcaagatttcgggcaagtggaaggcccaaaaacgcttcctcaagatgtcgggaaacttcgatctctcgatcgaaggaatgtcgatctctgcagacctgaagctggggtccaacccgacttcggggaagccgacgattaccgcgagctcctgttcttctcatatcaattcagtacatgtccacatctcaaagtctaaggtcggatggctcatccaactcttccacaagaaaatcgagtcggcgctgcgcaacaaaatgaattcacaggtttgcgagaaggtgaccaattcggtgtcctccgaactccagccctacttccagactctg

SEQ ID NO: 276697 - DNA, 660 bp, Artificial Sequence
  derived and/or modified sequence
atgggagtgaggcatccgccttgttcgcatcggcttctcgcggtctgcgcgctcgtctccctggctaccgccgctctgctggttaaccccggcgtggtggtcagaatttctcagaagggcctggattacgcgtcccaacaaggcacggccgctctccagaaggaactcaaacggatcaagatcccagactactcagattcctttaagatcaagcacctgggcaagggtcactactcattttacagcatggatatccgcgagttccagttgccttcatcgcaaatctcaatggtcccgaatgtcggcctgaaattctcgatcagcaacgcaaatatcaagatctcagggaaatggaaggcccagaagcgctttctcaaaatgtcaggcaatttcgacctgtccatcgaggggatgtccatctcagcggacctgaaactcggatccaacccaacctcaggcaaaccgaccatcactgcttcctcgtgcagcagccacataaactctgtgcatgtccatatttcgaagtcgaaggtggggtggttgatccagctgttccacaagaagattgagtctgcccttcgcaacaagatgaactcccaagtgtgcgaaaaggtgactaattctgtgagcagcgaactgcagccctatttccaaactttg

SEQ ID NO: 276698 - DNA, 660 bp, Artificial Sequence
  derived and/or modified sequence
atgggagttcggcaccccccctgtagccacaggctgctggccgtgtgtgcccttgtgtctttagccaccgccgcgctgctcgtgaaccctggcgtggtggtgcgcataagccagaagggactagattacgcatctcagcaagggactgctgccctgcagaaggagctcaagcgtatcaagatccctgactatagcgacagttttaagattaaacatctagggaaaggtcactactcattctactctatggatattcgtgaatttcagctgccttcttctcaaatctctatggttccaaacgtggggttgaagtttagcatctcaaacgcgaacattaagatatcaggaaagtggaaagcccagaagcgatttctgaagatgtcagggaactttgatctgagtatcgagggcatgagtatttcagcggacctgaaattgggcagcaaccctacctcaggaaagccaaccatcacggcgagttcgtgtagtagccacatcaattcggtacacgtccacataagtaaatccaaggtcggttggttgattcagttgttccataaaaaaatagagagtgcactgaggaacaagatgaatagccaagtctgtgaaaaagtcactaatagtgtgtcttccgagctgcaaccctacttccagacactc

SEQ ID NO: 276699 - DNA, 660 bp, Artificial Sequence
  derived and/or modified sequence
atgggagtcagacatccaccatgttcccacagattgcttgcggtgtgtgccctggtgtcacttgctaccgccgcacttctcgtaaatcctggtgtggtcgtgcgtataagccagaaaggcttggactacgcatcacaacaggggacggcagctctgcaaaaagagctgaagaggataaagattcccgattacagcgactcctttaagatcaaacatcttggtaagggacattattccttctacagcatggacatccgggaatttcaactcccctcgtcgcaaatttccatggtgccgaacgtgggactgaagttctcgatttccaacgctaacatcaagatttccggtaaatggaaggcacaaaaacgcttccttaagatgtccgggaattttgacctgagcattgagggaatgtcgatttcggccgacctcaaacttgggagcaaccctacctccggtaagccgaccattaccgcgtcgtcatgctcttcacatatcaacagcgtgcatgtgcacatttcgaagtcgaaggtcgggtggcttatccagttgtttcacaaaaagattgaatctgcactgcggaacaaaatgaattcgcaggtctgtgaaaaggtgactaattctgtttcttcggaacttcaaccttacttccagacgctt

SEQ ID NO: 276700 - DNA, 660 bp, Artificial Sequence
  derived and/or modified sequence
atgggagtcagacatcctccatgctcacatcgactgcttgcagtctgcgccttggtgtcccttgcaaccgcagccctgttggtgaaccccggagtggtggtccgaatatcgcaaaaagggctggattacgcgtcgcaacagggtaccgccgcgcttcagaaagagcttaagaggatcaaaatccctgattactcggattcgtttaagataaaacacctgggcaaaggtcattactcgttctactctatggacattagggaattccaactgccctcgagccaaatctcgatggtgcctaacgtgggacttaagttttccatctctaatgcaaacattaagatttcgggaaagtggaaggcacagaaacggtttctgaagatgtcaggcaattttgatctctcgattgaagggatgtccatatcagcagacctcaagctgggctccaacccaactagcggaaagccaactattacggcaagctcgtgtagctcacatatcaactcggtccatgtgcacataagcaagagcaaggtgggttggttgatccagctgtttcacaagaaaatcgaaagcgcgcttaggaacaagatgaattctcaagtttgtgagaaagttactaattcagtgagcagcgaactgcagccttatttccaaaccctc

SEQ ID NO: 276701 - DNA, 660 bp, Artificial Sequence
  derived and/or modified sequence
atgggagtgaggcatcctccctgctcccataggctcctggcagtctgcgcgctggtgagcctggcaactgcagcactccttgtgaaccctggtgtcgtcgtgcggatttcacagaagggtctggattacgcatcacaacagggtaccgccgcacttcaaaaagaactgaagagaatcaagattcctgattactccgattcgttcaagattaagcatcttggtaagggacactatagcttctactcaatggatatcagggaatttcaactcccctcgtcccaaatctcgatggtgccgaacgtgggtctgaagttctctatctcgaatgcaaacatcaagatatctggtaagtggaaggcgcagaagcgctttcttaagatgtcgggaaactttgaccttagcattgaaggaatgtccatctcggcagacctcaaattgggatcgaatccaacctccggaaaaccgaccatcacggcctccagctgtagctcacacattaactctgtccatgtgcatatctccaagtcaaaagtgggttggctcatccagctctttcataagaagatcgaatcggcacttagaaacaaaatgaacagccaagtgtgcgagaaagtcactaattccgtgtcgagcgaactgcaaccctactttcagactctg

SEQ ID NO: 276702 - DNA, 660 bp, Artificial Sequence
  derived and/or modified sequence
atgggagtgaggcatccaccttgtagtcatagactgctggctgtttgcgctctcgttagtttggcaactgctgctctcctggtgaaccctggagttgtggttcggatttctcagaaggggttggactacgcttcacagcaggggaccgccgcactgcagaaggagctgaaaaggatcaaaatccccgactattccgactccttcaaaataaaacacctcgggaagggacactattcattttactccatggacatcagggagttccaactgccaagtagccaaatcagtatggtcccaaatgtcgggctgaagttttccatctctaatgccaatatcaagatcagcggaaagtggaaggcccagaaacggtttctcaaaatgtctggaaactttgacttgtcaatcgaaggaatgtcaatcagcgctgatctcaaattggggtcaaatccgacctccggaaagccaacgatcacagcatcttcctgctctagtcacataaactctgttcacgtacacataagcaaatctaaagtcggctggcttattcagctgttccacaaaaagatcgaaagcgccctccgaaacaagatgaactctcaggtctgcgagaaggtgaccaattccgtttctagcgagttgcagccctactttcaaaccttg

SEQ ID NO: 276703 - DNA, 660 bp, Artificial Sequence
  derived and/or modified sequence
atgggagtgcgccaccctccctgcagccacagactactggcagtttgtgcactggtgtctctggctactgcagcgcttcttgtaaaccccggtgtcgtggtacggatctcccagaagggcctcgactacgcttctcagcaggggaccgcagcgttacaaaaagagctcaaaagaattaaaatcccggactattcagattccttcaagattaaacatctggggaaggggcactatagcttctattccatggatatacgcgaatttcagttgccctccagtcaaatcagtatggtgcctaatgtcgggctgaagttcagcatatcgaatgcaaatatcaaaatatctggcaagtggaaggctcaaaaaagattcctaaagatgtccggaaactttgatttgtctatagaagggatgtcaatatcagcggatctgaaactcggctcaaaccccacatctggtaagcctaccatcactgcgagctcatgttccagccacatcaattcagtacatgtccatatctccaagagcaaagtcggttggttaattcagttgtttcacaagaaaattgagtcagctttgcgcaataaaatgaacagtcaggtgtgtgagaaggtcacaaactcagtgtccagtgaactccagccttacttccagacactc

SEQ ID NO: 276704 - DNA, 660 bp, Artificial Sequence
  derived and/or modified sequence
atgggcgtccgccaccccccctgtagccatcggctgctggcggtgtgcgccctggtgtccctcgctaccgcggccttgctggttaatcctggagtggttgtaaggatctctcagaagggactggactatgcgtcacagcaaggcacagcagccctgcagaaggaactgaagaggattaagatccccgactacagtgattcctttaagataaaacacttgggcaagggacactattccttttacagcatggatattcgggaatttcagctgccttcctctcagattagcatggtgcccaacgtggggctaaagttttctatcagtaatgcaaatatcaaaataagcggaaaatggaaggcccagaagcggttcttgaagatgtccgggaattttgatctcagtattgagggaatgagcatttccgccgacctgaagctgggcagtaatcccacatcaggcaagcctaccataacggctagtagctgttcctctcacataaatagtgtccacgtgcacatatctaagagcaaggtcgggtggttgattcagctgtttcataagaagatcgagtcggctcttcgtaacaagatgaactcacaggtgtgtgaaaaagtcactaatagcgtgagctccgaactacagccctacttccagacgtta

SEQ ID NO: 276705 - DNA, 660 bp, Artificial Sequence
  derived and/or modified sequence
atgggtgttcgccaccctccttgcagtcacaggctcctggctgtgtgcgccctcgtgagcttggctactgctgccttgttggtcaaccccggagtggtggttaggatttcccaaaagggactggactacgcctcccaacagggaaccgcagctcttcaaaaggaactgaagcgcatcaaaattcccgactatagcgattccttcaagattaaacacctggggaagggccactattctttctattctatggatatccgagagttccaactgccttcctctcagatttcaatggttcctaatgtcggacttaaattttccatcagcaatgccaacatcaaaattagcggtaagtggaaggcccaaaagagatttctcaagatgagcggtaactttgacctctctattgaaggcatgtcaatctccgccgatttgaagctcggatctaatcctacctctgggaaacctacaattactgcaagcagttgctcctcccacataaacagtgttcacgtgcacataagtaagagtaaggtaggatggttgatccagctgttccataaaaaaatcgaaagtgccctgcgaaataagatgaactcccaggtgtgtgagaaagtgaccaacagcgtcagctccgaactccagccttacttccaaaccctt

SEQ ID NO: 276706 - DNA, 660 bp, Artificial Sequence
  derived and/or modified sequence
atgggggtgcgccatccaccctgtagccaccggctgctagccgtttgcgcacttgtaagtttggcaactgctgcactcttagtgaacccaggggtggtggtaagaatatcccagaaaggactggactacgcgagtcagcagggaacggccgcgttgcaaaaagaattgaagagaatcaagattcctgattactccgacagcttcaaaattaaacatctgggaaaaggtcactactccttttattccatggatatcagggaatttcagcttccgtctagtcagatctccatggtcccaaatgtgggacttaagttcagtatctctaacgccaacatcaagatctctggcaaatggaaggcccagaagcgcttcctaaaaatgagcggaaacttcgacctgagtatagaaggcatgagcatatcagctgacctgaagctgggatcgaatccaacctctggcaagcccaccataaccgccagtagctgctctagtcacattaattcggtgcatgtgcacattagcaagtccaaggtggggtggcttatacagctgttccacaaaaaaatcgaaagtgccctgagaaataagatgaatagccaggtgtgcgagaaggtgaccaattccgtttcttcagagctgcagccttatttccagacattg

SEQ ID NO: 276707 - DNA, 660 bp, Artificial Sequence
  derived and/or modified sequence
atgggggtgcggcatcctccgtgctcgcatcggctcctggcagtgtgtgccctggtgtcactggcgacggcggccctcctggtgaacccgggagttgtagtgcgcatctcccagaagggcctggattacgctagccaacaggggaccgccgcgctccagaaggaactcaaacggattaagattccagattacagcgatagtttcaagattaagcatctgggaaagggccactattcattctactctatggacatcagagaatttcaactcccgagttcacagatctcgatggtgccaaatgtcggtctgaagttttcaatcagcaacgcgaacattaagatcagcggaaagtggaaggcgcagaagcgattcttgaagatgagcggaaacttcgacctgtcaatcgagggtatgtccatctccgccgatctcaagctcggatcgaatccaactagtggcaaaccgactatcaccgcttcgtcatgctcctcgcacatcaactcggtgcacgtccatatttcgaagtccaaggtcggatggttgatccagctgtttcacaagaaaatcgagtcggcactccgcaacaaaatgaattctcaagtgtgtgaaaaggtcaccaattccgtgagctcggagctccaaccgtacttccaaaccttg

SEQ ID NO: 276708 - DNA, 660 bp, Artificial Sequence
  derived and/or modified sequence
atgggagtcaggcaccctccctgttcccaccgcttgcttgcagtgtgtgctctggtgagcctcgcaaccgcagcccttctcgtgaaccccggcgtcgttgtaaggatcagtcagaagggattagattacgcatctcagcaaggcactgccgcccttcagaaggagctgaagaggattaagatcccggactactctgatagctttaaaattaaacacctgggtaagggtcattactcattttactctatggacatccgggaatttcagctcccgagttcacaaatttccatggtgcctaacgtaggattgaagttttctattagcaatgcgaacatcaaaatttcgggcaagtggaaagcccagaagcgctttctgaagatgtccggcaactttgatctcagtatcgaagggatgtcaatttcagctgatctaaaattagggagcaacccgacaagcggcaagccgaccattacagcaagcagttgcagtagtcacatcaattccgtccacgttcacataagtaaatccaaagtgggctggttgatccagttgttccacaagaagatagagagtgctcttagaaataagatgaacagccaggtctgcgagaaagtgacaaattccgtgagctccgagctgcaaccttacttccagactctg

SEQ ID NO: 276709 - DNA, 660 bp, Artificial Sequence
  derived and/or modified sequence
atgggcgtgcgccaccccccctgctctcaccggcttcttgcggtgtgtgccttagtcagcctagccacagcagcactgctggtgaaccctggggtggtagtgcggatctcacagaaagggctagactacgcaagccagcaggggaccgccgctttacagaaggagctcaagagaattaaaatccccgactattcagactcctttaagataaaacatctgggaaaagggcattactctttttattccatggacattcgtgaattccagctgcccagttcccagatctcaatggtgcccaacgtgggactgaagttcagcatctctaacgccaatatcaagataagtggcaagtggaaagcccagaaaagattcctgaagatgagcggtaatttcgatctttccatcgaggggatgtcaatcagcgcggatttgaaactcgggtctaaccccactagtggcaagcctacgatcacggcgtctagttgtagttcccatattaatagcgttcatgtgcatatctccaagtccaaagtgggctggttgatccaactcttccataaaaagatcgagtccgcactcaggaataaaatgaatagccaggtctgcgagaaggtaacgaactcagtgtcttcggaactgcagccctactttcagacactc

SEQ ID NO: 276710 - DNA, 660 bp, Artificial Sequence
  derived and/or modified sequence
atgggtgtcagacatccaccgtgtagccacagacttctggctgtgtgcgcactcgtgtcactggcgacggctgctctgctcgtgaaccctggagttgttgtgcgcatcagccaaaagggacttgattacgcaagtcagcaaggcaccgcagcgctccagaaggagctgaagcggataaagatcccagactattctgactcattcaagattaagcacctaggaaaaggtcactatagtttctactccatggacatccgggaatttcagctgccttcctcccagatctcaatggtaccaaacgttggattgaagttctcgatcagcaacgccaacataaaaataagcggaaaatggaaagcacagaagagattcctgaaaatgtccggcaatttcgacctcagcatcgaaggaatgagtatctctgcggatttgaagcttggaagcaaccctactagtggaaaacctactatcacggcaagtagctgttcaagccatatcaattccgtccacgttcacatttcaaaaagcaaggtaggatggttgatccagcttttccacaaaaaaattgagtctgcattgagaaacaaaatgaacagccaagtttgcgagaaggtgaccaactctgtcagcagtgagctgcagccatacttccagacattg

SEQ ID NO: 276711 - DNA, 660 bp, Artificial Sequence
  derived and/or modified sequence
atgggtgtgagacaccctccctgctcacaccgcctgctggcagtgtgtgcgttggtgtccctggcaactgcagcactcctggtaaaccccggcgtagtcgtgcggatttcacaaaagggacttgattacgcatcccagcaaggtaccgccgcccttcagaaggaacttaagcggataaagataccagattatagcgactcatttaagattaaacatcttgggaaaggacattactcattttactcaatggacataagggaattccagcttccgtcgtcgcaaatttcgatggtgccaaacgtgggactcaagttttctatttcgaacgctaatatcaaaatctcgggtaagtggaaggctcaaaaaagatttctcaagatgtcgggtaactttgatttgtcaattgaggggatgagtatctcggcggatttgaaactcgggtcaaatccaactagcggcaagcctactatcaccgcatcttcctgttcatcccacatcaactcggtccatgttcatatatcgaagtccaaagtcggatggctcattcaacttttccacaagaagatcgaaagtgcactcaggaataagatgaacagccaggtctgcgaaaaggtgacgaacagcgtctcgagcgagcttcagccttacttccaaaccctt

SEQ ID NO: 276712 - DNA, 660 bp, Artificial Sequence
  derived and/or modified sequence
atgggtgtcagacacccgccatgctcacacaggttacttgctgtctgtgcactcgtttcgttggcaacagccgctttattagtgaaccctggtgtcgtggtcaggatttctcaaaaaggcctggattatgcttctcagcaaggaactgctgccttgcaaaaggaacttaagagaatcaagatcccggattactctgattctttcaaaatcaaacacctaggtaaaggtcattactctttctactccatggatatcagagaatttcagcttcccagttcccaaatttcaatggttccaaatgtgggccttaaattctccatttcaaatgctaatattaaaatcagtggcaaatggaaggcacaaaagagattcctcaagatgtcaggtaacttcgacctttcaatagagggcatgagcattagcgcagatttgaaattaggtagtaaccctacctccgggaagccaactatcacagcttcctcgtgctcttctcatataaactctgttcacgttcatatatctaagagcaaggttggttggctcatccaattattccataaaaaaattgagtcagctctcaggaacaagatgaactcacaagtgtgtgaaaaagttacgaatagcgtgtcatcagaacttcaaccatattttcagactctt

SEQ ID NO: 276713 - DNA, 660 bp, Artificial Sequence
  derived and/or modified sequence
atgggagtgcgtcaccccccttgtagccaccgattgctggctgtctgcgccctggtttcgcttgctacagcagcgttgctggtgaaccctggcgtggtggtgaggatcagccaaaagggtttggattacgcgtcgcagcaaggtactgcggctctacagaaggagctcaagcgtatcaagatccccgactactccgactcgttcaagatcaagcatctggggaagggtcactacagtttttactccatggacatccgtgagttccagctgcccagcagtcaaatctcgatggtcccgaacgtcggccttaagttttccatttctaacgccaacattaagatttccggtaagtggaaggcccagaagcggttcctgaagatgtccggtaacttcgatctgagtatcgagggtatgtctatctcggcagacctcaagctcggttccaaccccacttccggcaagcctacaatcaccgccagctcatgcagctcgcatatcaacagcgtccacgtccatatctccaagtctaaagtcgggtggctcattcaactgttccacaagaagatcgagtccgccctgcggaacaagatgaacagccaagtgtgtgagaaggttactaactccgtcagcagcgagctgcagccctacttccaaaccctc

SEQ ID NO: 276714 - DNA, 660 bp, Artificial Sequence
  derived and/or modified sequence
atgggcgtacggcatcctccatgctctcatagactcctagctgtctgtgcgttggtgagcctagccaccgctgcccttttggtaaatcctggcgttgtagtgaggattagccagaagggcctcgattatgccagtcagcagggtaccgccgcactgcagaaagagctgaagagaattaaaattcccgactacagcgattcttttaaaatcaaacacctgggcaagggtcactactctttctatagcatggacattcgggagtttcaactcccctcctcccagatttccatggtacccaatgtgggtctgaagttttccattagtaatgccaacataaaaatatctggcaagtggaaggctcagaaacgcttcctgaaaatgtccggaaactttgacttgtctattgaaggcatgtcaatcagcgccgatctgaaacttgggtctaacccaacatcaggcaaacccacgatcacagcctctagttgctccagtcacataaactccgtgcatgtccatatcagcaagagcaaagtcggatggctcatacagttgttccacaaaaaaattgagtccgctctgcgtaataaaatgaacagtcaggtttgcgagaaagtgaccaattccgtgagctctgaactgcagccttactttcaaactctg

SEQ ID NO: 276715 - DNA, 660 bp, Artificial Sequence
  derived and/or modified sequence
atgggcgtccgccatcccccgtgctcacatcgcctcctcgccgtctgtgctctcgtttcgcttgcaaccgccgcactcctcgttaatccaggagtggtcgtgagaatctcacagaagggcctggattacgcgtcgcagcaaggcactgccgcgctgcagaaggaactgaagagaatcaagatcccggattactccgacagctttaagatcaagcatctggggaagggacattatagcttctactctatggatatccgcgaattccaactgccgtccagccagatctcaatggtgccaaacgtgggactgaagttttccatatccaacgcgaacattaagatctcggggaagtggaaagcacagaaacggtttctgaagatgagcggaaacttcgacttgtccatcgagggaatgtcgatcagcgccgacctgaagttgggaagcaatccaaccagcggtaagccaacgatcaccgcgagctcgtgctcgagccatatcaattcggtccacgtccacatttcgaagtcaaaggtgggatggctgattcaactcttccacaagaagatcgagtcggccctgcgcaacaagatgaattcgcaagtttgcgaaaaggtgaccaattcggtgtcctccgaactccagccttactttcaaactctg

SEQ ID NO: 276716 - DNA, 660 bp, Artificial Sequence
  derived and/or modified sequence
atgggagtaagacacccaccatgtagtcatagattattagcagtttgtgcattagtttctttagctactgcagcattattagttaatccaggagtagttgtaagaatctcacaaaaaggtcttgactatgcatctcaacaaggtacagcagcacttcaaaaagaattgaaacgtattaaaattccagattatagtgattctttcaagattaaacatttaggaaaaggacattatagtttttatagtatggatattcgtgaattccaattaccttcatcacagatttcaatggttcctaatgttgggttaaaattctcaatttcaaacgcaaatattaagatttctggtaaatggaaggcacaaaaaagatttttaaaaatgagtggaaattttgatttaagtattgaaggtatgtctatctcagcagatttaaagttgggaagtaatccaacttcagggaaacctacaattacagcaagttcatgtagtagtcatattaatagtgttcatgtacatatatctaaatcaaaagttgggtggttaattcaattatttcataagaaaattgaaagtgcattgagaaataaaatgaattcacaagtttgtgagaaagttactaatagtgtaagttcagaattacaaccatattttcaaacttta

SEQ ID NO: 276717 - DNA, 660 bp, Artificial Sequence
  derived and/or modified sequence
atgggtgtgcgccatccaccctgtagccatcgactcctggctgtttgcgcactcgtgtccctggcaactgcagcgctcttggtcaatcccggagtcgtggtgaggatctcacagaaagggctggactacgcatcgcaacagggcaccgccgccctccagaaggaactgaagagaatcaaaataccagattatagcgattcgttcaagattaagcatctcggaaagggacattacagcttctacagcatggatatccgtgagttccaacttcccagctcgcaaataagcatggtcccaaacgttggactgaaattctctatttcaaatgcaaacattaagatcagcggaaagtggaaggctcaaaagcgctttctgaaaatgtccggtaacttcgatctgtccatcgaaggaatgtccatttcagctgatctgaagctgggctcgaacccaacgtccggaaagcctaccattactgcatcgtcgtgctcctcccatatcaactccgtgcatgtccatatctcgaagagcaaggtgggttggctgattcaactgttccataagaaaatagaatcggcgcttcgcaacaaaatgaattcccaggtctgtgaaaaagtgactaactcggtatcctccgagcttcaaccttactttcaaaccctt

SEQ ID NO: 276718 - DNA, 660 bp, Artificial Sequence
  derived and/or modified sequence
atgggagtgagacaccccccatgttcccaccggctccttgctgtttgtgcacttgtgagcctcgctactgcagcacttcttgtgaaccctggagttgtggtgagaatttcgcagaagggcttggattacgcctcacagcagggcacagcagctttacagaaagagctgaaacgcatcaagattccggattattctgacagtttcaagatcaagcacctggggaaagggcattattccttttattccatggacatccgcgagttccagctgccatctagccagatcagcatggtgcctaacgtgggcctgaagttttcaatttctaatgcaaacatcaagatctcgggaaaatggaaggcgcagaagcggtttctgaagatgtccggaaactttgacctttctattgaaggaatgagcatttccgccgacctgaaattgggaagcaatcccacatcaggcaagccaactattacggcctcatcgtgttccagtcacattaactccgtccacgtacacatctccaaatctaaggtcggatggttgattcagctcttccataaaaagattgaatcggccttgcggaataagatgaatagccaggtgtgtgagaaggtaacaaactccgtgagtagtgagctgcagccttactttcagactctg

SEQ ID NO: 276719 - DNA, 660 bp, Artificial Sequence
  derived and/or modified sequence
atgggagtgagacatcctccctgctcgcatagactgctggcagtgtgcgcccttgtgtccctggccactgccgccctgctggtgaaccccggggtggttgtgagaatctcacagaagggcctcgattacgcgtcccagcagggaaccgccgccctccagaaggagctgaaacggattaagatcccggactactcagactcgtttaagattaagcacttgggtaaaggacattactccttttactctatggacatccgggagttccagcttccatcgtcacagatcagcatggtgccgaatgtgggcttgaaattcagtatctcgaacgccaacatcaagatcagcgggaagtggaaagcacagaagcgttttctgaaaatgtcaggaaacttcgacctgtccatcgagggcatgtccatctcggcggatctcaagctgggctccaacccgacttcgggtaagccgaccatcactgcttcgtcgtgctcatcccacatcaattccgtgcacgtccacatttcaaaatctaaggttggatggcttatacaactgttccacaagaaaattgagtcagccctgcggaataagatgaatagccaggtgtgtgaaaaagtgactaattcagtctcctcagaactgcaaccatacttccaaacgctg

SEQ ID NO: 276720 - DNA, 660 bp, Artificial Sequence
  derived and/or modified sequence
atgggcgtgcgccacccgccatgcagccatcgcttgctggctgtgtgtgcgctggtgtcactggccactgccgccctgttggtgaatcctggagtggtggtgcgcatatcgcagaagggcctcgattacgcgagccagcagggcaccgcagctttgcaaaaggaactgaagagaatcaaaattccggactattccgattcattcaaaatcaaacatctggggaaaggccattactccttttactccatggatatcagagaattccaactcccgagctcacagatcagcatggtcccaaacgtcggcctgaagtttagcatttcgaatgcgaacatcaagatctcaggaaaatggaaagcgcaaaagcgcttcctcaaaatgtcgggtaacttcgacctttctattgaaggtatgtcaatctcggcggatctgaagctggggtctaatccgactagcggaaagcctacgatcaccgcgtcgtcctgcagctcccacattaacagtgtccatgtgcacatcagcaagtccaaagtgggatggcttatccaactcttccacaagaagatcgagtccgctctgaggaacaagatgaattcccaagtgtgtgaaaaggtcactaattccgtgtcatccgaactgcaaccgtactttcaaacgctc

SEQ ID NO: 276721 - DNA, 660 bp, Artificial Sequence
  derived and/or modified sequence
atgggcgtgcgccacccaccatgcagtcatagactgctcgcagtgtgtgcactggtatctcttgcgactgccgcactgctcgtcaaccccggcgtagttgtgagaattagccaaaagggactagactacgccagccagcagggaacagcagcgctccagaaggaattgaaaagaatcaagattcctgattattcagacagtttcaagattaaacacctgggcaaggggcactattctttttactctatggatatccgagaattccagctcccctcctcccaaatctccatggtacctaacgtcggtttgaagttctcaatcagcaacgccaacattaagatttccggaaaatggaaggcacagaaacgatttttaaaaatgtccggcaactttgacctgtctatcgagggtatgtcaatcagtgcagatctgaagctgggatcaaaccccacaagcggtaaaccaaccatcactgcatcctcatgtagctcccatattaactcagtgcacgtgcatatttctaagtctaaagtgggttggctgatacaactcttccacaagaaaatcgagtccgcacttagaaacaagatgaactctcaggtgtgtgagaaggtgacaaactccgtttcctccgagctccagccctatttccagactctt

SEQ ID NO: 276722 - DNA, 660 bp, Artificial Sequence
  derived and/or modified sequence
atgggagtacgccacccaccgtgcagtcaccggcttctggcggtgtgcgctctggttagcctagcgactgccgctctcctcgttaacccaggtgtggtcgtccgcatttctcaaaagggactggattacgctagccagcaaggaacggctgcattacaaaaggaactgaagcggatcaagattcccgattacagtgatagtttcaaaattaagcacttaggtaaaggacattatagtttttatagtatggacatccgcgagttccagctgccttcaagccaaatttccatggtgcctaacgtgggcctcaagttcagcatatcgaacgctaacatcaaaatcagtggcaagtggaaagcccaaaaacgtttcctgaagatgtccggtaatttcgatttaagtattgagggcatgtcaatttcagcagatcttaagttaggttccaatccaacaagcggcaaaccaactattacagcgagctcgtgtagctctcatataaactcagttcacgtgcacatatctaaaagcaaggttggttggctgatccagctgtttcataaaaagattgagagcgcactgaggaataagatgaacagtcaagtgtgtgagaaagtaactaattcagtctctagcgagcttcagccatactttcaaaccctc

SEQ ID NO: 276723 - DNA, 660 bp, Artificial Sequence
  derived and/or modified sequence
atgggcgtgcgtcatccaccctgttcccaccgcctcctggccgtgtgtgccttggtatctctggcaactgccgcactgctggtgaacccaggcgtggttgttcggatatctcagaagggactggattatgccagccaacagggcaccgccgccctgcaaaaggagctcaagaggattaagatcccagattattctgactcttttaagatcaagcatcttgggaagggacattactccttttactccatggacatacgcgagttccagcttcctagctcacagatctctatggttcctaacgttggcttaaaattcagtatctccaacgctaacattaagatcagcggcaagtggaaagcccagaaacgttttctgaaaatgtctgggaacttcgatttgtccatcgaggggatgtccatctctgcagacctaaagctgggttccaaccctacatctggtaaaccaaccatcaccgcttcaagctgctcttctcacattaatagtgtacacgtgcacatttccaaaagcaaagtcggttggctgattcagctgttccataaaaagattgaatctgctcttaggaataagatgaacagccaggtctgtgagaaagtcactaatagcgtcagctccgaactacagccctattttcagactctt

SEQ ID NO: 276724 - DNA, 660 bp, Artificial Sequence
  derived and/or modified sequence
atgggtgtgaggcacccaccctgctctcatcgtctcctggctgtgtgcgcacttgtgtccctcgcaaccgcagcccttctggtgaaccctggcgtcgtggtcagaatctcacaaaaagggttggactatgcctcccagcaaggcaccgctgcactgcagaaagagttaaaaaggattaagattccggactatagcgattcctttaaaatcaagcatttggggaaggggcactatagtttctacagtatggacattcgggaattccagctgcctagttcccagattagtatggtgccaaacgtgggacttaagttctctattagcaacgcaaatatcaagattagcggcaaatggaaggcacagaagagatttctaaaaatgtccggcaatttcgatctgtcaatagaaggcatgagcatctctgctgacctcaagcttggatctaaccccacttctggtaagccaacaatcacagcctccagttgctcgagccacattaattcggtgcatgttcacatatccaaaagcaaagtcggatggctaatccagctgtttcacaagaagatcgaaagcgcccttaggaacaagatgaactctcaggtgtgtgagaaggtcaccaattcggtgtcttccgagttacaaccatacttccagactttg

SEQ ID NO: 276725 - DNA, 660 bp, Artificial Sequence
  derived and/or modified sequence
atgggggtacgtcatccgccttgttcgcaccgtttgctcgctgtgtgcgcgttagtgtcccttgctacagcggctctcctcgtcaaccccggcgttgtggtacggatctcccagaagggcctggactatgcctcccaacaaggcacagccgcccttcagaaagaacttaagcgaatcaagattcccgactactcggactcgtttaagataaagcatcttggaaaagggcattattctttctactcaatggatattcgtgagttccaactcccgagctcacagatttcgatggtccctaacgtcggcttgaagtttagtattagcaacgcgaatatcaagatctctgggaagtggaaggctcagaagcgattcctcaagatgtccggtaacttcgacctgtctattgagggcatgtccatttctgcggacctcaaattgggttctaaccctacttccggtaagccgacaattactgcttcttcttgctcatctcacattaattcggttcacgtccatatctctaagtctaaggtcggttggctgatccagttattccataaaaagatagagtcagctttgcgaaataagatgaattcccaagtgtgtgagaaagtaacgaattccgtttcaagcgagctccagccttatttccagacactg

SEQ ID NO: 276726 - DNA, 660 bp, Artificial Sequence
  derived and/or modified sequence
atgggagtccgccatccgccatgttcacataggcttctggccgtctgcgcactggtgtcgcttgcgaccgcggctctcctggtgaatcccggggtggtcgtgagaatctcacagaagggcctcgactacgcttcacaacaaggcaccgccgccttgcagaaggaactgaagagaataaagattccggactactctgactcgttcaagatcaaacaccttggtaaaggacactattccttctacagtatggacatccgcgaattccaactgcctagcagccagatctccatggtgccgaacgttggtctgaaattctccatctcgaacgccaacatcaaaatctcgggaaaatggaaggcgcagaagcggtttctgaagatgtctggaaatttcgatctcagtatcgaaggcatgtccatcagcgccgatttgaagctgggctcgaaccctacctcgggaaagccgactatcactgcaagttcttgcagcagtcatattaactccgttcacgtgcacatttcaaaaagcaaagtgggatggctgattcagctgttccacaaaaagatcgagtccgccctccggaacaagatgaactcccaggtttgcgagaaggtgacgaattccgtatcgagcgagctccaaccatactttcagactctc

SEQ ID NO: 276727 - DNA, 660 bp, Artificial Sequence
  derived and/or modified sequence
atgggagtgcgccacccaccatgctcgcatcggctgctcgctgtgtgcgcactggtcagcctcgccacggctgccctcctcgtgaaccccggagtggtggtgcgcatctcccagaaaggactggactacgcatcccagcagggcaccgccgcactgcagaaagagctgaagaggattaagattcctgactactcggatagtttcaagatcaagcacctgggcaagggtcactattcgttttactcaatggacatccgggagttccagctgccttcgtcgcaaatctccatggtgccaaatgtggggctgaaattcagcattagcaacgccaatatcaagatctccggaaagtggaaggcccagaagcggtttctcaaaatgagcgggaatttcgatctgtcgatcgaaggaatgtccatatccgctgacctcaaactggggtccaacccaacttcgggaaaaccgacgatcactgcctcctcgtgttcgtcccacatcaactcggtccacgtgcatatctccaaatccaaggtgggttggctgatccagctttttcataagaagatcgaaagcgcactgcgcaacaaaatgaactcccaggtgtgcgaaaaggtaaccaattccgtgagcagcgaattgcagccgtacttccagaccctt

SEQ ID NO: 276728 - RNA, 806 nt, Artificial Sequence
  derived and/or modified sequence
gggaaauaagagagaaaagaagaguaagaagaaauauaagagccaccauggguguaaggcacccgcccugcucccacagacuccuggcggugugugccuugguaucgcuugcgaccgccgcacugcuugucaauccggggguagucgugcgcaucagccagaagggacuggauuacgccucgcagcaggguaccgcggcacuucagaaagagcuuaagcggaucaagauuccagacuauucagauagcuuuaagaucaagcauuugggaaaaggucacuauucguuuuacucgauggacauuagagaauuccagcucccuucgucccaaauuuccauggucccgaauguggggcugaaauucagcauuucgaacgcgaacaucaagaucucagggaaauggaaggcacagaagcgauuucucaaaaugucaggaaacuuugaucucuccaucgaggggaugucaaucucggcggacuugaaacucggcuccaauccuacaucgggaaagcccacuauuacggccucgucguguucgagccauaucaacucggugcacguccauaucucaaaguccaaaguaggauggcuuauccagcucuuccacaaaaagauugagucggcuuugcgcaacaagaugaauagccaagugugcgagaaagucacaaauuccgugucaucagaauugcagcccuacuuccaaacgcuguaaugagcugccuucugcggggcuugccuucuggccaugcccuucuucucucccuugcaccuguaccucuuggucuuugaauaaagccugaguaggaag

SEQ ID NO: 276729 - protein, 462 aa, Artificial Sequence
  derived and/or modified sequence
METVQLRNPPRRQLKKLDEDSLTKQPEEVFDVLEKLGEGSYGSVYKAIHKETGQIVAIKQVPVESDLQEIIKEISIMQQCDSPHVVKYYGSYFKNTDLWIVMEYCGAGSVSDIIRLRNKTLTEDEIATILQSTLKGLEYLHFMRKIHRDIKAGNILLNTEGHAKLADFGVAGQLTDTMAKRNTVIGTPFWMAPEVIQEIGYNCVADIWSLGITAIEMAEGKPPYADIHPMRAIFMIPTNPPPTFRKPELWSDNFTDFVKQCLVKSPEQRATATQLLQHPFVRSAKGVSILRDLINEAMDVKLKRQESQQREVDQDDEENSEEDEMDSGTMVRAVGDEMGTVRVASTMTDGANTMIEHDDTLPSQLGTMVINAEDEEEEGTMKRRDETMQPAKPSFLEYFEQKEKENQINSFGKSVPGPLKNSSDWKIPQDGDYEFKTSQEQQSGKDICIQNCQGNLLCRYAF

SEQ ID NO: 276730 - DNA, 1389 bp, Artificial Sequence
  derived and/or modified sequence
atggagactgtgcagttgaggaatccacctaggagacagctaaagaaactggacgaggactccctgacaaaacagcccgaggaggtctttgacgtgcttgaaaaactcggcgagggatcctacggcagtgtgtataaggccatccacaaggagacggggcagatcgtggccattaagcaggtgccagtggagtctgatctacaagagattatcaaggagatctcaatcatgcagcagtgcgactctccacacgtggttaagtattatggaagttactttaagaacactgacttatggatcgttatggaatactgcggcgcggggagtgtgagcgacattatcagactgaggaataagacactgacagaggacgagattgccactatcctgcagtccacactgaagggtcttgaatatctccactttatgcgcaaaattcaccgtgacattaaggccgggaatatcctgctcaataccgagggacacgctaagctggcagactttggagttgccggacagttgacagacacaatggcgaagcggaatactgtgataggaactcccttctggatggctccagaagtaatacaggaaattggctataactgcgtggctgatatatggtcgctcggcatcacagctattgaaatggctgagggaaaaccaccttatgccgacatacatccgatgcgggctatcttcatgatccctacaaatcctcctccaacgtttagaaagcccgaactgtggtccgacaacttcaccgattttgtgaagcagtgcttggtcaagtcccccgaacagagagcaacggccacccagctgttgcagcatccattcgtgcggtccgccaagggcgtgtcgatcttgagagacctcatcaatgaagccatggatgtgaaactcaaaaggcaggagagtcaacagcgtgaagttgatcaggatgatgaggaaaatagcgaagaagatgaaatggacagcggaaccatggtacgcgcggtgggcgacgagatgggcaccgttcgagtagccagtaccatgaccgatggagcaaacaccatgattgagcacgatgacaccttgcccagccagctcggtaccatggtgataaacgcagaagacgaggaagaggaaggcacaatgaaacgcagggacgagacgatgcaaccggccaagccttctttcctcgagtatttcgaacagaaggagaaagagaatcagatcaactcattcgggaagtcagtgccaggccccctgaaaaattccagcgattggaaaatcccccaggatggggactacgagtttaagacatcacaagagcagcagtctgggaaagacatctgtatccaaaattgtcagggaaatctgctgtgtagatatgctttttag

SEQ ID NO: 276731 - DNA, 1389 bp, Artificial Sequence
  derived and/or modified sequence
atggaaaccgtgcagctgcgcaaccctccacggaggcagttaaagaagctggatgaggatagcttgacgaaacaacccgaggaagtgttcgatgtcctcgaaaagctgggcgaaggaagttacggatctgtctacaaggctatccacaaagaaacaggtcaaatagtggctattaagcaggtgccagtcgaatcggatctgcaggaaatcataaaagagatctccattatgcaacagtgcgattccccccacgtggtgaagtactatgggtcgtactttaagaatacagacctctggattgtcatggaatattgcggcgccggcagtgtgtcggacattattaggctgaggaataagaccctcaccgaagatgagattgccacgatccttcaatctaccctcaaaggactcgaatacttgcactttatgcgtaaaattcatcgggacattaaggccggcaatattctgctcaatacagagggtcacgccaagttagcggacttcggtgtggccggacagctgacagatacgatggcgaaaagaaacacagtgatcggaacccccttttggatggcaccggaagttatccaggagatcggatacaactgtgttgccgacatctggtccctgggcatcaccgctatcgagatggctgagggaaaaccaccttacgcagatatccacccgatgagggctatttttatgatcccaacaaacccaccccccacttttcgaaagccagaactgtggtctgacaacttcacagacttcgtgaagcaatgcctggtcaaatcccccgaacagcgcgctacagctacacaactcctgcagcaccctttcgttcgaagtgcaaagggagtctctatccttagggacctgatcaatgaagccatggacgtgaagctgaaacgtcaagagtcacagcagagggaggtagatcaggatgacgaggagaactccgaggaggatgagatggactccggtactatggtccgggccgtaggagatgaaatgggcacagtccgcgttgcctccaccatgacagatggtgctaacacaatgattgaacatgatgataccctgccaagtcagctcggcacgatggtgatcaatgcagaggacgaagaggaggaaggaactatgaaaaggcgagacgaaacaatgcaaccggccaagccctcatttctcgaatattttgagcagaaggagaaagaaaatcagatcaattcattcggcaagtccgtgcctggacctttgaaaaatagctctgactggaagatccctcaggatggagactacgaatttaagacaagccaggagcagcagagcgggaaggacatctgcatccagaactgtcaggggaaccttctgtgcaggtatgccttttag

SEQ ID NO: 276732 - DNA, 1389 bp, Artificial Sequence
  derived and/or modified sequence
atggagaccgtgcagctgagaaatccaccccggcggcagctgaagaagctggatgaggacagcctgaccaagcagcctgaggaggtgtttgatgtgctggagaagctgggggagggcagctatggctctgtgtacaaggccatccacaaggagaccggccagatcgtggccatcaagcaggtgcctgtggagagtgacctgcaggagatcatcaaggagatcagcatcatgcagcagtgtgacagcccccacgtggtgaagtactacggcagctacttcaagaacacagacctgtggatcgtgatggagtactgtggggccggctctgtgtctgacatcatccggctgaggaacaagaccctgacagaagatgagatcgccaccatcctgcagagcaccctgaagggcctggagtacctgcacttcatgaggaagatccaccgggacatcaaggccggcaacatcctgctgaacacagagggccacgccaagctggccgactttggagtggccggccagctgacagacaccatggccaagaggaacacagtgattggcacccccttctggatggcccctgaggtgatccaggagatcggctacaactgtgtggccgacatctggagcctgggcatcacagccatcgagatggccgagggcaagccaccctatgctgacatccaccccatgagggccatcttcatgatccccaccaaccccccacccaccttcaggaagccagagctgtggagcgacaacttcacagactttgtgaagcagtgcctggtgaagagccctgagcagagggccacagccacccagctgctgcagcacccctttgtgcgcagcgccaagggcgtgtccatcctgcgggacctgatcaatgaggccatggatgtgaagctgaagaggcaggagagccagcagcgggaggtggaccaggatgatgaggagaacagcgaggaggatgagatggattctggcaccatggtgcgggctgtgggagatgagatgggcaccgtgcgggtggccagcaccatgacagatggagccaacaccatgattgaacatgatgacaccctgcccagccagctgggcaccatggtgatcaatgcagaagatgaggaggaggagggcaccatgaagagaagagatgagaccatgcagcctgccaagcccagcttcctggagtactttgagcagaaggagaaggagaaccagatcaacagctttgggaagtctgtgcccggccccctgaagaacagcagtgactggaagatcccccaggatggagactatgagttcaagaccagccaggagcagcagagcggcaaggacatctgcatccagaactgccagggcaacctgctgtgccgctatgccttctag

SEQ ID NO: 276733 - DNA, 1389 bp, Artificial Sequence
  derived and/or modified sequence
atggagaccgtgcagctgcggaaccccccccggcggcagctgaagaaactcgatgaggacagcctcacaaagcaacctgaggaggtgtttgatgtcctcgagaaactgggcgaaggctcatacggttccgtgtataaagctatccacaaggaaactggtcagatcgtggcgataaagcaggtgccggttgaaagcgacctgcaggaaataatcaaagagatttccatcatgcagcaatgcgactcaccacatgtcgtcaagtactacggcagctatttcaagaataccgatctctggatcgtcatggagtattgcggcgctgggagtgtgtcagatatcataaggctccgcaacaagactctgacagaagacgagatcgctactatccttcagtctacactgaaaggacttgagtaccttcacttcatgcgaaagatccatcgggacatcaaagcaggtaacatactgctcaacacggagggacatgcgaagctagctgactttggagtggccggccagctgacagacaccatggctaaacgaaataccgtgatcggaacacccttctggatggctccggaggtgattcaggaaataggctataactgtgtggccgacatctggtctcttggtataactgctatcgaaatggccgaggggaaacctccatacgccgatattcatcccatgagagccattttcatgattcccactaaccctcctcccacgttccgcaaaccagagctgtggtcagacaacttcacagactttgtgaagcagtgtcttgtgaagtcacccgaacagcgggctactgcaactcaacttctgcagcatcccttcgttagaagcgctaaaggcgtttccatactgagggatctgatcaatgaggctatggacgtcaagctgaagcgacaggaatcacaacagcgcgaggttgaccaggatgacgaagagaattcggaagaagatgagatggattcgggcacaatggtgcgcgctgttggcgacgaaatgggcactgtgagagtggcgtccaccatgaccgacggagccaacactatgatcgaacacgacgacacgctcccctcccagcttggaacgatggtcatcaatgctgaagacgaggaagaggaaggcaccatgaaacgccgcgacgagactatgcagcccgcgaagccttcctttctggaatacttcgagcagaaagagaaggaaaatcagatcaattcttttggtaaatccgtgccaggtcccctcaaaaattcttctgattggaaaatcccccaagatggagactatgaattcaaaacaagccaggagcagcagtctggtaaggatatttgtattcagaattgccaggggaatctactatgtcggtacgcgttctag

SEQ ID NO: 276734 - DNA, 1389 bp, Artificial Sequence
  derived and/or modified sequence
atggagaccgtgcagctgcggaaccccccccggcggcagctgaagaagcttgacgaggactccttgaccaaacagccggaggaagtgttcgacgttttggaaaagctcggtgaggggtcttacggcagcgtgtacaaggcgattcacaaagaaacaggacagatcgtagcaataaagcaggttcctgtggagtcggacctccaggaaatcattaaggaaatatccattatgcagcaatgcgactcccctcacgtggttaagtattacggcagttactttaaaaacactgacttgtggatagttatggagtactgcggtgccgggtcggttagcgacatcattcgcctacgaaacaaaaccctgacggaggacgagatcgccaccatcctccagtcgaccctcaaaggcttggagtacctccatttcatgagaaagattcaccgtgacattaaggccggaaatatcctcttgaatactgaaggacacgcaaagttggccgatttcggcgtggccgggcagctcaccgacacgatggcaaaaaggaatactgttatcggtaccccgttctggatggccccggaggtcattcaggaaattggttacaactgcgtcgcagatatctggtcactcggaataacagccatcgaaatggctgagggaaagcctccctacgcggacatccaccctatgagagctattttcatgataccaactaatccccccccaacgttcagaaagcctgaattatggagcgacaactttacggacttcgtgaaacaatgtctagtgaaatccccagaacaacgtgcaactgcaacccaactgctccaacatcctttcgtgcgatcagctaagggggtttcgattctgcgtgatttgatcaacgaggcgatggacgtgaagctgaaacggcaagagtcacagcagagggaagtagaccaggacgacgaagaaaactcagaagaggatgaaatggacagcgggactatggtcagagcagtgggcgatgaaatggggaccgtgcgggttgcaagcaccatgactgacggcgccaatactatgatcgaacacgacgacaccctgccaagccagcttggcaccatggtgatcaacgccgaagatgaggaagaggaagggacaatgaaacgcagggacgagaccatgcagcctgctaagccctcatttctggaatatttcgagcagaaagagaaggaaaaccagataaactcgttcgggaaatccgtccctggccctctgaaaaattcttctgactggaagatccctcaagacggcgactacgaatttaagacctcacaggagcaacaatctggtaaggacatctgtatacagaattgtcagggcaatctgctatgcaggtacgctttttag

SEQ ID NO: 276735 - DNA, 1389 bp, Artificial Sequence
  derived and/or modified sequence
atggagactgtccagctgcgcaatccaccaagacgccaactgaaaaagctggatgaagatagccttacaaaacagcctgaggaggtgttcgatgtgcttgagaagctcggcgaaggtagttacgggtctgtgtataaggctattcataaggaaactggacagatcgttgccatcaagcaggtccctgtagagagcgatctccaagagatcataaaagagatctccatcatgcaacagtgtgacagcccccacgtggtaaagtattatgggtcctattttaagaataccgatctctggattgtgatggagtattgtggtgcaggaagtgtatctgacattattaggctgagaaacaagactctgactgaggacgagattgccactatcctgcagagcacactgaagggccttgagtatctgcacttcatgcggaagatccatagggatataaaagcaggtaacattctcctcaacaccgaaggccatgccaaattagctgacttcggcgtcgcgggacaactgactgatacaatggctaaacggaataccgttatcggtacccccttctggatggcacccgaggtgattcaggaaattggctacaattgcgtcgctgacatctggtctctaggcattaccgcaattgagatggctgagggaaagcccccatatgccgacattcatcctatgagggccatatttatgatcccaaccaatccccctcccaccttccgcaaacctgagctgtggtccgataacttcactgatttcgtcaagcagtgccttgtaaaatctcctgagcagagggccacagctactcagcttcttcagcaccctttcgttcgcagcgccaagggcgtgtcaattcttcgtgacctgattaatgaagcaatggacgtgaaacttaaacgtcaagagtcccagcaacgggaagtggaccaagatgatgaggagaactcagaggaagacgagatggactctgggaccatggttcgagccgtgggagacgagatgggaaccgtgcgggtcgcttccacgatgacagatggggctaacacaatgattgaacacgacgatacactgccgtctcaactaggaacaatggtcataaatgcagaggacgaagaagaagaaggaacaatgaagagacgagacgagaccatgcaacccgctaaaccttcgttcttggaatattttgagcagaaagaaaaggagaaccaaatcaattcgtttggcaaatccgtaccaggccctctgaaaaacagttccgactggaagatcccccaggatggggactatgaattcaaaacctcccaggagcagcagagcggcaaagatatttgtatccagaactgtcagggcaaccttctttgcagatatgcattttag

SEQ ID NO: 276736 - DNA, 1389 bp, Artificial Sequence
  derived and/or modified sequence
atggagactgtccagctacggaaccctccgcgaaggcagctgaagaagctggatgaggactccctcactaaacaaccagaggaggtatttgacgttttagagaaactgggcgagggctcatacggctccgtatacaaggccattcataaagaaactggccagatcgtagccatcaagcaggtacccgtggagtctgatcttcaggaaattatcaaggagatcagtatcatgcaacagtgtgacagtccccacgttgtcaaatactacggaagttactttaagaacacagatctgtggattgtaatggagtactgcggagctggctccgtgtccgatataatcaggttgcgaaataaaactctgactgaggatgagattgccaccatactgcagagcactctgaaaggcctggagtacttgcacttcatgaggaaaatccatcgcgatatcaaggcaggcaacattttactcaataccgagggacacgccaagttggccgacttcggagtagcagggcagctgacagatacaatggctaaaagaaacacggtgattggcaccccattctggatggcgcctgaggtaatccaagagatcgggtataattgtgtagcagatatctggtccctgggaatcacagccattgaaatggctgagggcaagcctccatacgctgacatccatcctatgagagccatatttatgattccaaccaatcctccgccaacttttaggaaacccgagctgtggtccgataacttcactgatttcgtgaagcagtgcctcgtcaagagtcccgaacagagggccacggcaacccagcttctgcaacacccattcgtgagatctgccaaaggagtgagcatcctgcgcgacctgatcaacgaagccatggacgttaagctgaaaaggcaagaatcacagcagagggaggtggatcaggatgatgaggagaatagcgaggaggacgagatggacagcggaactatggtgcgcgctgtgggggatgagatgggaaccgttcgggtggcaagcactatgacagacggcgctaacaccatgattgagcacgacgacactttgccctcccagttaggaacgatggtgattaatgcagaggatgaggaggaggaaggcacaatgaagcgtagagatgagacaatgcagcctgcaaagccttccttcctggaatacttcgaacagaaggagaaggagaatcaaatcaacagctttggcaaaagtgtccccggacctttgaaaaatagctcagactggaaaataccgcaagacggggactatgagttcaagacgtcccaggaacagcagagcgggaaagatatttgcatccaaaattgccaggggaatctgctttgtcgatacgcattttag

SEQ ID NO: 276737 - DNA, 2038 bp, Artificial Sequence
  derived and/or modified sequence
cgggaggatggagcagtgagcgggtctgggcggctgctggcagcgccatggagacggtacagctgaggaacccgccgcgccggcagctgaaaaagttggatgaagatagtttaaccaaacaaccagaagaagtatttgatgtcttagagaaacttggagaagggtcctatggcagcgtatacaaagctattcataaagagaccggccagattgttgctattaagcaagttcctgtggaatcagacctccaggagataatcaaagaaatctctataatgcagcaatgtgacagccctcatgtagtcaaatattatggcagttattttaagaacacagacttatggatcgttatggagtactgtggggctggttctgtatctgatatcattcgattacgaaataaaacgttaacagaagatgaaatagctacaatattacaatcaactcttaagggacttgaataccttcattttatgagaaaaatacaccgagatatcaaggcaggaaatattttgctaaatacagaaggacatgcaaaacttgcagattttggggtagcaggtcaacttacagataccatggccaagcggaatacagtgataggaacaccattttggatggctccagaagtgattcaggaaattggatacaactgtgtagcagacatctggtccctgggaataactgccatagaaatggctgaaggaaagcccccttatgctgatatccatccaatgagggcaatcttcatgattcctacaaatcctcctcccacattccgaaaaccagagctatggtcagataactttacagattttgtgaaacagtgtcttgtaaagagccctgagcagagggccacagccactcagctcctgcagcacccatttgtcaggagtgccaaaggagtgtcaatactgcgagacttaattaatgaagccatggatgtgaaactgaaacgccaggaatcccagcagcgggaagtggaccaggacgatgaagaaaactcagaagaggatgaaatggattctggcacgatggttcgagcagtgggtgatgagatgggcactgtccgagtagccagcaccatgactgatggagccaatactatgattgagcacgatgacacgttgccatcacaactgggcaccatggtgatcaatgcagaggatgaggaagaggaaggaactatgaaaagaagggatgagaccatgcagcctgcgaaaccatcctttcttgaatattttgaacaaaaagaaaaggaaaaccagatcaacagctttggcaagagtgtacctggtccactgaaaaattcttcagattggaaaataccacaggatggagactacgagtttaaaactagccaagaacagcagtctggaaaagacatatgtatccaaaattgccagggaaacctgctgtgtagatacgctttctgagaaaccacatgcttaagagttggacagtggaggaccttcagaagaggctcttggccctggaccccatgatggagcaggagattgaagagatccggcagaagtaccagtccaagcggcagcccatcctggatgccatagaggctaagaagagacggcaacaaaacttctgagcaaggccaggctgtgagggccccagctccacccaggctttgggtgaattctggatggcttgcctcatgtttgttagccagcacttctgctctgtcgtctctccacagcacctttgtgaactcaggaatgtgcgccagtgggaagggctctcttgacagtcagcgtgccatcttgatgtgtgtatgtacattggtcaggtatattatctcaaaggatttatattggcgcttttaactcagagttttaaaccccaggaacagagactcctagttgagtgatagctgggaaagttttacattgtctgtttttcttctcccaatagctttcaattgttctttctggaagacttttaaaaaaatataaatatgcatatatatatataaattataaatagattccccacgcagtgtggtggcatctctgtacaggta

SEQ ID NO: 276738 - DNA, 1457 bp, Artificial Sequence
  derived and/or modified sequence
ggggcgggctcaggaggtccgcgggaggatggagcagtgagcgggtctgggcggctgctggcagcgccatggagacggtacagctgaggaacccgccgcgccggcagctgaaaaagttggatgaagatagtttaaccaaacaaccagaagaagtatttgatgtcttagagaaacttggagaagggtcctatggcagcgtatacaaagctattcataaagagaccggccagattgttgctattaagcaagttcctgtggaatcagacctccaggagataatcaaagaaatctctataatgcagcaatgtgacagccctcatgtagtcaaatattatggcagttattttaagaacacagacttatggatcgttatggagtactgtggggctggttctgtatctgatatcattcgattacgaaataaaacgttaacagaagatgaaatagctacaatattacaatcaactcttaagggacttgaataccttcattttatgagaaaaatacaccgagatatcaaggcaggaaatattttgctaaatacagaaggacatgcaaaacttgcagattttggggtagcaggtcaacttacagataccatggccaagcggaatacagtgataggaacaccattttggatggctccagaagtgattcaggaaattggatacaactgtgtagcagacatctggtccctgggaataactgccatagaaatggctgaaggaaagcccccttatgctgatatccatccaatgagggcaatcttcatgattcctacaaatcctcctcccacattccgaaaaccagagctatggtcagataactttacagattttgtgaaacagtgtcttgtaaagagccctgagcagagggccacagccactcagctcctgcagcacccatttgtcaggagtgccaaaggagtgtcaatactgcgagacttaattaatgaagccatggatgtgaaactgaaacgccaggaatcccagcagcgggaagtggaccaggacgatgaagaaaactcagaagaggatgaaatggattctggcacgatggttcgagcagtgggtgatgagatgggcactgtccgagtagccagcaccatgactgatggagccaatactatgattgagcacgatgacacgttgccatcacaactgggcaccatggtgatcaatgcagaggatgaggaagaggaaggaactatgaaaagaagggatgagaccatgcagcctgcgaaaccatcctttcttgaatattttgaacaaaaagaaaaggaaaaccagatcaacagctttggcaagagtgtacctggtccactgaaaaattcttcagattggaaaataccacaggatggagactacgagtttaaaactagccaagaacagcagtctggaaaagacatatgtatccaaaattgccagggaaacctgctgtgtagatacgctttctga

SEQ ID NO: 276739 - DNA, 1389 bp, Artificial Sequence
  derived and/or modified sequence
atggagaccgtgcagctgagaaacccccccagaagacagctgaagaagctggacgaggacagcctgaccaagcagcccgaggaggtgttcgacgtgctggagaagctgggcgagggcagctacggcagcgtgtacaaggccatccacaaggagaccggccagatcgtggccatcaagcaggtgcccgtggagagcgacctgcaggagatcatcaaggagatcagcatcatgcagcagtgcgacagcccccacgtggtgaagtactacggcagctacttcaagaacaccgacctgtggatcgtgatggagtactgcggcgccggcagcgtgagcgacatcatcagactgagaaacaagaccctgaccgaggacgagatcgccaccatcctgcagagcaccctgaagggcctggagtacctgcacttcatgagaaagatccacagagacatcaaggccggcaacatcctgctgaacaccgagggccacgccaagctggccgacttcggcgtggccggccagctgaccgacaccatggccaagagaaacaccgtgatcggcacccccttctggatggcccccgaggtgatccaggagatcggctacaactgcgtggccgacatctggagcctgggcatcaccgccatcgagatggccgagggcaagcccccctacgccgacatccaccccatgagagccatcttcatgatccccaccaaccccccccccaccttcagaaagcccgagctgtggagcgacaacttcaccgacttcgtgaagcagtgcctggtgaagagccccgagcagagagccaccgccacccagctgctgcagcaccccttcgtgagaagcgccaagggcgtgagcatcctgagagacctgatcaacgaggccatggacgtgaagctgaagagacaggagagccagcagagagaggtggaccaggacgacgaggagaacagcgaggaggacgagatggacagcggcaccatggtgagagccgtgggcgacgagatgggcaccgtgagagtggccagcaccatgaccgacggcgccaacaccatgatcgagcacgacgacaccctgcccagccagctgggcaccatggtgatcaacgccgaggacgaggaggaggagggcaccatgaagagaagagacgagaccatgcagcccgccaagcccagcttcctggagtacttcgagcagaaggagaaggagaaccagatcaacagcttcggcaagagcgtgcccggccccctgaagaacagcagcgactggaagatcccccaggacggcgactacgagttcaagaccagccaggagcagcagagcggcaaggacatctgcatccagaactgccagggcaacctgctgtgcagatacgccttctag

SEQ ID NO: 276740 - protein, 221 aa, Artificial Sequence
  derived and/or modified sequence
MFPKTSVSPAPDKTKRPETKLKPLPVAPSQPTLGSSNINGSIDYPAKNDSPWAPPGRDYFCNRSASNTAAEFGEPLPKRLKSSVVALDVDQPGANYRRGYDLPKYHMVRGITSLLPQDCVYPSQALPPKPRFLSSSEVDSPNVLTVQKPYGGSGPLYTCVPAGSPASSSTLEGLGGCQCLLPMKLNFTSSFEKRMVKATEISCDCTVHKTYEESARNTTVV

SEQ ID NO: 276741 - DNA, 666 bp, Artificial Sequence
  derived and/or modified sequence
atgttccccaagaccagcgtgagccccgcccccgacaagaccaagagacccgagaccaagctgaagcccctgcccgtggcccccagccagcccaccctgggcagcagcaacatcaacggcagcatcgactaccccgccaagaacgacagcccctgggccccccccggcagagactacttctgcaacagaagcgccagcaacaccgccgccgagttcggcgagcccctgcccaagagactgaagagcagcgtggtggccctggacgtggaccagcccggcgccaactacagaagaggctacgacctgcccaagtaccacatggtgagaggcatcaccagcctgctgccccaggactgcgtgtaccccagccaggccctgccccccaagcccagattcctgagcagcagcgaggtggacagccccaacgtgctgaccgtgcagaagccctacggcggcagcggccccctgtacacctgcgtgcccgccggcagccccgccagcagcagcaccctggagggcctgggcggctgccagtgcctgctgcccatgaagctgaacttcaccagcagcttcgagaagagaatggtgaaggccaccgagatcagctgcgactgcaccgtgcacaagacctacgaggagagcgccagaaacaccaccgtggtgtag

SEQ ID NO: 276742 - DNA, 666 bp, Artificial Sequence
  derived and/or modified sequence
atgttcccaaagaccagtgtgtcgccagccccagacaagacgaagcggcctgagaccaaacttaagcctctgcctgtcgctccgagccagccgacgctaggatcttccaacataaacgggagcattgattaccctgctaaaaacgatagcccatgggcgccgcccgggagggactatttctgtaatcggtccgcatcgaacaccgccgccgagttcggtgagcctctgccaaagaggctaaaaagctccgtagtcgctctggacgtggatcagcccggcgctaattaccgacgcggctatgatctgccgaagtaccacatggtccgaggaataaccagtctgctccctcaggactgtgtgtatccgagccaggctctcccacccaagccaaggtttctctctagttccgaggttgacagccctaatgtcctgaccgttcaaaaaccctacggtggctctgggccattgtacacctgcgtgcctgccgggtcaccagcatctagtagcacactcgagggcctaggaggatgccagtgtttactgcccatgaaacttaactttaccagctcctttgaaaagaggatggtaaaagccactgagatttcatgcgactgtacagtgcacaagacgtatgaggagtcggctcgcaataccaccgtggtttag

SEQ ID NO: 276743 - DNA, 666 bp, Artificial Sequence
  derived and/or modified sequence
atgttccccaagacctctgtgtccccagccccagacaagaccaagaggcctgagaccaagctgaagcccctgcctgtggcccccagccagcccaccctgggcagcagcaacatcaatggcagcattgactacccagccaagaatgacagcccctgggcccctcctggccgggactacttctgcaacagaagtgccagcaacacagctgctgagtttggagagcccctgcccaagaggctgaagagctctgtggtggccctggatgtggaccagcccggggccaactacagaagaggctatgacctgcccaagtaccacatggtgcggggcatcaccagcctgctgccccaggactgtgtgtaccccagccaggccctgccccccaagccccgcttcctgagcagcagcgaggtggacagccccaacgtgctgactgtgcagaagccctacggcggcagcggccccctgtacacctgtgtgcctgctggcagccctgccagcagcagcaccctggagggcctgggcggctgccagtgcctgctgcccatgaagctgaacttcaccagcagctttgagaagaggatggtgaaggccacagagatcagctgtgactgcaccgtgcacaagacctatgaggagagcgccaggaacaccaccgtggtgtag

SEQ ID NO: 276744 - DNA, 666 bp, Artificial Sequence
  derived and/or modified sequence
atgttccccaagaccagcgtgagccccgcccccgacaagaccaagcggccagagaccaagttgaaacctctgcctgtggccccttcccagcccaccctgggttccagcaacattaatggctctatcgactaccctgccaaaaatgattctccttgggcaccgcctgggcgggattatttctgtaaccgcagcgcctccaacactgccgctgaatttggcgagccactacccaagagactgaagtcatcagtcgtcgcattggacgttgatcagcccggggcaaactaccggaggggatatgaccttcccaaatatcacatggtcagaggcattaccagccttctgccccaggactgtgtttacccaagtcaagcgctgcctccgaagccccggttcctcagctcatctgaggtggacagtccaaacgtccttaccgtacaaaagccctacggagggtctgggcctctgtacacttgtgtgccagcaggatcacctgcttcctcctccactctggaggggctgggaggatgccaatgcctgctgccaatgaaactgaactttaccagcagtttcgagaagcgaatggtgaaggccactgagatttcttgcgattgtaccgtccacaagacttacgaagagtcagccaggaacaccactgtcgtatag

SEQ ID NO: 276745 - DNA, 666 bp, Artificial Sequence
  derived and/or modified sequence
atgtttccaaagaccagtgtgtcacccgctcctgataaaacaaaacggccagaaacaaagctcaaaccactacctgttgccccatcacagccaactctcggcagcagcaacattaatggtagcattgattatcccgctaagaatgacagcccctgggcacccccaggcagagactacttctgtaaccgcagtgcttcgaatactgctgccgagttcggggagccactgccaaaacgtttgaaatcaagcgttgttgccctggacgtggatcaacctggtgctaactacagacggggatacgacttgccgaagtatcatatggttaggggaataacatccctcttgcctcaggattgcgtttacccatctcaggcattacccccaaagccaagattcctgtcatcctccgaagtggatagccccaatgtcctgacagtgcagaagccatacggtggatccggaccgctctacacctgtgttccggcaggttctcctgcttcttcatccaccctggaaggattgggtggctgccagtgtctactacccatgaaactaaattttacctcctcttttgagaagcggatggtaaaagcgacggaaatatcatgcgattgcaccgtacataaaacctacgaagaaagcgctcggaatactacagtagtgtag

SEQ ID NO: 276746 - DNA, 3684 bp, Artificial Sequence
  derived and/or modified sequence
tctgacccaacagtcccccagcgccggacgcgccgcgccccggcggctctagggaccccccgcgcctgcactgtccccgcgcggacgagtagggggcgcccgcgcctttgcccccgtgcgcacccccgccccgctcaccttagccccgcgcccgagggtttggaaatcccttgtctccaggttgctgggattgacttcttgctcaattgaaacactcattcaatggagacaaagagaactaatgctttgtgctgattcatatttgaatcgaggcattgggaaccctgtatgccttgtttgtggaaagaaccagtgacaccatcactgagcttcctaaaagttcgaagaagttagaggactatacactttcttttgaacttttataataaatatttgctctggtttttggaacccagggctgttagaggggtgagtgacaagtcttacaagtggccttattccaactccagaaattgcccaacggaactttgagattatatgcaatcgaaagtgacaggaaacatgccaactcaatccctcttaatgtacatggatgggccagaagtgattggcagctctcttggcagtccgatggagatggaggatgccttgtcaatgaaagggaccgctgttgttccattccgagctacacaagaaaaaaatgtcatccaaatcgaggggtatatgcccttggattgcatgttctgcagccagaccttcacacattcagaagaccttaataaacatgtcttaatgcaacaccggcctaccctctgtgaaccagcagttcttcgggttgaagcagagtatctcagtccgcttgataaaagtcaagtgcgaacagaacctcccaaggaaaagaattgcaaggaaaatgaatttagctgtgaggtatgtgggcagacatttagagtcgcttttgatgttgagatccacatgagaacacacaaagattctttcacttacgggtgtaacatgtgcggaagaagattcaaggagccttggtttcttaaaaatcacatgcggacacataatggcaaatcgggggccagaagcaaactgcagcaaggcttggagagtagtccagcaacgatcaacgaggtcgtccaggtgcacgcggccgagagcatctcctctccttacaaaatctgcatggtttgtggcttcctatttccaaataaagaaagtctaattgagcaccgcaaggtgcacaccaaaaaaactgctttcggtaccagcagcgcgcagacagactctccacaaggaggaatgccgtcctcgagggaggacttcctgcagttgttcaacttgagaccaaaatctcaccctgaaacggggaagaagcctgtcagatgcatccctcagctcgatccgttcaccaccttccaggcttggcagctggctaccaaaggaaaagttgccatttgccaagaagtgaaggaatcggggcaagaagggagcaccgacaacgacgattcgagttccgagaaggagcttggagaaacaaataagggcagttgtgcaggcctctcgcaagagaaagagaagtgcaaacactcccacggcgaagcgccctccgtggacgcggatcccaagttacccagtagcaaggagaagcccactcactgctccgagtgcggcaaagctttcagaacctaccaccagctggtcttgcactccagggtccacaagaaggaccggagggccggcgcggagtcgcccaccatgtctgtggacgggaggcagccggggacgtgttctcctgacctcgccgcccctctggatgaaaatggagccgtggatcgaggggaaggtggttctgaagacggatctgaggatgggcttcccgaaggaatccatctggataaaaatgatgatggaggaaaaataaaacatcttacatcttcaagagagtgtagttattgtggaaagtttttccgttcaaattattacctcaatattcatctcagaacgcatacaggtgaaaaaccatacaaatgtgaattttgtgaatatgctgcagcccagaagacatctctgaggtatcacttggagagacatcacaaggaaaaacaaaccgatgttgctgctgaagtcaagaacgatggtaaaaatcaggacactgaagatgcactattaaccgctgacagtgcgcaaaccaaaaatttgaaaagattttttgatggtgccaaagatgttacaggcagtccacctgcaaagcagcttaaggagatgccttctgtttttcagaatgttctgggcagcgctgtcctctcaccagcacacaaagatactcaggatttccataaaaatgcagctgatgacagtgctgataaagtgaataaaaaccctacccctgcttacctggacctgttaaaaaagagatcagcagttgaaactcaggcaaataacctcatctgtagaaccaaggcggatgttactcctcctccggatggcagtaccacccataaccttgaagttagccccaaagagaagcaaacggagaccgcagctgactgcagatacaggccaagtgtggattgtcacgaaaaacctttaaatttatccgtgggggctcttcacaattgcccggcaatttctttgagtaaaagtttgattccaagtatcacctgtccattttgtaccttcaagacattttatccagaagttttaatgatgcaccagagactggagcataaatacaatcctgacgttcataaaaactgtcgaaacaagtccttgcttagaagtcgacgtaccggatgcccgccagcgttgctgggaaaagatgtgcctcccctctctagtttctgtaaacccaagcccaagtctgctttcccggcgcagtccaaatccctgccatctgcgaaggggaagcagagccctcctgggccaggcaaggcccctctgacttcagggatagactctagcactttagccccaagtaacctgaagtcccacagaccacagcagaatgtgggggtccaaggggccgccaccaggcaacagcaatctgagatgtttcctaaaaccagtgtttcccctgcaccggataagacaaaaagacccgagacaaaattgaaacctcttccagtagctccttctcagcccaccctcggcagcagtaacatcaatggttccatcgactaccccgccaagaacgacagcccgtgggcacctccgggaagagactatttctgtaatcggagtgccagcaatactgcagcagaatttggtgagccccttccaaaaagactgaagtccagcgtggttgcccttgacgttgaccagcccggggccaattacagaagaggctatgaccttcccaagtaccatatggtcagaggcatcacatcactgttaccgcaggactgtgtgtatccgtcgcaggcgctgcctcccaaaccaaggttcctgagctccagcgaggtcgattctccaaatgtgctgactgttcagaagccctatggtggctccgggccactttacacttgtgtgcctgctggtagtccagcatccagctcgacgttagaaggtcttggtggatgtcagtgcttactccccatgaaattaaattttacttcatcctttgagaagcgaatggtgaaagctactgaaataagctgtgattgtactgtacataaaacatatgaggaatctgcaaggaacactacagttgtgtaa

SEQ ID NO: 276747 - protein, 121 aa, Artificial Sequence
  derived and/or modified sequence
MAEVEETLKRLQSQKGVQGIIVVNTEGIPIKSTMDNPTTTQYASLMHSFILKARSTVRDIDPQNDLTFLRIRSKKNEIMVAPGKGSSTSPCRNRPHGTFSVAHQESWHSGVSRGSKQGPRS

SEQ ID NO: 276748 - DNA, 366 bp, Artificial Sequence
  derived and/or modified sequence
atggctgaggtggaggaaaccctgaagcggctgcagagccaaaagggcgttcaagggatcattgtggttaatacagaagggatcccaattaagtctaccatggataatcccacgaccacccagtatgcatccctcatgcactcattcattctgaaggctcgctccactgtgagagacatagacccacaaaatgacctgacctttctgcggatcaggagtaagaaaaacgagataatggtggccccaggcaaaggcagctccacatccccctgccgtaaccgaccccatgggaccttctcagtcgcgcaccaggaatcatggcatagcggcgtaagccgaggatctaagcaaggcccgagatcctag

SEQ ID NO: 276749 - DNA, 366 bp, Artificial Sequence
  derived and/or modified sequence
atggccgaggtggaggagaccctgaagaggctgcagagccagaagggcgtgcagggcatcatcgtggtgaacacagagggcatccccatcaagagcaccatggacaaccccaccaccacccagtatgccagcctgatgcacagcttcatcctgaaggcccggagcacagtgcgggacatcgacccccagaatgacctgaccttcctgcgcatccgcagcaagaagaatgagatcatggtggcccctgggaagggcagcagcaccagcccctgcaggaaccggccccacggcaccttctctgtggcccaccaggagagctggcacagcggcgtgtcccggggcagcaagcagggccccaggagctag

SEQ ID NO: 276750 - DNA, 366 bp, Artificial Sequence
  derived and/or modified sequence
atggccgaggtggaggagaccctgaagcggctgcagagccagaagggggtacagggtattattgtggttaacacagaaggaatcccaatcaagagtactatggataacccaacaaccacacagtatgcttctttaatgcacagtttcatactgaaagcccgatccaccgtgcgcgatatcgacccacagaacgacttgacctttcttcgtattcggagcaaaaaaaatgagatcatggtggctcctggcaagggttcgtccacaagtccatgtagaaaccgtcctcacggtaccttctcagttgcacaccaggaatcttggcactccggggtttcccgcggctccaaacagggaccaagaagctag

SEQ ID NO: 276751 - DNA, 366 bp, Artificial Sequence
  derived and/or modified sequence
atggcagaggttgaggaaacgctgaagaggttacagtcacagaagggggtacagggaatcattgtggtgaacactgaggggatcccgatcaaatccactatggataatccaacgacaacgcagtacgctagccttatgcattcgtttatattgaaagctcgctctaccgtccgggacatagacccgcaaaatgatctgaccttcctgcgaattcgtagtaaaaagaatgaaatcatggtggcacccggtaaggggtcctctacttcaccatgcagaaaccggccacatggaacattttcagtcgcccatcaggaaagctggcacagtggtgtgtcccgaggctccaagcagggtccacgctcttag

SEQ ID NO: 276752 - DNA, 366 bp, Artificial Sequence
  derived and/or modified sequence
atggccgaggtggaggagaccctgaagagactgcagagccagaagggcgtgcagggcatcatcgtggtgaacaccgagggcatccccatcaagagcaccatggacaaccccaccaccacccagtacgccagcctgatgcacagcttcatcctgaaggccagaagcaccgtgagagacatcgacccccagaacgacctgaccttcctgagaatcagaagcaagaagaacgagatcatggtggcccccggcaagggcagcagcaccagcccctgcagaaacagaccccacggcaccttcagcgtggcccaccaggagagctggcacagcggcgtgagcagaggcagcaagcagggccccagaagctag

SEQ ID NO: 276753 - DNA, 1072 bp, Artificial Sequence
  derived and/or modified sequence
gttcgctacgcggggctaccggatcggtcggaaatggcagaggtggaggagacactgaagcgactgcagagccagaagggagtgcagggaatcatcgtcgtgaacacagaaggcattcccatcaagagcaccatggacaaccccaccaccacccagtatgccagcctcatgcacagcttcatcctgaaggcacggagcaccgtgcgtgacatcgacccccagaacgatctcaccttccttcgaattcgctccaagaaaaatgaaattatggttgcaccaggtaaggggtcttctacctccccatgtaggaacagacctcatggcacattctctgtggctcatcaggagtcctggcacagtggtgtctccagaggatccaagcagggcccgaggagttgaaggaattgggttgttgcctcactgcctagccagcctccagctggtgtcccatagcagatcctcccagggaccggccccagagggtaaccccagtctcctgagatagacagacacgtgagcatcatgtgtgtctccccttccttgataggagaaaactcaaaggcatttgggacatagaggagggtgtggccaggcctgtctggggctgtctgcaaaagcttcccagaagaggggacactggagctgaatcttaagggcaccaggaagcagtgtgagcaaggcggaggggcggaaagccacgtttggaagaatattcagtgattcttctccaaaatgtaaagcaaaagtactgtatcattttatccttgaaaacatgttctctgcccacttgtaaaggccaggcctgtctttaggccccttacagccagcttttcctgccgcacgggagcagattgctttgtttcctttacgcgaggtgcttgccttgcatttgggggctctgtggtgcaaccaaggcctgtgtttagtccttaggatcattctcagggtgaggagatgctcattctgggaggagcccacaaggatgggagcacaggagcgagcaacagagccacatctcctgcccggctccctcgctctcactcatggactggggtggcaggcagagcctcca

SEQ ID NO: 276754 - DNA, 159 bp, Artificial Sequence
  derived and/or modified sequence
atggcggctcgcagtctagctaggagagcacttcgggtcgccggaggcgacgctcgcagtgggggtccagtggcacgggatacccagttgggcgctcagtggcgttggattgcagaaggcctcgttgaaaatctaaacccaccaggcgctgatgcctag

SEQ ID NO: 276755 - protein, 368 aa, Artificial Sequence
  derived and/or modified sequence
MSLFGTTSGFGTSGTSMFGSATTDNHNPMKDIEVTSSPDDSIGCLSFSPPTLPGNFLIAGSWANDVRCWEVQDSGQTIPKAQQMHTGPVLDVCWSDDGSKVFTASCDKTAKMWDLSSNQAIQIAQHDAPVKTIHWIKAPNYSCVMTGSWDKTLKFWDTRSSNPMMVLQLPERCYCADVIYPMAVVATAERGLIVYQLENQPSEFRRIESPLKHQHRCVAIFKDKQNKPTGFALGSIEGRVAIHYINPPNPAKDNFTFKCHRSNGTNTSAPQDIYAVNGIAFHPVHGTLATVGSDGRFSFWDKDARTKLKTSEQLDQPISACCFNHNGNIFAYASSYDWSKGHEFYNPQKKNYIFLRNAAEELKPRNKK

SEQ ID NO: 276756 - protein, 137 aa, Artificial Sequence
  derived and/or modified sequence
MSLFGTTSGFGTSGTSMFGSATTDNHNPMKDIEVTSSPDDSIGCLSFSPPTLPGNFLIAGSWANDVRCWEVQDSGQTIPKAQQMHTGPVLDVCWSDDGSKVFTASCDKTAKMWDLSSNQAIQIAQHDAPVKTIHWIK

SEQ ID NO: 276757 - protein, 87 aa, Artificial Sequence
  derived and/or modified sequence
MSLFGTTSGFGTSGTSMFGSATTDNHNPMKDIEVTSSPDDSIGCLSFSPPTLPGNFLIAGSWANDVRCWEVQDSGQTIPKAQQMHTG

SEQ ID NO: 276758 - DNA, 588 bp, Artificial Sequence
  derived and/or modified sequence
gggatgctggggcgcgagcgggactgttgactaagcttcgttactgggccctggaagcgaggtgccaccgtacaggcagtacttctccaggcaagtagtattaaacaccagccgccctgggccaggcattgtactgtgggacccagtatgcattaagggaagaatccaggttcaaaatgagcctgtttggaacaacctcaggttttggaaccagtgggaccagcatgtttggcagtgcaactacagacaatcacaatcccatgaaggatattgaagtaacatcatctcctgatgatagcattggttgtctgtcttttagcccaccaaccttgccggggaactttcttattgcaggatcatgggctaatgatgttcgctgctgggaagttcaagacagtggacagaccattccaaaagcccagcagatgcacactgggcctgtgcttgatgtctgctggagtgacgatgggagcaaagtgtttacggcatcgtgtgataaaactgccaaaatgtgggacctcagcagtaaccaagcgatacagatcgcacagcatgatgctcctgttaaaaccatccattggatcaaag

SEQ ID NO: 276759 - DNA, 480 bp, Artificial Sequence
  derived and/or modified sequence
gggatgctggggcgcgagcgggactgttgactaagcttcgttactgggccctggaagcgaggttcaaaatgagcctgtttggaacaacctcaggttttggaaccagtgggaccagcatgtttggcagtgcaactacagacaatcacaatcccatgaaggatattgaagtaacatcatctcctgatgatagcattggttgtctgtcttttagcccaccaaccttgccggggaactttcttattgcaggatcatgggctaatgatgttcgctgctgggaagttcaagacagtggacagaccattccaaaagcccagcagatgcacactgggcctgtgcttgatgtctgctggagtgacgatgggagcaaagtgtttacggcatcgtgtgataaaactgccaaaatgtgggacctcagcagtaaccaagcgatacagatcgcacagcatgatgctcctgttaaaaccatccattggatcaaag

SEQ ID NO: 276760 - DNA, 691 bp, Artificial Sequence
  derived and/or modified sequence
gctggaaatggccttaggggtcacctagggcctaatccatcgtttctcttgtgggggaactgagcctctgggaagggtcacattgcgttaatgcagtgtgtgtcgcctctgtccctcccccttacacgtctggcgtctcgtcagatacatgtcagctcctgggagaagctttccctggccgctttgcagaagggcgtccccttttagcctcttccacgtcaacctgctccatttctttcgtagcagttaccagtctctgaaactaagtctgtttctgtcttagcccgccaagtatttattgtatacgtatataggtgccaccgtacaggcagtacttctccaggcaagtagtattaaacaccagccgccctgggccaggcattgtactgtgggacccagtatgcattaagggaagaatccaggttcaaaatgagcctgtttggaacaacctcaggttttggaaccagtgggaccagcatgtttggcagtgcaactacagacaatcacaatcccatgaaggatattgaagtaacatcatctcctgatgatagcattggttgtctgtcttttagcccaccaaccttgccggggaactttcttattgcaggatcatgggctaatgatgttcgctgctgggaagttcaagacagtggacagaccattccaaaagcccagcagatgcacactgggc

SEQ ID NO: 276761 - DNA, 591 bp, Artificial Sequence
  derived and/or modified sequence
cgacgaagacgcaaacgcagaacccctatgagtcggcgctccctctgtcggccaacccattcctccagcgagacactgaggcccccaagtcgcgtgaggacacccgttcctctgtccgtgacctgtcccaaaagctggccaccatgtggaaccgcttgggaaagaaatcggagccgcacaagtaggacgtcgcttagcagcccagctgcgcgtgaccccgcccacctggcacaccccaccccgccagctgctggcacaggaactgctgctacgcccgtcggatcggtggcctctgctcccgctgcgtgctctcctgggactaaccgcagcaccagcccgaatcctgcatcactgccatcgctgagactcgcagggcggcactgtagcgagcccgaaggtctgactgcggagaaacggccatggccagaggccgggtggccgattggcgagtcctccgatacacccatcgctcgggggctctcactgttccttaatctgccccctgactctgctgaagccgcccattgtccgccaccggctcaaagaacgtgtaggaacctccctcccgctgatctgttggcaccgggctag

SEQ ID NO: 276762 - DNA, 537 bp, Artificial Sequence
  derived and/or modified sequence
atgtccgatggtaatcctgagctgctgtcaaccagtcagacttacaatggacaatctgaaaataatgaagattatgagataccacccattactccacccaatctccctgaacccagcctgctccacctgggcgatcacgaagccagttatcactctctctgtcacggccttaccccaaatggtcttctgcctgcctactcctaccaggctatggacctgcccgccattatggtgagtaacatgttggcacaggactctcatttattatctgggcaattgcctacaattcaggagatggtgcatagcgaagtggccgcctacgatagcggcagaccaggcccgctcctgggacgtcctgctatgctggcatctcatatgtctgccctaagtcagtctcagcttatttctcagatgggtatccggtcaagcatcgcccattcctcacccagccccccggggagcaaatcagccacgccttctccgagtagttctactcaggaagaagagtcagaggttcatttcaagatttcggggtag

SEQ ID NO: 276763 - DNA, 537 bp, Artificial Sequence
  derived and/or modified sequence
atgtctgatggcaaccctgagctgctgagcaccagccagacctacaacggccagagcgagaacaatgaagattatgagatcccccccatcaccccacccaacctgcctgagcccagcctgctgcacctgggggaccacgaggccagctaccacagcctgtgccacggcctgacccccaacggcctgctgcctgcctacagctaccaggccatggacctgcctgccatcatggtgagcaacatgctggcccaggacagccacctgctgagcggccagctgcccaccatccaggagatggtgcacagcgaggtggccgcctatgattctggccggcccggccccctgctgggccgcccagccatgctggccagccacatgtctgccctgagccagagccagctgatcagccagatgggcatccgcagcagcatcgcccacagcagccccagccccccaggcagcaagagcgccacccccagccccagcagcagcacccaggaggaggagagcgaggtgcacttcaagatctctggatag

SEQ ID NO: 276764 - DNA, 591 bp, Artificial Sequence
  derived and/or modified sequence
cggcggcggcggaagcggcggacccccatgagccggcggagcctgtgtcgcccaacccattcttcctccgagactttgcggcctccctcacgcgtgaggacccccgtccccctgtctgtgacctgtcccaaatcgtggcctccgtgtggcaccgcttgggaacggaaccgctcaagaacttctcgcacatccttaagcagcccagccgcaagggatcctgcccatcttgctcatcctaccccccccgcagccgggaccggcactgccgctacacctgtgggaagtgtggcctccgcgcctgctgcgtgcagtcctggcacaaaccggtccacttccccaaatcccgctagcctaccatctcttcggctggcggggagacactgttccgagcccgaggggttgaccgccgagaagaggccttggccggaggccggctggcctatcggagagtcaagtgacaccccgatcgcccggggactgtcgctctttctgaacctgcctccggactccgccgaagctgcccactgtccgccccccgcacagagaacatgccgcaaccttcctccagccgatcttctagcacccggttag

SEQ ID NO: 276765 - DNA, 537 bp, Artificial Sequence
  derived and/or modified sequence
atgagcgacggcaaccccgagctgctgagcaccagccagacctacaacggacaatcggaaaacaatgaagactatgaaatcccacccattacgcctcctaaccttcccgaaccatctttactccacctgggggatcacgaagcctcctatcattcactctgccacggcctgacccccaacggcctcctgcccgcttactcatatcaggccatggacttgccagctattatggttagtaatatgctggcccaggacagccacttgttgagcgggcagttaccaactattcaggagatggtacattcagaagtcgcggcatacgactccggtcggccagggcctctcctcgggcgacccgccatgttggctagtcatatgtccgctctgtcacagtcccagctcatttcacaaatgggcatcagaagtagtatcgcccacagctctccaagccctcctggcagcaagagtgcaacaccatcgccctccagttcgactcaggaagaggaaagcgaagtgcactttaaaataagtggctag

SEQ ID NO: 276766 - DNA, 2010 bp, Artificial Sequence
  derived and/or modified sequence
actgcccgcgggagccgccgccgccgccgccgcgcccgccatggacgtccgcctgtacccctcggcgcccgcggtgggcgcgcggcccggggccgagccggccggcctggcgcacctggactattaccacggcggcaagtttgatggtgacagtgcctacgtggggatgagtgacggaaacccagagctcctgtcaaccagccagacctacaacggccagagcgagaacaacgaagactatgagatccccccgataacacctcccaacctcccggagccatccctcctgcacctgggggaccacgaagccagctaccactcgctgtgccacggcctcacccccaacggtctgctccctgcctactcctatcaggccatggacctcccagccatcatggtgtccaacatgctagcacaggacagccacctgctgtcgggccagctgcccacgatccaggagatggtccactcggaagtggctgcctatgactcgggccggcccgggcccctgctgggtcgcccggcaatgctggccagccacatgagtgccctcagccagtcccagctcatctcgcagatgggcatccggagcagcatcgcccacagctccccatcaccgccggggagcaagtcagcgaccccctctccctccagctccactcaggaagaggagtcggaagtgcatttcaagatctcgggagaaaagagaccttcagccgacccaggaaaaaaggccaagaacccgaagaagaagaaaaagaaggaccccaatgagccgcagaagcctgtgtcggcctacgcactcttcttcagagacactcaggccgccatcaagggtcagaaccccagtgccactttcggtgacgtgtccaaaatcgtggcctccatgtgggacagcctgggagaggaacagaagcaggacttcccgcacatctctgagttccccagcagctcgggatcctgctcacctggcccatccaaccccaccagcagcggggactgggacagcagctaccccagtggggagtgtggcatcagcacctgcagcctgctccccagggacaaatcgctctacctcacctaatcccgcctccctaccatccctgaggctcgctggaaggcactgctcagagcctgaagggctgacagcagaaaagaggccctggccagaggcagggtggcccatcggagagagcagtgacacacccattgcccgggggctgagtctcttcctcaacctcccaccagactctgcagaggcagcccactgcccaccaccagcccaaagaacctgcaggaaccttccgcccgctgacctgcttgctccagggtaactgtggaccctgtcctcgccctgcgcacggtaccctatgtctggacacccggccccagctccagccccagcccaggtgggccgcccctggcggggtcgcttaccaacggacacccaccccagatgcatgggccagagggccggcccccggcatagatgtgcacatcggttttccagtgtgaacaaaagattacgaaacctagaaactgttggttccgtgtaagtagttgactacgtgttttagaactgtgctgaagacatctgtaagactattttgtgggggaaaaaagtagtttcctttaaggtaaaaagcattttatatgatccttagcacatttttaagttttatcttaagggagacgcgcacaaaagcggctgccaaaccgtttcgtcatcctcacagcaaggaccggacgcttgctagccaccccggagcactgctctccttttaatcatgtattcatctattttaaattgccggcgacgacttttgtctatttatgaagaaaccttgagaacgaagttacagcttatcctaccgtgtgtgtggttttggggtttcgtttgggtttgggttcttgacgtcgtttgcagctgtttcctggccctggcgagtgtctgtcttggtgcccagtgcttctctcaaatctctttataataaaacttctgaaaagctg

SEQ ID NO: 276767 - DNA, 1271 bp, Artificial Sequence
  derived and/or modified sequence
cgaagaagaagaaaaagaaggaccccaatgagccgcagaagcctgtgtcggcctacgcactcttcttcagagacactcaggccgccatcaagggtcagaaccccagtgccactttcggtgacgtgtccaaaatcgtggcctccatgtgggacagcctgggagaggaacagaagcaggacttcccgcacatctctgagttccccagcagctcgggatcctgctcacctggcccatccaaccccaccagcagcggggactgggacagcagctaccccagtggggagtgtggcatcagcacctgcagcctgctccccagggacaaatcgctctacctcacctaatcccgcctccctaccatccctgaggctcgctggaaggcactgctcagagcctgaagggctgacagcagaaaagaggccctggccagaggcagggtggcccatcggagagagcagtgacacacccattgcccgggggctgagtctcttcctcaacctcccaccagactctgcagaggcagcccactgcccaccaccagcccaaagaacctgcaggaaccttccgcccgctgacctgcttgctccagggtaactgtggaccctgtcctcgccctgcgcacggtaccctatgtctggacacccggccccagctccagccccagcccaggtgggccgcccctggcggggtcgcttaccaacggacacccaccccagatgcatgggccagagggccggcccccggcatagatgtgcacatcggttttccagtgtgaacaaaagattacgaaacctagaaactgttggttccgtgtaagtagttgactacgtgttttagaactgtgctgaagacatctgtaagactattttgtgggggaaaaaagtagtttcctttaaggtaaaaagcattttatatgatccttagcacatttttaagttttatcttaagggagacgcgcacaaaagcggctgccaaaccgtttcgtcatcctcacagcaaggaccggacgcttgctagccaccccggagcactgctctccttttaatcatgtattcatctattttaaattgccggcgacgacttttgtctatttatgaagaaaccttgagaacgaagttacagcttatcctaccgtgtgtgtggttttggggtttcgtttgggtttgggttcttgacgtcgtttgcagctgtttcctggccctggcgagtgtctgtcttggtgcccagtgcttctctcaaatctctttataataaaacttctgaaaagctgaaaa

SEQ ID NO: 276768 - DNA, 591 bp, Artificial Sequence
  derived and/or modified sequence
aggcgaagacgcaaacggaggactccaatgagccgacgtagtctgtgtcgccctacccactcctcctccgagacactccggcctccctccagagtgcgaacgccagtccctctttctgtgacctgtcccaaatcatggcccccttgcggaaccgcctgggaacgcaaccgcagccgcacctctaggacctcccttagcagtccagctgcacgagacccagcccacctcgcccacccaactccacctgctgcaggcacagggacggctgcaactcccgtgggttctgtcgccagcgctcctgccgcttgttccccagggactaacaggtccacatctccaaaccctgcctcgctgccttctctaaggctggcagggagacactgctctgaaccagagggcctgactgcagaaaaacggccttggcccgaagccggatggccaatcggagagagtagcgataccccaatcgcccgtgggttatctctctttcttaatcttccccctgactctgcagaggctgcccactgcccacctcccgctcagagaacctgtcggaatctcccccctgctgaccttctggctcccggttag

SEQ ID NO: 276769 - DNA, 591 bp, Artificial Sequence
  derived and/or modified sequence
cgacgcagacgcaaaagaagaactcctatgagtagacggagcctctgtcggcctacgcacagttcatccgaaacactgcggccaccctctagggttaggaccccagtgccactgtctgtcacttgccccaagtcttggcccccttgtgggactgcgtgggagcgtaaccggtcgcgcactagtaggacaagcttgagctcccccgctgctcgggatcctgcccacctggcacaccccacacctccagcggcaggtaccgggaccgctgcaactcctgtgggaagcgtggcgtctgcccctgcagcctgtagccccggaactaatagatctacatctcccaacccagcctccttaccatctctgaggctcgctgggagacactgcagtgaacccgagggcctaacagctgagaagcgaccttggccggaagcaggctggccgattggagagagctccgacacccctatcgccagaggactgagcctctttctgaaccttcctcctgattctgctgaggccgcacactgtcctcccccagcgcagagaacatgtaggaacttgcccccagcggacctcctcgcaccgggatag

SEQ ID NO: 276770 - DNA, 537 bp, Artificial Sequence
  derived and/or modified sequence
atgtcagatgggaaccctgagctgctgagcactagccaaacatacaacggccaatcagaaaataatgaagattacgaaatacctcccatcacgccgccaaacctccctgagcccagcttgctgcacttgggagaccacgaggcgagttaccacagcctgtgtcacggcctgacccccaatggcctgttgcctgcctattcttaccaagccatggacctgccggctatcatggtctctaacatgctagctcaggattcccacctgttgagcggccaactcccaacaatccaggagatggtccactcagaagtggctgcctacgactccggcagacctggccctcttctcggaaggcccgctatgctcgcgagtcatatgagcgctctgagtcaatcacagctgatcagtcaaatggggatccgatcctccatcgcccatagttcaccgagccctccaggatccaagagcgctacccccagtccctcttcttccactcaggaagaggaatctgaggtgcactttaaaatctccggctag

SEQ ID NO: 276771 - DNA, 537 bp, Artificial Sequence
  derived and/or modified sequence
atgagcgacggcaaccccgagctgctgagcaccagccagacctacaacggccagagcgagaacaacgaggactacgagatcccccccatcaccccccccaacctgcccgagcccagcctgctgcacctgggcgaccacgaggccagctaccacagcctgtgccacggcctgacccccaacggcctgctgcccgcctacagctaccaggccatggacctgcccgccatcatggtgagcaacatgctggcccaggacagccacctgctgagcggccagctgcccaccatccaggagatggtgcacagcgaggtggccgcctacgacagcggcagacccggccccctgctgggcagacccgccatgctggccagccacatgagcgccctgagccagagccagctgatcagccagatgggcatcagaagcagcatcgcccacagcagccccagcccccccggcagcaagagcgccacccccagccccagcagcagcacccaggaggaggagagcgaggtgcacttcaagatcagcggctag

SEQ ID NO: 276772 - protein, 614 aa, Artificial Sequence
  derived and/or modified sequence
MGNQMSVPQRVEDQENEPEAETYQDNASALNGVPVVVSTHTVQHLEEVDLGISVKTDNVATSSPETTEISAVADANGKNLGKEAKPEAPAAKSRFFLMLSRPVPGRTGDQAADSSLGSVKLDVSSNKAPANKDPSESWTLPVAAGPGQDTDKTPGHAPAQDKVLSAARDPTLLPPETGGAGGEAPSKPKDSSFFDKFFKLDKGQEKVPGDSQQEAKRAEHQDKVDEVPGLSGQSDDVPAGKDIVDGKEKEGQELGTADCSVPGDPEGLETAKDDSQAAAIAENNNSIMSFFKTLVSPNKAETKKDPEDTASKAESVCDGQAGQKTSEIQARGTKKKHLDSPRLGLAFRKFFRHKGAEKSPTTSADLKSDKANFTSQETQGAGKNSKGCNPSGHTQSVTTPEPAKEGTKEKSGPTSLPLGKLFWKKVVCESPVEIIKSKEVESALQTVDLNEGDAAPEPTEAKLKREESKPRTSLMAFLRQMTSDSTEKTITPPEPEPTGAPQKGKEGSSKDKKSAAEMNKQKSNKQEAKEPAQCTEQATVDTNSLQNGDKLQKRPEKRQQSLGGFFKGLGPKRMLDAQVQTDPVSIGPVGKSKYTGKCVFSHVKKKWPFQEWSY

SEQ ID NO: 276773 - DNA, 1845 bp, Artificial Sequence
  derived and/or modified sequence
atgggcaaccagatgtcagttccgcagcgtgttgaggatcaagagaacgaaccagaggctgagacataccaagataacgctagcgctctcaacggtgtgccagtcgtggtctccacccatacggtgcagcacttagaagaagtggatcttgggatctctgtgaagacagacaacgtcgccacctcctctccagaaaccacagagataagcgccgtggcagatgccaacggcaagaatcttggaaaggaggccaaacccgaggcccccgctgccaagtcccgctttttcctgatgctgtcccgccctgtgccgggaagaacaggagaccaagccgcggattccagccttggcagcgtgaagttggatgtcagtagcaacaaagcccctgccaacaaagaccccagcgaatcttggactttgcctgtggcagcgggtccaggacaggacacagacaaaactcctggacacgcccccgcccaggacaaagtcctgtctgccgcccgggatccgaccctcctcccaccagagactggaggcgcaggcggcgaagccccaagcaaacccaaggatagctccttctttgacaagttttttaagttggacaagggtcaggaaaaagtccccggagacagtcaacaagaggcaaaacgggccgagcaccaggacaaagtggacgaggtgccagggttgagcggccagtccgatgacgtaccagccggtaaggatatagttgatggcaaagaaaaagaggggcaggaactgggtaccgcagactgttcagtaccgggagaccccgagggattggagactgctaaggacgattcccaggctgcagccatcgccgagaataataactcgataatgagttttttcaagacattggtcagccctaacaaagctgagacgaaaaaggatcctgaggacacggcatccaaggccgaaagtgtttgtgatggccaggccgggcaaaaaacatcagaaattcaagcaaggggcactaaaaaaaagcatcttgattcaccaagactggggctagctttccgcaaattttttagacataaaggcgccgagaagtcaccaacaaccagcgcggacttgaagtccgacaaggctaatttcaccagccaggagacccagggagctggtaagaactccaagggctgcaatccttccgggcatacgcaaagcgtcacgacacctgagccagctaaagagggcaccaaagagaaaagcggtcctacaagcctgcctctcggcaaactattttggaaaaaagtggtttgcgagagtcctgtggaaattattaaatctaaggaggttgaatcagccctccagacagtggatctcaacgagggtgatgcggccccggagcccaccgaagccaaactgaagcgtgaggagagcaagcccagaacctctcttatggcctttctcaggcaaatgactagcgattccactgagaagacgattacaccccccgagccagagcccactggggcgccacagaaaggtaaggaggggagctcgaaagataagaaaagcgccgcagagatgaacaagcaaaaaagtaataaacaggaagctaaggagccagctcagtgcaccgaacaggcaactgtggatactaactcactccagaacggagacaagctccagaaaaggccggaaaagcgtcagcagagtcttggtgggttctttaagggacttggccctaagcggatgctggacgctcaagtacaaaccgatcctgtatccatcgggcctgtaggaaaaagcaaatacaccggaaagtgcgtgttttctcatgtcaaaaagaaatggcctttccaagaatggtcctactag

SEQ ID NO: 276774 - DNA, 1845 bp, Artificial Sequence
  derived and/or modified sequence
atgggcaaccagatgtctgtgccccagagggtggaggaccaggagaatgaacctgaggccgagacctaccaggacaatgccagcgccctgaatggagtgcctgtggtggtgtccacccacacagtgcagcacctggaggaggtggacctgggcatctctgtgaagacagacaacgtggccaccagcagccctgagaccacagagatctctgctgtggctgatgccaacgggaagaacctgggcaaggaggccaagccagaggccccagctgccaagagccgcttcttcctgatgctgagcaggcctgtgcccggccgcactggagaccaggccgctgacagcagcctgggctctgtgaagctggatgtgagcagcaacaaggccccagccaacaaggaccccagcgagagctggaccctgcctgtggccgccggccctggccaggacacagacaagaccccaggccacgccccagcccaggacaaggtgctgtctgctgcccgggaccccaccctgctgcccccagagactggaggagctggaggagaggcccccagcaagcccaaggacagcagcttctttgacaagttcttcaagctggacaagggccaggagaaggtgcctggggacagccagcaggaggccaagagagctgagcaccaggacaaggtggatgaggtgcccggcctgagcggccagagtgatgatgtgcctgctgggaaggacatcgtggatggcaaggagaaggagggccaggagctgggcacagctgactgcagcgtgcctggggaccctgagggcctggagacagccaaggatgacagccaggccgccgccatcgccgagaacaacaacagcatcatgtccttcttcaagaccctggtgagccccaacaaggccgagaccaagaaggaccctgaggacacagccagcaaggccgagagcgtgtgtgatggccaggccggccagaagaccagcgagatccaggcccggggcaccaagaagaagcacctggacagcccccggctgggcctggccttcaggaagttcttccgccacaagggagctgagaagagccccaccaccagcgctgacctgaagagtgacaaggccaacttcaccagccaggagacccagggcgccggcaagaacagcaagggctgcaaccccagcggccacacccagagcgtgaccaccccagagcccgccaaggagggcaccaaggagaagagcggccccaccagcctgcccctgggcaagctgttctggaagaaggtggtgtgtgagagccctgtggagatcatcaagagcaaggaggtggagagcgccctgcagacagtggacctgaatgaaggagatgctgcccctgagcccacagaggccaagctgaagcgggaggagagcaagcccaggaccagcctgatggccttcctgcggcagatgaccagtgacagcacagagaagaccatcaccccacctgagcctgagcccaccggggccccccagaagggcaaggagggcagcagcaaggacaagaagtctgctgctgagatgaacaagcagaagagcaacaagcaggaggccaaggagcccgcccagtgcacagagcaggccaccgtggacaccaacagcctgcagaatggagacaagctgcagaagaggcctgagaagaggcagcagagcctgggcggcttcttcaagggcctgggccccaagaggatgctggatgcccaggtgcagacagatcctgtgtccatcggccctgtgggcaagagcaagtacacaggaaaatgtgtgttcagccacgtgaagaagaagtggcccttccaggagtggagctactag

SEQ ID NO: 276775 - DNA, 1845 bp, Artificial Sequence
  derived and/or modified sequence
atgggcaaccagatgagcgtgccccagcgggtggaggaccaggagaacgagcccgaagccgaaacatatcaggacaacgccagtgccttaaacggcgtcccagttgtggtcagcactcacacagtgcagcacctagaagaggtggatttggggatatctgtgaagacagataatgtcgccacaagtagccccgaaaccacagagatctctgctgtagccgatgcgaatggcaaaaacctcgggaaagaggcaaaaccggaggcgcctgccgcaaaatcccggtttttcctgatgctcagtaggcctgtgccggggagaacgggtgaccaagcagccgactcctctctgggcagcgtgaaactggacgtgagcagcaataaagctccagcgaacaaagatccgagtgagtcctggaccctccccgttgccgctggacccggacaggatacagacaagacccctggacacgcccctgcccaggataaagtcctctcggcagcacgagatccgacactgctaccccctgaaactggtggggccggcggggaagccccgtcaaaacccaaggattcttccttctttgataaattcttcaaactggataagggccaggagaaagtgcccggtgattcccagcaggaggcaaaacgtgccgagcaccaggataaggtggatgaagtgcccgggttatctgggcaatccgatgacgttcccgcaggaaaggatatcgtggatggcaaagaaaaggagggccaagagctcggaactgcagattgcagcgttccaggcgaccccgagggactcgagacagccaaggacgactctcaggctgcagctattgcggagaataacaacagcatcatgtcattctttaaaacactggtgtctccaaataaggccgaaaccaaaaaagaccccgaggatacagctagtaaagccgagtctgtctgcgatggccaggccggacaaaaaacgagtgagatacaggcccgaggtacaaaaaagaagcatcttgatagtcctcgcctgggtcttgcctttcgcaagttctttcgacacaagggggcagagaaaagccccactacttcagccgacctgaagagtgacaaggccaatttcacatcacaggagactcaaggtgctggcaagaatagtaaggggtgcaatccgtcagggcacacacaaagcgtcaccacacctgaacccgcgaaagaggggaccaaagagaagagtggtcctacgtcgttgccactcgggaaactattctggaaaaaagtggtttgtgagagtccagtggaaatcatcaaatccaaagaggtagagagtgccctccagactgtcgacctcaatgaaggggatgcagcacccgaacctacagaggctaagctgaaacgcgaggaatccaaaccacggacctctttaatggcattcttgcggcaaatgacgagtgattcaaccgagaagacaatcacacctcctgaaccagagccaacaggtgctccgcaaaaagggaaggaaggctcatctaaggacaaaaaaagcgcggcagaaatgaataaacagaaatcaaacaagcaagaggccaaagaaccggcacagtgcacggaacaggccacagtagacacaaacagcctgcagaatggcgacaagctgcagaagcggccggagaagaggcagcagagcttagggggcttttttaagggtctcggaccgaagagaatgctcgatgcgcaggtgcagaccgatcccgtgtccatcgggcctgttgggaagtccaagtacaccggaaagtgcgtttttagtcacgtgaagaaaaagtggcccttccaggagtggtcatattag

SEQ ID NO: 276776 - DNA, 1845 bp, Artificial Sequence
  derived and/or modified sequence
atgggaaaccagatgtccgtcccccagcgggtcgaggaccaagaaaatgaaccagaagcagaaacttaccaggataacgcctcagctctcaatggagtgcccgtggtggtctccacacatactgtgcagcatctggaggaggttgatctcgggatatcagtaaagaccgacaatgtcgctacaagtagccccgagaccaccgaaataagcgccgtggctgacgccaatggaaaaaatctgggaaaggaggcaaagcccgaggcacctgcagctaagtcccgattctttttaatgctttcccggccagtgccaggtagaacgggcgaccaggctgcagatagttccctcgggtcagtaaagctggacgtgtcttccaataaagcccctgccaacaaagacccttctgaatcctggacactgccagttgcagccggtccaggccaggacactgacaaaacccccggacacgcaccagctcaagataaggtgctgtcagctgctcgcgaccccaccctgctgccacctgagaccggtggcgcagggggagaggctccatccaaaccaaaggattcctctttcttcgacaagttcttcaagctggataaggggcaggagaaggttccgggagattcccagcaagaggcgaagagagcagagcaccaggacaaggttgacgaggtgcccggactaagcgggcagtcagacgatgtgcctgcaggtaaagatatcgtggacggtaaagaaaaagaggggcaggaactgggtaccgccgactgctcggtgcccggagatcctgaaggtctcgaaacggcaaaggacgattctcaggccgcagcgatcgccgagaataacaattctataatgtctttcttcaagacccttgtgagtcccaacaaggcagagactaagaaggatccagaggatacagccagcaaggccgagagcgtttgcgacgggcaggccggacagaagacctcggaaatacaggcaagaggaaccaagaaaaaacacctggactcacctcgtctgggcctggcctttaggaagttttttcggcataagggcgctgagaaatctcccacgaccagcgccgacctgaagtccgacaaagccaactttacctcacaagaaacacagggcgcaggcaaaaattctaagggatgtaacccctccggacatacgcaatcagtgaccactcccgaaccagccaaggaagggaccaaggagaagtccggaccgaccagcctgcccttaggtaagcttttctggaaaaaggttgtatgcgaatcccccgttgagatcattaagtccaaagaggtggaaagtgctctccagacagtggatctaaacgagggggacgccgcaccagagccaacagaagcgaagctcaagcgcgaggaatcaaagcccaggacatctctcatggctttcctccgccaaatgacttcggattccacggaaaagaccattactccaccggagccggaaccaactggggctccacaaaagggcaaggaagggtcttctaaagataagaagtcagcagccgagatgaacaagcaaaaaagtaataaacaggaggccaaagaacccgcacagtgtaccgaacaggccaccgttgataccaattctctccagaacggcgataagttgcagaagcggcctgaaaagcgacagcaatccctgggagggtttttcaaggggctggggcctaaacgcatgctggacgctcaagtacagactgatccagtgtccattggtcccgtgggtaaaagtaaatacacaggaaaatgcgtgttctcccatgtcaagaagaaatggccatttcaggaatggagctattag

SEQ ID NO: 276777 - DNA, 2183 bp, Artificial Sequence
  derived and/or modified sequence
actgggtagaatacttggggtgccagggaggcattaatgcgagaggagtcaggtgctcagtttttattggagttgggagggcagccccacatcaggaagagaacctgtttctgcaggatggtccggggagaagggaggactccacccaggcttgtgtttgccctgctctgtgtattcagccagcaggctctgcacaaggaagcaaagtgcagggagccaggctccaccgacagccaggcactgggcagcacgcactggagacccaggaccctgtgcaggagcagctccgggtgacacgaggggactgaagatactcccacaggggctcagcaggagcaatgggtaaccaaatgagtgttccccaaagagttgaagaccaagagaatgaaccagaagcagagacttaccaggacaacgcgtctgctctgaacggggttccagtggtggtgtcgacccacacagttcagcacttagaggaagtcgacttgggaataagtgtcaagacggataatgtggccacttcttcccccgagacaacggagataagtgctgttgcggatgccaacggaaagaatcttgggaaagaggccaaacccgaggcaccagctgctaaatctcgttttttcttgatgctctctcggcctgtaccaggacgtaccggagaccaagccgcagattcatcccttggatcagtgaagcttgatgtcagctccaataaagctccagcgaacaaagacccaagtgagagctggacacttccggtggcagctggaccggggcaggacacagataaaaccccagggcacgccccggcccaagacaaggtcctctctgccgccagggatcccacgcttctcccacctgagacagggggagcaggaggagaagctccctccaagcccaaggactccagcttttttgacaaattcttcaagctggacaagggacaggaaaaggtgccaggtgacagccaacaggaagccaagagggcagagcatcaagacaaggtggatgaggttcctggcttatcagggcagtccgatgatgtccctgcagggaaggacatagttgacggcaaggaaaaagaaggacaagaacttggaactgcggattgctctgtccctggggacccagaaggactggagactgcaaaggacgattcccaggcagcagctatagcagagaataataattccatcatgagtttctttaaaactctggtttcacctaacaaagctgaaacaaaaaaggacccagaagacacggcatcgaaagcagaaagtgtctgtgatggacaagctggtcagaagacatccgagatccaggctagaggcaccaagaaaaagcacctggatagccccaggctaggactcgcctttagaaaattctttaggcataagggtgctgaaaagtcacccaccacttcagctgaccttaagtcagacaaagccaactttacatcccaggagacccaaggggctggcaagaattccaaaggatgcaacccatcggggcacacacagtccgtgacaacccctgaacctgcgaaggaaggcaccaaggagaaatcaggacccacctctctgcctctgggcaaactgttttggaaaaaggtggtgtgtgagtcaccagtagagattataaagtccaaggaagtagaatcagccttacaaacagtggacctcaacgaaggagatgctgcacctgaacccacagaagcgaaactcaaaagagaagaaagcaaaccaagaacctctctgatggcgtttctcagacaaatgacatcagactccacagaaaagactatcacaccgccagagcctgaaccaacaggagcaccacagaagggtaaagagggctcctcgaaggacaagaagtcagcagccgagatgaacaagcagaagagcaacaagcaggaagccaaagaaccagcccagtgcacagagcaggccacggtggacacgaactcactgcagaatggggacaagctccaaaagagacctgagaagcggcagcagtcccttgggggcttctttaaaggcctgggaccaaagcggatgttggatgctcaagtgcaaacagacccagtatccatcggaccagttggcaaatccaagtacacagggaagtgtgtcttctcccatgtcaagaagaagtggcctttccaggaatggagctattga

SEQ ID NO: 276778 - DNA, 1845 bp, Artificial Sequence
  derived and/or modified sequence
atgggcaaccagatgagcgtgccccagagagtggaggaccaggagaacgagcccgaggccgagacctaccaggacaacgccagcgccctgaacggcgtgcccgtggtggtgagcacccacaccgtgcagcacctggaggaggtggacctgggcatcagcgtgaagaccgacaacgtggccaccagcagccccgagaccaccgagatcagcgccgtggccgacgccaacggcaagaacctgggcaaggaggccaagcccgaggcccccgccgccaagagcagattcttcctgatgctgagcagacccgtgcccggcagaaccggcgaccaggccgccgacagcagcctgggcagcgtgaagctggacgtgagcagcaacaaggcccccgccaacaaggaccccagcgagagctggaccctgcccgtggccgccggccccggccaggacaccgacaagacccccggccacgcccccgcccaggacaaggtgctgagcgccgccagagaccccaccctgctgccccccgagaccggcggcgccggcggcgaggcccccagcaagcccaaggacagcagcttcttcgacaagttcttcaagctggacaagggccaggagaaggtgcccggcgacagccagcaggaggccaagagagccgagcaccaggacaaggtggacgaggtgcccggcctgagcggccagagcgacgacgtgcccgccggcaaggacatcgtggacggcaaggagaaggagggccaggagctgggcaccgccgactgcagcgtgcccggcgaccccgagggcctggagaccgccaaggacgacagccaggccgccgccatcgccgagaacaacaacagcatcatgagcttcttcaagaccctggtgagccccaacaaggccgagaccaagaaggaccccgaggacaccgccagcaaggccgagagcgtgtgcgacggccaggccggccagaagaccagcgagatccaggccagaggcaccaagaagaagcacctggacagccccagactgggcctggccttcagaaagttcttcagacacaagggcgccgagaagagccccaccaccagcgccgacctgaagagcgacaaggccaacttcaccagccaggagacccagggcgccggcaagaacagcaagggctgcaaccccagcggccacacccagagcgtgaccacccccgagcccgccaaggagggcaccaaggagaagagcggccccaccagcctgcccctgggcaagctgttctggaagaaggtggtgtgcgagagccccgtggagatcatcaagagcaaggaggtggagagcgccctgcagaccgtggacctgaacgagggcgacgccgcccccgagcccaccgaggccaagctgaagagagaggagagcaagcccagaaccagcctgatggccttcctgagacagatgaccagcgacagcaccgagaagaccatcaccccccccgagcccgagcccaccggcgccccccagaagggcaaggagggcagcagcaaggacaagaagagcgccgccgagatgaacaagcagaagagcaacaagcaggaggccaaggagcccgcccagtgcaccgagcaggccaccgtggacaccaacagcctgcagaacggcgacaagctgcagaagagacccgagaagagacagcagagcctgggcggcttcttcaagggcctgggccccaagagaatgctggacgcccaggtgcagaccgaccccgtgagcatcggccccgtgggcaagagcaagtacaccggcaagtgcgtgttcagccacgtgaagaagaagtggcccttccaggagtggagctactag

SEQ ID NO: 276779 - protein, 250 aa, Artificial Sequence
  derived and/or modified sequence
MSFFKTLVSPNKAETKKDPEDTASKAESVCDGQAGQKTSEIQARGTKKKHLDSPRLGLAFRKFFRHKGAEKSPTTSADLKSDKANFTSQETQGAGKNSKGCNPSGHTQSVTTPEPAKEGTKEKSGPTSLPLGKLFWKKTSDSTEKTITPPEPEPTGAPQKGKEGSSKDKKSAAEMNKQKSNKQEAKEPAQCTEQATVDTNSLQNGDKLQKRPEKRQQSLGGFFKGLGPKRMLDAQVQTDPVSIGPVGKSK

SEQ ID NO: 276780 - DNA, 753 bp, Artificial Sequence
  derived and/or modified sequence
atgtcatttttcaagactctggtcagtcctaataaggcggagaccaagaaggacccagaagatactgcctcaaaagccgagagtgtatgcgacggccaggccggacagaagaccagtgagattcaggcacggggaacaaaaaagaaacaccttgattccccgcggctgggattggcctttagaaagttttttcgccacaagggagccgagaagagtcccaccacttcagccgatctcaaaagtgataaagccaacttcacatcccaggagactcagggggccggcaagaatagcaaaggctgtaatccaagcggacacactcaatctgtgaccacgcctgagcccgcaaaagagggtactaaagaaaaatcaggtcctacatcattaccacttggtaagctgttttggaaaaaaacctctgatagcacagaaaaaaccatcaccccccccgagcctgaaccgaccggcgccccgcaaaaagggaaagagggtagttccaaagacaaaaagagcgccgcagaaatgaataaacagaagtctaacaagcaggaggccaaggaacccgcacagtgtacggagcaagctacagtcgatactaattccctgcagaacggcgataaattgcagaagcgcccagagaaacggcagcagtccttgggcgggtttttcaaaggcttaggtcccaaacggatgcttgacgcacaagtgcagactgacccagtgagtatcggcccggtgggcaagtcgaagtag

SEQ ID NO: 276781 - DNA, 753 bp, Artificial Sequence
  derived and/or modified sequence
atgtccttcttcaagaccctggtgagccccaacaaggccgagaccaagaaggaccctgaggacacagccagcaaggccgagagcgtgtgtgatggccaggccggccagaagaccagcgagatccaggcccggggcaccaagaagaagcacctggacagcccccggctgggcctggccttcaggaagttcttccgccacaagggagctgagaagagccccaccaccagcgctgacctgaagagtgacaaggccaacttcaccagccaggagacccagggcgctgggaagaacagcaagggctgcaaccccagcggccacacccagagcgtgaccaccccagagcccgccaaggagggcaccaaggagaagagcggccccaccagcctgcccctgggcaagctgttctggaagaagaccagtgacagcacagagaagaccatcaccccacctgagcctgagcccactggagccccccagaagggcaaggagggcagcagcaaggacaagaagtctgctgctgagatgaacaagcagaagagcaacaagcaggaggccaaggagcccgcccagtgcacagagcaggccaccgtggacaccaacagcctgcagaatggagacaagctgcagaagaggcctgagaagaggcagcagagcctgggcggcttcttcaagggcctgggccccaagaggatgctggatgcccaggtgcagacagatcctgtgtccatcggccctgtgggcaagagcaagtag

SEQ ID NO: 276782 - DNA, 753 bp, Artificial Sequence
  derived and/or modified sequence
atgagcttcttcaagaccctggtgagccccaacaaggccgagaccaaaaaggatcctgaggataccgcatctaaggctgagagcgtctgcgatggccaagcaggccagaagacatcagagattcaagccagagggaccaagaagaaacacctggactcaccccgcctcggcttggccttccgcaaattcttccggcacaagggggcggaaaagagtcctaccacaagcgctgatctgaaatctgacaaggccaactttacgagccaggagacacagggcgcaggaaagaattccaaggggtgtaatccttccggccacactcagtcagttaccacccctgaacccgccaaggagggcaccaaggaaaaaagcggcccaacgtcactgcccctgggcaagctcttttggaagaagacttctgatagtaccgagaaaacgatcaccccacccgaacctgagcctactggtgcgccacagaagggaaaagaagggagcagcaaagataagaaaagcgcagcagagatgaacaagcaaaagagcaacaagcaagaggctaaagaacctgcccagtgtacagaacaggcaacagttgacacaaactccctccagaatggggacaaactgcaaaagcggcctgaaaagcggcagcagtcactaggcggatttttcaagggtctgggtccgaagcgaatgctagatgcgcaagtgcagaccgaccctgtttcaattggcccagtcggaaaatctaaatag

SEQ ID NO: 276783 - DNA, 753 bp, Artificial Sequence
  derived and/or modified sequence
atgagctttttcaaaaccctcgtgtcccccaataaagcagaaacaaagaaagatccagaagataccgcctctaaagccgagtccgtgtgcgatggtcaggctgggcagaaaacctcagaaatccaagccaggggcacaaagaaaaagcatctcgattcccccagactaggcttggcttttcggaagttcttccggcacaagggggcagaaaaaagccccactaccagcgcggatctgaaatcggataaagccaatttcacctcacaggaaacccagggtgctggaaaaaattctaaaggttgcaacccctccgggcacactcagagtgtcaccacacccgagccagctaaggagggcactaaggaaaagagcggacccacctctctgccgctggggaagctgttttggaaaaaaacctccgacagtaccgagaaaactatcacaccgccagagcccgaacctactggggcaccacagaaaggtaaggagggtagttctaaagacaagaaaagtgccgcagaaatgaacaagcaaaaatccaataagcaagaagccaaagagcctgcgcagtgcacagagcaagctactgtggacaccaattcactgcagaacggggacaaattacagaaacgaccggagaaacggcagcagtctctggggggatttttcaaggggctgggaccgaagcgcatgctggacgcccaagtgcaaaccgaccctgtttccatcggaccagttggtaagtccaaatag

SEQ ID NO: 276784 - DNA, 1337 bp, Artificial Sequence
  derived and/or modified sequence
ataatctcatgattgttctgcacgcctgtgggcagaagaagtatggctggaattagggggtaagagagaaaggggtgtgaagcaaaagtatgactttgagagttcacattcagcaagtggcaactgtgacaactgttttgcccctaggacatagttgacggcaaggaaaaagaaggacaagaacttggaactgcggattgctctgtccctggggacccagaaggactggagactgcaaaggacgattcccaggcagcagctatagcagagaataataattccatcatgagtttctttaaaactctggtttcacctaacaaagctgaaacaaaaaaggacccagaagacacggcatcgaaagcagaaagtgtctgtgatggacaagctggtcagaagacatccgagatccaggctagaggcaccaagaaaaagcacctggatagccccaggctaggactcgcctttagaaaattctttaggcataagggtgctgaaaagtcacccaccacttcagctgaccttaagtcagacaaagccaactttacatcccaggagacccaaggggctggcaagaattccaaaggatgcaacccatcggggcacacacagtccgtgacaacccctgaacctgcgaaggaaggcaccaaggagaaatcaggacccacctctctgcctctgggcaaactgttttggaaaaagacatcagactccacagaaaagactatcacaccgccagagcctgaaccaacaggagcaccacagaagggtaaagagggctcctcgaaggacaagaagtcagcagccgagatgaacaagcagaagagcaacaagcaggaagccaaagaaccagcccagtgcacagagcaggccacggtggacacgaactcactgcagaatggggacaagctccaaaagagacctgagaagcggcagcagtcccttgggggcttctttaaaggcctgggaccaaagcggatgttggatgctcaagtgcaaacagacccagtatccatcggaccagttggcaaatccaagtaaacaaatcagcacggttcccaccaggttctcctgccaccaagatgtgttctccttactccatctcctccccaaacacgctccatgtatatattcttctgatggccagcaaatgaaattctgcctagaaattaagcccgagctgttgtatattgaggtgtattatttacgtctctggtccagtcttttctggcaaataacagtaaagatggtttagcaggtcacctagttgggtcagaagagtcgatgatcaccaagcaggaaagggagggaatagaggaatgtgttcgggttaagtgatg

SEQ ID NO: 276785 - DNA, 753 bp, Artificial Sequence
  derived and/or modified sequence
atgagcttcttcaagaccctggtgagccccaacaaggccgagaccaagaaggaccccgaggacaccgccagcaaggccgagagcgtgtgcgacggccaggccggccagaagaccagcgagatccaggccagaggcaccaagaagaagcacctggacagccccagactgggcctggccttcagaaagttcttcagacacaagggcgccgagaagagccccaccaccagcgccgacctgaagagcgacaaggccaacttcaccagccaggagacccagggcgccggcaagaacagcaagggctgcaaccccagcggccacacccagagcgtgaccacccccgagcccgccaaggagggcaccaaggagaagagcggccccaccagcctgcccctgggcaagctgttctggaagaagaccagcgacagcaccgagaagaccatcaccccccccgagcccgagcccaccggcgccccccagaagggcaaggagggcagcagcaaggacaagaagagcgccgccgagatgaacaagcagaagagcaacaagcaggaggccaaggagcccgcccagtgcaccgagcaggccaccgtggacaccaacagcctgcagaacggcgacaagctgcagaagagacccgagaagagacagcagagcctgggcggcttcttcaagggcctgggccccaagagaatgctggacgcccaggtgcagaccgaccccgtgagcatcggccccgtgggcaagagcaagtag

SEQ ID NO: 276786 - protein, 250 aa, Artificial Sequence
  derived and/or modified sequence
MRGTPKTHLLAFSLLCLLSKVRTQLCPTPCTCPWPPPRCPLGVPLVLDGCGCCRVCARRLGEPCDQLHVCDASQGLVCQPGAGPGGRGALCLLAEDDSSCEVNGRLYREGETFQPHCSIRCRCEDGGFTCVPLCSEDVRLPSWDCPHPRRVEVLGKCCPEWVCGQGGGLGTQPLPAQGPQFSGLVSSLPPGVPCPEWSTAWGPCSTTCGLGMATRVSNQNRFCRLETQRRLCLSRPCPPSRGRSPQNSAF

SEQ ID NO: 276787 - protein, 218 aa, Artificial Sequence
  derived and/or modified sequence
MRGTPKTHLLAFSLLCLLSKVRTQLCPTPCTCPWPPPRCPLGVPLVLDGCGCCRVCARRLGEPCDQLHVCDASQGLVCQPGAGPGGRGALCLCKQDPSFLALSLPCPLVSPAQNGARPGDPARPPVGWAWPPGCPTRTASADWRPSAACACPGPAHPPGVAVHKTVPSRAGLGMGTRCPPSPAGGPVPGPWADGRWSVPRPLAAGNTLAWVHHAEHQY

SEQ ID NO: 276788 - DNA, 1197 bp, Artificial Sequence
  derived and/or modified sequence
actaccctgtggtccctgaggagcattacactgagaagttttctcctattttgtctttcattctccacatcctcttttgttctagtgcatggcatgggaagccctctctaggaggatgctgtggccacacaagcgctggacgaaccgctggagtaggtgacttccaaggtgtcctgatgtagtagctattagacaagctcctgcatttggccagtaattagcatgctgctgcacattgccactaggtggtgctgctgctccattcccaagtaacccacatgcatccctggctggggtcagccttggggtttcccaagtgtagaggaatccatctctgtgcctgtggtaatggctggacaccaggtgagaccctgtctcaaaacaaaacagaaataacaaaaaataaggtgacttgctggaggccacatggctgtgagccaaatacaggtctgggttatcagggctcacatacttctaagtacaccctactgccttggaatctgctgaagaccaagcccctgcccccaagccatggcaaagaaggagggaaggaagcaaaggtgcccagcggggacaactcggggaggggcgaggtgcccagggcccaggaaggccaagcagcatgtggcagggcagcatcaggtgactcccaagaaggaatgaggagaggatgtgaggaaagagccacagcacagaggcctgctgttaggtcagcggagaccacggcccatgggacctggatctacccttgatgctaacaatgttctttggggaaaaaatctataatcacaaagtttctgcaactggactgtagtcatggttgcagaactgtatagatttactaggaaccatcaaattgttcacttacaatgggtaaattgtacagtacataggttatccctcagtaaagctgtatgaaatttatagtcatgaaactaatagtgacaaacgagctgggtaagtaggtctcagctgttctgtaggcactttgagaagaggaagagtagcatctcggttttaataaaagaaagcctggcccatggcgtccagcttctgcttgaatactttcagtgcccgggagctcagtatctcaaagcagcccactcctgtttaagagaactctaaaccttagaatgttgaaatacatcattattattctagtactgctgtgaaaaataaatgtctttgttttgccac

SEQ ID NO: 276789 - DNA, 753 bp, Artificial Sequence
  derived and/or modified sequence
atgagaggcacccccaagacccacctgctggccttcagcctgctgtgcctgctgagcaaggtgagaacccagctgtgccccaccccctgcacctgcccctggcccccccccagatgccccctgggcgtgcccctggtgctggacggctgcggctgctgcagagtgtgcgccagaagactgggcgagccctgcgaccagctgcacgtgtgcgacgccagccagggcctggtgtgccagcccggcgccggccccggcggcagaggcgccctgtgcctgctggccgaggacgacagcagctgcgaggtgaacggcagactgtacagagagggcgagaccttccagccccactgcagcatcagatgcagatgcgaggacggcggcttcacctgcgtgcccctgtgcagcgaggacgtgagactgcccagctgggactgcccccaccccagaagagtggaggtgctgggcaagtgctgccccgagtgggtgtgcggccagggcggcggcctgggcacccagcccctgcccgcccagggcccccagttcagcggcctggtgagcagcctgccccccggcgtgccctgccccgagtggagcaccgcctggggcccctgcagcaccacctgcggcctgggcatggccaccagagtgagcaaccagaacagattctgcagactggagacccagagaagactgtgcctgagcagaccctgcccccccagcagaggcagaagcccccagaacagcgccttctag

SEQ ID NO: 276790 - DNA, 657 bp, Artificial Sequence
  derived and/or modified sequence
atgagaggcacccccaagacccacctgctggccttcagcctgctgtgcctgctgagcaaggtgagaacccagctgtgccccaccccctgcacctgcccctggcccccccccagatgccccctgggcgtgcccctggtgctggacggctgcggctgctgcagagtgtgcgccagaagactgggcgagccctgcgaccagctgcacgtgtgcgacgccagccagggcctggtgtgccagcccggcgccggccccggcggcagaggcgccctgtgcctgtgcaagcaggaccccagcttcctggccctgagcctgccctgccccctggtgagccccgcccagaacggcgccagacccggcgaccccgccagaccccccgtgggctgggcctggccccccggctgccccaccagaaccgccagcgccgactggagacccagcgccgcctgcgcctgccccggccccgcccacccccccggcgtggccgtgcacaagaccgtgcccagcagagccggcctgggcatgggcaccagatgcccccccagccccgccggcggccccgtgcccggcccctgggccgacggcagatggagcgtgcccagacccctggccgccggcaacaccctggcctgggtgcaccacgccgagcaccagtactag

SEQ ID NO: 276791 - DNA, 753 bp, Artificial Sequence
  derived and/or modified sequence
atgagaggcacacccaaaacacatctgctggccttcagtttgttgtgcctgctgagcaaggtcaggacacagttgtgtccaaccccatgcacatgtccctggccgccgcctaggtgtccgctcggcgtcccacttgtgctagatggctgtggctgttgtagagtgtgcgctagaaggttgggtgagccttgcgaccagcttcacgtgtgtgacgcatcacaggggctagtctgtcagcctggcgcaggtcccggcggtcgtggggccctgtgcctactggcggaggacgatagctcatgtgaagttaatgggcggctgtaccgagagggtgagacctttcaaccacactgttccatcagatgccgctgtgaagatggaggtttcacttgcgtgcccctctgttctgaggatgtcaggctgcctagctgggactgtccccacccgagacgggttgaagtgctcggcaagtgctgccccgagtgggtgtgtgggcaagggggtgggttggggactcagcctctgccggcacaggggcctcagttctccggtctggtgtcaagccttccacctggcgtaccttgcccagagtggtcaacagcctgggggccctgttctactacctgtggcctcggcatggccactcgggttagcaaccagaatcgattttgcaggttagagactcagaggagactttgcctgagtaggccttgccccccgtctagagggaggagtccacagaattctgcattctag

SEQ ID NO: 276792 - DNA, 657 bp, Artificial Sequence
  derived and/or modified sequence
atgcgcggtacacctaaaacccacctgctggctttcagtctgctgtgtctgttatccaaagtacgtacgcaactgtgcccaaccccctgcacttgtccctggcccccccctcgatgtccacttggtgtgcctttggtcctcgacggctgcggctgttgtcgcgtgtgcgcaagaagactgggagaaccttgcgatcagctccatgtctgcgacgcgagccagggactggtatgtcagccaggtgcaggacccggcggacgaggtgcactttgtttatgcaagcaagacccgtcttttctggcactgtcactgccttgcccgcttgttagcccagcccagaatggcgcacggcctggggaccccgcccgacccccggttggttgggcatggccacccgggtgtccaactcgcaccgctagtgctgattggcgcccatctgccgcctgcgcctgtcccggccccgctcatccgccaggagtggccgtacacaagacagtgccatcaagggcagggctgggaatgggcactaggtgtccacccagccctgcagggggccccgtgcccggaccttgggcagacggaagatggtctgtgcctcgacctcttgccgccggcaatactctcgcatgggtacatcacgccgagcaccagtactag

SEQ ID NO: 276793 - DNA, 753 bp, Artificial Sequence
  derived and/or modified sequence
atgagggggaccccgaagacgcatctgctagccttctctctgctctgcctcctttctaaggtaagaactcaactgtgtcctacgccttgtacctgcccttggcccccaccaaggtgcccactaggagtgcccttggtcttagacggatgcggctgttgtagagtgtgtgctcggcgtctgggtgagccctgcgatcaactccatgtttgcgatgcctcacaggggctggtctgccagcctggcgctggtcctggtgggaggggagccctgtgcctactagctgaagacgattcatcatgcgaggtcaacggtagactgtatagagagggcgaaactttccaaccccactgctctattagatgtcggtgtgaggacggcggattcacatgcgtacccttgtgctccgaggacgtaaggcttccttcctgggattgcccgcaccctaggagggtcgaggtactgggtaagtgttgtcccgaatgggtgtgcgggcaaggtggtgggttgggcactcagccactgccagcccagggcccccagttcagcggcttagtctccagccttccacctggagtgccgtgcccagagtggtctaccgcgtggggaccatgctctactacctgtgggctgggcatggccaccagagtctcaaatcaaaacaggttttgtagacttgagacccagcgcaggctgtgtctgtcgaggccatgcccgccttctcgcggccgctccccgcagaatagcgccttctag

SEQ ID NO: 276794 - DNA, 753 bp, Artificial Sequence
  derived and/or modified sequence
atgaggggcacccccaagacccacctgctggccttcagcctgctgtgcctgctgagcaaggtgaggacccagctgtgccccaccccctgcacctgcccctggcccccaccccgctgccccctgggcgtgcccctggtgctggatggctgcggctgctgccgggtgtgtgcccggcggctgggggagccctgtgaccagctgcacgtgtgtgatgccagccagggcctggtgtgccagcccggggccggccctgggggccgcggggccctgtgcctgctggctgaagatgacagcagctgtgaggtgaatggccgcctgtaccgggagggggagaccttccagccccactgcagcatccgctgccgctgtgaagatggcggcttcacctgtgtgcccctgtgcagtgaagatgtgcggctgcccagctgggactgcccccaccccaggagagtggaggtgctgggcaagtgctgcccagagtgggtgtgtggccagggcggcggcctgggcacccagcccctgcctgcccagggcccccagttcagcggcctggtgagcagcctgcccccaggagtgccctgcccagagtggagcacagcctggggcccctgcagcaccacctgtggcctgggcatggccaccagggtgagcaaccagaaccgcttctgccgcctggagacccagaggcggctgtgcctgagccggccctgcccccccagccggggccgcagcccccagaacagcgccttctag

SEQ ID NO: 276795 - DNA, 657 bp, Artificial Sequence
  derived and/or modified sequence
atgaggggcacccccaagacccacctgctggccttcagcctgctgtgcctgctgagcaaggtgaggacccagctgtgccccaccccctgcacctgcccctggcccccaccccgctgccccctgggcgtgcccctggtgctggatggctgcggctgctgccgggtgtgtgcccggcggctgggggagccctgtgaccagctgcacgtgtgtgatgccagccagggcctggtgtgccagcccggggccggccctgggggccgcggggccctgtgcctgtgcaagcaggaccccagcttcctggccctgagcctgccctgccccctggtgtccccagcccagaatggagcccggcctggggaccctgcccggccccctgtgggctgggcctggcccccaggctgccccaccaggacagccagcgctgactggaggcccagcgctgcctgtgcctgccccggccctgcccaccccccaggagtggccgtgcacaagacagtgcccagccgggccggcctgggcatgggcacccgctgcccccccagccctgctgggggccctgtgcccggcccctgggcagatggccgctggagcgtgccccggcccctggccgccggcaacaccctggcctgggtgcaccacgccgagcaccagtactag

SEQ ID NO: 276796 - DNA, 753 bp, Artificial Sequence
  derived and/or modified sequence
atgcggggcacccccaagacccacctgctggccttcagcctgctgtgcttactgtcaaaagtgcgtacccaactgtgtcctaccccctgcacatgtccctggccccctccacgctgtcccctgggggtcccactcgttttagacggctgtggatgctgtcgggtctgtgcaaggagactgggggagccttgcgaccagcttcacgtctgcgatgccagtcaggggttggtgtgccaacccggggccggtcctggcggccgtggcgccctctgtctccttgccgaagacgactcttcttgcgaggtcaacggtcgactctatagagaaggggagacgtttcagccccactgttctataaggtgccggtgcgaggacgggggtttcacgtgcgttcctttgtgcagcgaagatgtgaggctgccctcttgggactgtccgcatccacggcgtgttgaagtcctgggtaaatgttgccctgagtgggtttgtggccagggaggcggactaggaacgcagccacttccagcacagggtccacagttctccggcctggtgtccagcctgccccctggggtgccatgtccggagtggagcaccgcctggggcccttgttctacaacatgtggactgggcatggccaccagggtttctaaccaaaataggttttgtagattagagacccagcggcgactgtgtttaagccggccgtgcccacccagccggggaagaagccctcagaatagcgcattctag

SEQ ID NO: 276797 - DNA, 657 bp, Artificial Sequence
  derived and/or modified sequence
atgcggggcacccccaagacccacctgctggccttcagcctgctgtgtctcctgtcaaaagttagaacccagctgtgtcctacaccttgcacttgcccatggccgcctcctcgctgcccactgggcgtcccgctggtgcttgacggatgtggatgctgtcgggtctgcgctagaagacttggggagccatgcgaccagttgcatgtctgcgacgcttcacaagggcttgtctgccagccaggagcgggccctggcggccgaggtgctctctgcctatgcaagcaggacccttccttcctggccttgtctctgccgtgtccactggtgtcccccgctcagaatggtgctaggcctggggatcctgccaggcctcccgtgggatgggcatggcccccaggatgtcccaccagaactgcctccgccgattggcgcccttcagcagcttgtgcctgtcctgggccagctcaccccccaggagttgcggtacacaaaacagttccatctcgcgccgggctcggtatgggcaccaggtgtcctccttcccctgccggaggccccgtcccggggccatgggcggatggacgttggagcgtgccccggcctctcgccgccggaaacactctggcctgggttcaccatgcggaacatcagtactag

SEQ ID NO: 276798 - DNA, 753 bp, Artificial Sequence
  derived and/or modified sequence
atgcggggcacccccaagacccacctgctggccttcagcctgctgtgccttctcagcaaggttaggactcagctgtgtccgaccccatgcacctgtccttggcctcctccccgctgtcccctgggagtcccccttgtgctcgacggctgtggatgttgtcgcgtgtgcgcgcgccgactgggagaaccctgtgatcagcttcacgtgtgtgatgcatcccagggtctcgtgtgccaacccggcgctggaccaggtgggcggggagcactgtgcctacttgcagaagacgacagttcgtgcgaagtgaatggtaggctgtatcgggagggcgagacgttccagccccactgttccatccgatgtcggtgtgaagatgggggattcacctgcgttcctctgtgcagtgaagacgtccgcctaccctcctgggactgcccacaccccagaagagtggaagtactggggaaatgctgccctgagtgggtctgtggccaggggggcggcctgggcacacagccactgccagcccaaggaccacaattcagcgggctcgtgtcaagtctgcctcccggtgtcccttgtccagagtggtcaacggcttggggcccctgctcaacaacatgtggattaggcatggccacaagagtgagcaaccagaaccgattctgccgcctggagactcagagaagactgtgcctgagtcgcccctgccctccttccaggggaagatccccccagaattccgcattttag

SEQ ID NO: 276799 - DNA, 753 bp, Artificial Sequence
  derived and/or modified sequence
atgcgtggcactcctaagactcatttacttgcctttagcttgctgtgtctgctgagcaaggtgagaacgcaactgtgcccaaccccctgcacttgtccttggccccctcctaggtgtcctctgggggtgcctctcgtgcttgatgggtgtgggtgctgcagagtatgcgcacgcagactgggtgagccctgcgatcaattgcacgtgtgcgacgcttcccagggcctggtctgccaacccggagctggccctggcggacggggagccttatgtctcttggccgaagacgactccagctgtgaggtgaacggcagattatatcgggagggcgaaacattccaaccccattgcagtatcaggtgtcgttgtgaagatggcggattcacttgtgtccccctgtgtagcgaggacgtgaggttgccgagttgggattgtccccatccccgacgggtcgaagtccttggcaagtgctgcccagagtgggtgtgcggccagggaggcggactggggacccagcctctccctgcacaggggccacaattttctggattagtgtcctcactgccccctggggtgccttgccccgagtggtcaactgcctgggggccatgctccactacttgcggactgggtatggctacgcgggtctcaaaccagaacaggttttgcaggctggagacccaacggcgattgtgtttgtctaggccttgtccaccgtcgcgtgggaggtctccacagaactctgccttctag

SEQ ID NO: 276800 - DNA, 657 bp, Artificial Sequence
  derived and/or modified sequence
atgcgtggtacccccaagacacatttgttggcatttagcctgctctgcctgctctccaaggttcgaacccagttatgtcccaccccgtgcacatgcccatggccccctcctaggtgcccccttggtgttcctttagtactggacggatgcggctgttgtcgtgtctgtgcaagaaggttgggggaaccgtgtgatcagctgcacgtctgcgacgcttcccaggggctggtgtgccaacccggagccggtccaggcggtaggggggcattatgcctttgtaagcaagatccttccttcctggccctttcactcccttgtccgttagtgtcccctgcacagaacggcgcacgccctggagatccagcacggcctcccgtgggatgggcttggccccctggctgccccacaagaaccgcctccgccgattggcgcccaagtgcagcttgtgcatgtccagggccagctcacccaccaggggttgctgtgcacaagacagttccttcacgagccggacttgggatgggcactagatgtccacccagtcctgctgggggacccgttccgggaccgtgggctgatggccgatggagcgttcctcgccctctggcagcgggaaatacattggcctgggtgcatcatgctgagcaccagtactag

SEQ ID NO: 276801 - DNA, 753 bp, Artificial Sequence
  derived and/or modified sequence
atgcggggtactccaaagactcacctgctggctttcagcttattgtgcttgctcagcaaggtgagaacacagctttgtccgaccccctgcacttgcccctggcctccgccacgatgtcctctcggagtgcctctcgtacttgacggatgtggatgctgtcgcgtttgcgcaagaaggctgggcgagccctgcgaccagcttcacgtgtgcgacgcaagtcagggtctggtctgtcagccgggagccggtcccggtggcagaggcgctctatgccttcttgcggaggatgacagctcctgtgaagttaacggcagactctatcgcgaaggcgagactttccaaccacattgctctatccgctgccgttgtgaggatggaggtttcacttgcgtacctctgtgctctgaagatgtgcgattgccgtcatgggattgcccgcatcctcgacgcgttgaagtgctcgggaagtgttgccccgagtgggtctgtggccagggcggtgggctgggcacacagccccttcccgctcagggaccacagttcagcgggctggtttcatctctccctccaggcgttccgtgtcctgaatggtctaccgcctggggtccgtgcagcacgacttgcgggctgggcatggcgactagagtttcaaatcagaatcgcttctgtcgtttagagacacagcggagattgtgtctcagccggccttgccctccatccagagggaggtccccacagaactctgccttttag

SEQ ID NO: 276802 - DNA, 1403 bp, Artificial Sequence
  derived and/or modified sequence
gtgtgtgtgtgtgtgtgagcgcgcgcgcgcgcgcgcgtgtgtactcgtgcgtgtgcctgtgtgtgcctgggagtgacctcacagctgccggaacataaagactcacaggtccgcctcccaggctcaaagctggctctgcaggggacatgagaggcacaccgaagacccacctcctggccttctccctcctctgcctcctctcaaaggtgcgtacccagctgtgcccgacaccatgtacctgcccctggccacctccccgatgcccgctgggagtacccctggtgctggatggctgtggctgctgccgggtatgtgcacggcggctgggggagccctgcgaccaactccacgtctgcgacgccagccagggcctggtctgccagcccggggcaggacccggtggccggggggccctgtgcctcttggcagaggacgacagcagctgtgaggtgaacggccgcctgtatcgggaaggggagaccttccagccccactgcagcatccgctgccgctgcgaggacggcggcttcacctgcgtgccgctgtgcagcgaggatgtgcggctgcccagctgggactgcccccaccccaggagggtcgaggtcctgggcaagtgctgccctgagtgggtgtgcggccaaggagggggactggggacccagccccttccagcccaaggaccccagttttctggccttgtctcttccctgccccctggtgtcccctgcccagaatggagcacggcctggggaccctgctcgaccacctgtgggctgggcatggccacccgggtgtccaaccagaaccgcttctgccgactggagacccagcgccgcctgtgcctgtccaggccctgcccaccctccaggggtcgcagtccacaaaacagtgccttctagagccgggctgggaatggggacacggtgtccaccatccccagctggtggccctgtgcctgggccctgggctgatggaagatggtccgtgcccaggcccttggctgcaggcaacactttagcttgggtccaccatgcagaacaccaatattaacacgctgcctggtctgtctggatcccgaggtatggcagaggtgcaagacctagtcccctttcctctaactcactgcctaggaggctggccaaggtgtccagggtcctctagcccactccctgcctacacacacagcctatatcaaacatgcacacgggcgagctttctctccgacttcccctgggcaagagatgggacaagcagtcccttaatattgaggctgcagcaggtgctgggctggactggccatttttctgggggtaggatgaagagaaggcacacagagattctggatctcctgctgccttttctggagtttgtaaaattgttcctgaatacaagcctatgcgtga

SEQ ID NO: 276803 - DNA, 1518 bp, Artificial Sequence
  derived and/or modified sequence
ggagaccttgggtcagctctgcaaaggggttgtttactgaatgcttctggtatctgcagccccgctggggttcggacagggggtctggaatagggcttcacaactacagcagggctaggaccctcttgggctggaaggagctggagaggcctctgcaagctgtcacaggctcttggtgctggcactggctcaggctttcacacacacacacgcgcacacacacacacacacacacacggacaggcacccccttggtggccttcacagtttcaccttcaggtaaatgggctcatcctttgagccatgaggatgggaagcgaagcaaggaatgaaaaagctagtgtgtttgtgtgtgtgtgtgtgtgtgtgtgtgtgtgtgagcgcgcgcgcgcgcgcgcgtgtgtactcgtgcgtgtgcctgtgtgtgcctgggagtgacctcacagctgccggaacataaagactcacaggtccgcctcccaggctcaaagctggctctgcaggggacatgagaggcacaccgaagacccacctcctggccttctccctcctctgcctcctctcaaaggtgcgtacccagctgtgcccgacaccatgtacctgcccctggccacctccccgatgcccgctgggagtacccctggtgctggatggctgtggctgctgccgggtatgtgcacggcggctgggggagccctgcgaccaactccacgtctgcgacgccagccagggcctggtctgccagcccggggcaggacccggtggccggggggccctgtgcctctgtaagcaggaccccagttttctggccttgtctcttccctgccccctggtgtcccctgcccagaatggagcacggcctggggaccctgctcgaccacctgtgggctgggcatggccacccgggtgtccaaccagaaccgcttctgccgactggagacccagcgccgcctgtgcctgtccaggccctgcccaccctccaggggtcgcagtccacaaaacagtgccttctagagccgggctgggaatggggacacggtgtccaccatccccagctggtggccctgtgcctgggccctgggctgatggaagatggtccgtgcccaggcccttggctgcaggcaacactttagcttgggtccaccatgcagaacaccaatattaacacgctgcctggtctgtctggatcccgaggtatggcagaggtgcaagacctagtcccctttcctctaactcactgcctaggaggctggccaaggtgtccagggtcctctagcccactccctgcctacacacacagcctatatcaaacatgcacacgggcgagctttctctccgacttcccctgggcaagagatgggacaagcagtcccttaatattgaggctgcagcaggtgctgggctggactggccatttttctgggggtaggatgaagagaaggcacacagagattctggatctcctgctgccttttctggagtttgtaaaattgttcctgaatacaagcctatgcgtga

SEQ ID NO: 276804 - DNA, 1600 bp, Artificial Sequence
  derived and/or modified sequence
ctgggccgcggctacccagagtcagggccacggagcttaggagaccttgggtcagctctgcaaaggggttgtttactgaatgcttctggtatctgcagccccgctggggttcggacagggggtctggaatagggcttcacaactacagcagggctaggaccctcttgggctggaaggagctggagaggcctctgcaagctgtcacaggctcttggtgctggcactggctcaggctttcacacacacacacgcgcacacacacacacacacacacacggacaggcacccccttggtggccttcacagtttcaccttcaggctcaaagctggctctgcaggggacatgagaggcacaccgaagacccacctcctggccttctccctcctctgcctcctctcaaaggtgcgtacccagctgtgcccgacaccatgtacctgcccctggccacctccccgatgcccgctgggagtacccctggtgctggatggctgtggctgctgccgggtatgtgcacggcggctgggggagccctgcgaccaactccacgtctgcgacgccagccagggcctggtctgccagcccggggcaggacccggtggccggggggccctgtgcctcttggcagaggacgacagcagctgtgaggtgaacggccgcctgtatcgggaaggggagaccttccagccccactgcagcatccgctgccgctgcgaggacggcggcttcacctgcgtgccgctgtgcagcgaggatgtgcggctgcccagctgggactgcccccaccccaggagggtcgaggtcctgggcaagtgctgccctgagtgggtgtgcggccaaggagggggactggggacccagccccttccagcccaaggaccccagttttctggccttgtctcttccctgccccctggtgtcccctgcccagaatggagcacggcctggggaccctgctcgaccacctgtgggctgggcatggccacccgggtgtccaaccagaaccgcttctgccgactggagacccagcgccgcctgtgcctgtccaggccctgcccaccctccaggggtcgcagtccacaaaacagtgccttctagagccgggctgggaatggggacacggtgtccaccatccccagctggtggccctgtgcctgggccctgggctgatggaagatggtccgtgcccaggcccttggctgcaggcaacactttagcttgggtccaccatgcagaacaccaatattaacacgctgcctggtctgtctggatcccgaggtatggcagaggtgcaagacctagtcccctttcctctaactcactgcctaggaggctggccaaggtgtccagggtcctctagcccactccctgcctacacacacagcctatatcaaacatgcacacgggcgagctttctctccgacttcccctgggcaagagatgggacaagcagtcccttaatattgaggctgcagcaggtgctgggctggactggccatttttctgggggtaggatgaagagaaggcacacagagattctggatctcctgctgccttttctggagtttgtaaaattgttcctgaatacaagcctatgcgtga

SEQ ID NO: 276805 - protein, 625 aa, Artificial Sequence
  derived and/or modified sequence
MCETSAFYVPGVAPINFHQNDPVEIKAVKLTSSRTQLPYEYYSLPFCQPSKITYKAENLGEVLRGDRIVNTPFQVLMNSEKKCEVLCSQSNKPVTLTVEQSRLVAERITEDYYVHLIADNLPVATRLELYSNRDSDDKKKEKDVQFEHGYRLGFTDVNKIYLHNHLSFILYYHREDMEEDQEHTYRVVRFEVIPQSIRLEDLKADEKSSCTLPEGTNSSPQEIDPTKENQLYFTYSVHWEESDIKWASRWDTYLTMSDVQIHWFSIINSVVVVFFLSGILSMIIIRTLRKDIANYNKEDDIEDTMEESGWKLVHGDVFRPPQYPMILSSLLGSGIQLFCMILIVIFVAMLGMLSPSSRGALMTTACFLFMFMGVFGGFSAGRLYRTLKGHRWKKGAFCTATLYPGVVFGICFVLNCFIWGKHSSGAVPFPTMVALLCMWFGISLPLVYLGYYFGFRKQPYDNPVRTNQIPRQIPEQRWYMNRFVGILMAGILPFGAMFIELFFIFSAIWENQFYYLFGFLFLVFIILVVSCSQISIVMVYFQLCAEDYRWWWRNFLVSGGSAFYVLVYAIFYFVNKLDIVEFIPSLLYFGYTALMVLSFWLLTGTIGFYAAYMFVRKIYAAVKID

SEQ ID NO: 276806 - protein, 244 aa, Artificial Sequence
  derived and/or modified sequence
MAQMFLEPLADKFIYCQVLMNSEKKCEVLCSQSNKPVTLTVEQSRLVAERITEDYYVHLIADNLPVATRLELYSNRDSDDKKKEKDVQFEHGYRLGFTDVNKIYLHNHLSFILYYHREDMEEDQEHTYRVVRFEVIPQSIRLEDLKADEKSSCTLPEGTNSSPQEIDPTKENQLYFTYSVHWEESDIKWASRWDTYLTMSDVQIHWFSIINSVVVVFFLSGILSMIIIRTLRKDIANYNKEDDI

SEQ ID NO: 276807 - DNA, 1878 bp, Artificial Sequence
  derived and/or modified sequence
atgtgcgagaccagcgccttctacgtgcccggcgtggcccccatcaacttccaccagaacgaccccgtggagatcaaggccgtgaagctgaccagcagcagaacccagctgccctacgagtactacagcctgcccttctgccagcccagcaagatcacctacaaggccgagaacctgggcgaggtgctgagaggcgacagaatcgtgaacacccccttccaggtgctgatgaacagcgagaagaagtgcgaggtgctgtgcagccagagcaacaagcccgtgaccctgaccgtggagcagagcagactggtggccgagagaatcaccgaggactactacgtgcacctgatcgccgacaacctgcccgtggccaccagactggagctgtacagcaacagagacagcgacgacaagaagaaggagaaggacgtgcagttcgagcacggctacagactgggcttcaccgacgtgaacaagatctacctgcacaaccacctgagcttcatcctgtactaccacagagaggacatggaggaggaccaggagcacacctacagagtggtgagattcgaggtgatcccccagagcatcagactggaggacctgaaggccgacgagaagagcagctgcaccctgcccgagggcaccaacagcagcccccaggagatcgaccccaccaaggagaaccagctgtacttcacctacagcgtgcactgggaggagagcgacatcaagtgggccagcagatgggacacctacctgaccatgagcgacgtgcagatccactggttcagcatcatcaacagcgtggtggtggtgttcttcctgagcggcatcctgagcatgatcatcatcagaaccctgagaaaggacatcgccaactacaacaaggaggacgacatcgaggacaccatggaggagagcggctggaagctggtgcacggcgacgtgttcagacccccccagtaccccatgatcctgagcagcctgctgggcagcggcatccagctgttctgcatgatcctgatcgtgatcttcgtggccatgctgggcatgctgagccccagcagcagaggcgccctgatgaccaccgcctgcttcctgttcatgttcatgggcgtgttcggcggcttcagcgccggcagactgtacagaaccctgaagggccacagatggaagaagggcgccttctgcaccgccaccctgtaccccggcgtggtgttcggcatctgcttcgtgctgaactgcttcatctggggcaagcacagcagcggcgccgtgcccttccccaccatggtggccctgctgtgcatgtggttcggcatcagcctgcccctggtgtacctgggctactacttcggcttcagaaagcagccctacgacaaccccgtgagaaccaaccagatccccagacagatccccgagcagagatggtacatgaacagattcgtgggcatcctgatggccggcatcctgcccttcggcgccatgttcatcgagctgttcttcatcttcagcgccatctgggagaaccagttctactacctgttcggcttcctgttcctggtgttcatcatcctggtggtgagctgcagccagatcagcatcgtgatggtgtacttccagctgtgcgccgaggactacagatggtggtggagaaacttcctggtgagcggcggcagcgccttctacgtgctggtgtacgccatcttctacttcgtgaacaagctggacatcgtggagttcatccccagcctgctgtacttcggctacaccgccctgatggtgctgagcttctggctgctgaccggcaccatcggcttctacgccgcctacatgttcgtgagaaagatctacgccgccgtgaagatcgactag

SEQ ID NO: 276808 - DNA, 735 bp, Artificial Sequence
  derived and/or modified sequence
atggcccagatgttcctggagcccctggccgacaagttcatctactgccaggtgctgatgaacagcgagaagaagtgcgaggtgctgtgcagccagagcaacaagcccgtgaccctgaccgtggagcagagcagactggtggccgagagaatcaccgaggactactacgtgcacctgatcgccgacaacctgcccgtggccaccagactggagctgtacagcaacagagacagcgacgacaagaagaaggagaaggacgtgcagttcgagcacggctacagactgggcttcaccgacgtgaacaagatctacctgcacaaccacctgagcttcatcctgtactaccacagagaggacatggaggaggaccaggagcacacctacagagtggtgagattcgaggtgatcccccagagcatcagactggaggacctgaaggccgacgagaagagcagctgcaccctgcccgagggcaccaacagcagcccccaggagatcgaccccaccaaggagaaccagctgtacttcacctacagcgtgcactgggaggagagcgacatcaagtgggccagcagatgggacacctacctgaccatgagcgacgtgcagatccactggttcagcatcatcaacagcgtggtggtggtgttcttcctgagcggcatcctgagcatgatcatcatcagaaccctgagaaaggacatcgccaactacaacaaggaggacgacatctag

SEQ ID NO: 276809 - DNA, 1878 bp, Artificial Sequence
  derived and/or modified sequence
atgtgtgagacctcagctttctacgtgcccggcgttgcccccataaactttcatcagaacgaccccgttgagatcaaggcagtaaagcttactagcagccgcacgcaactgccctacgagtactactccctgcccttttgccagccttcaaaaatcacctacaaagctgagaacctgggagaggtgctccgaggcgatagaattgtcaacacgcctttccaagtcctcatgaacagcgagaaaaagtgtgaagtgctctgcagccagtctaataaacccgtgacccttacagtggaacagagccgattagttgctgaacgcatcactgaggactactacgttcatcttatcgcagacaatctgcccgtggcaaccagactggaactgtacagcaatcgggactccgacgataagaaaaaggagaaagacgtccagttcgagcacggctatagactgggattcactgacgttaataaaatttacttacacaaccatctctccttcatcctgtattaccacagagaagacatggaagaggatcaggagcacacataccgcgtcgtgcggtttgaggttattccccagtcaattaggctggaggaccttaaagctgatgaaaagtcttcctgtaccctgccggaaggcacgaactcttcccctcaggaaattgaccccacgaaagaaaatcagctgtacttcacttattcagttcactgggaggaatccgacattaagtgggcaagcaggtgggacacttatctgactatgtccgatgtccaaatccactggttcagtatcattaactctgtggtcgtggtcttttttctatcaggaattctttccatgattatcattcgtacactgagaaaggatatagccaattataacaaagaggacgacattgaagatacaatggaagaatcaggatggaagctggtgcacggtgacgtgtttcgacccccccaataccctatgattctttcctcattgctgggtagcggaatacagctgttttgcatgatcctgattgtgatatttgtggccatgctgggaatgctgtccccatcctcacgcggcgctttaatgacaaccgcctgctttcttttcatgtttatgggcgtgttcggggggtttagcgccggaaggttataccggaccttaaagggacacaggtggaaaaaaggagcgttctgtaccgcaactctttatcccggagtggtcttcgggatatgttttgtgctgaattgttttatttggggcaagcactcaagtggagcagtgccattcccaaccatggtcgcattgctgtgcatgtggttcggaatctctctaccactggtataccttggttattactttgggttccgcaagcaaccctacgataatccagtcaggaccaatcaaatcccaagacagatacctgagcaacgttggtacatgaacagatttgtgggtattttgatggccggaattctaccgtttggggcaatgtttattgaactttttttcatatttagcgcaatctgggaaaatcagttctattatttgtttggcttcctgttcctcgtttttattattctggtggtgtcttgttcccagatctctattgtcatggtttactttcagttatgtgccgaagattatagatggtggtggaggaattttctagtctcagggggatccgcattttatgttcttgtctacgccattttttatttcgtgaacaaactcgatattgtggaatttattccctctctcttgtactttggctatacagctcttatggttttgagtttttggctcctgaccggcaccataggattctatgctgcctacatgttcgtgaggaaaatttacgcagccgttaaaattgactag

SEQ ID NO: 276810 - DNA, 735 bp, Artificial Sequence
  derived and/or modified sequence
atggcccagatgttcctggagcctctggccgataagttcatttactgtcaggtcttgatgaactccgagaaaaagtgcgaggtgctgtgttcccagagtaacaaaccagtgacacttactgtagaacagtcccgtctggttgccgagcgcataacggaggactactacgtgcatctgattgccgataacctgccagttgccaccagactggagctgtacagcaacagagacagtgatgataaaaaaaaggagaaggacgtccagttcgaacacggctacaggcttggatttaccgatgttaacaagatctatctgcacaatcacctgtcgtttatcctgtactaccaccgggaggatatggaagaagatcaggagcacacataccgggttgttaggttcgaggtgattccccagtcaatccgtctcgaagacctgaaagcagacgagaagtcatcctgcactctgcctgagggcactaatagcagtccccaagagattgacccgaccaaggagaaccagttatatttcacgtactccgttcactgggaggaaagtgacatcaagtgggcttcacgctgggatacttacctaacgatgtctgatgttcaaatacattggttctccatcattaattcagtggttgtggtcttttttctgtcggggattctgagtatgattatcattagaactctgcggaaggacatcgcaaattataacaaagaggatgacatctag

SEQ ID NO: 276811 - DNA, 1878 bp, Artificial Sequence
  derived and/or modified sequence
atgtgtgagaccagcgccttctacgtgcctggggtggcccccatcaacttccaccagaatgaccctgtggagatcaaggctgtgaagctgaccagcagcaggacccagctgccctatgagtactacagcctgcccttctgccagcccagcaagatcacctacaaggccgagaacctgggggaggtgctgcggggggaccgcatcgtgaacacccccttccaggtgctgatgaacagcgagaagaagtgtgaggtgctgtgcagccagagcaacaagcctgtgaccctgactgtggagcagagccggctggtggccgagcgcatcacagaggactactacgtgcacctgattgctgacaacctgcctgtggccacccggctggagctgtacagcaacagagacagtgatgacaagaagaaggagaaggatgtgcagtttgagcacggctaccgcctgggcttcacagatgtgaacaagatctacctgcacaaccacctgtccttcatcctgtactaccaccgggaggacatggaggaggaccaggagcacacctacagagtggtgcgctttgaggtgatcccccagagcatccggctggaggacctgaaggcagatgagaagagcagctgcaccctgcctgagggcaccaacagcagcccccaggagattgaccccaccaaggagaaccagctgtacttcacctacagcgtgcactgggaggagagtgacatcaagtgggccagccgctgggacacctacctgaccatgtctgatgtgcagatccactggttcagcatcatcaacagcgtggtggtggtgttcttcctgagcggcatcctgtccatgatcatcatccgcaccctgaggaaggacatcgccaactacaacaaggaggatgacatcgaggacaccatggaggagagcggctggaagctggtgcatggagatgtgttccggcccccccagtaccccatgatcctgagcagcctgctgggcagcggcatccagctgttctgcatgatcctgattgtcatctttgtggccatgctgggcatgctgagccccagcagcagaggagccctgatgaccacagcctgcttcctgttcatgttcatgggcgtgtttggaggcttctctgctggccgcctgtaccgcaccctgaagggccaccgctggaagaagggggccttctgcacagccaccctgtacccaggagtggtgtttggcatctgctttgtgctgaactgcttcatctggggcaagcacagcagcggggctgtgcccttccccaccatggtggccctgctgtgcatgtggtttggcatcagcctgcccctggtgtacctgggctactacttcggcttcaggaagcagccctatgacaaccctgtgaggaccaaccagatcccccggcagatccctgagcagcgctggtacatgaacagatttgtgggcatcctgatggccggcatcctgccctttggagccatgtttattgagctgttcttcatcttcagcgccatctgggagaaccagttctactacctgtttggcttcctgttcctggtgttcatcatcctggtggtgtcctgcagccagatcagcatcgtgatggtgtacttccagctgtgtgccgaggactaccgctggtggtggaggaacttcctggtgtctgggggcagcgccttctacgtgctggtgtatgccatcttctactttgtgaacaagctggacatcgtggagttcatccccagcctgctgtacttcggctacacagccctgatggtgctgtccttctggctgctgaccggcaccatcggcttctacgccgcctacatgtttgtgaggaagatctatgctgctgtgaagattgattag

SEQ ID NO: 276812 - DNA, 735 bp, Artificial Sequence
  derived and/or modified sequence
atggcccagatgttcctggagcccctggccgacaagttcatctactgccaggtgctgatgaacagcgagaagaagtgtgaggtgctgtgcagccagagcaacaagcctgtgaccctgactgtggagcagagccggctggtggccgagcgcatcacagaggactactacgtgcacctgattgctgacaacctgcctgtggccacccggctggagctgtacagcaacagagacagtgatgacaagaagaaggagaaggatgtgcagtttgaacatggctaccgcctgggcttcacagatgtgaacaagatctacctgcacaaccacctgtccttcatcctgtactaccaccgggaggacatggaggaggaccaggagcacacctacagagtggtgcgctttgaagtcatcccccagagcatccggctggaggacctgaaggcagatgagaagagcagctgcaccctgcctgagggcaccaacagcagcccccaggagattgaccccaccaaggagaaccagctgtacttcacctacagcgtgcactgggaggagagtgacatcaagtgggccagccgctgggacacctacctgaccatgtctgatgtgcagatccactggttcagcatcatcaacagcgtggtggtggtgttcttcctgagcggcatcctgtccatgatcatcatccgcaccctgaggaaggacatcgccaactacaacaaggaggatgacatctag

SEQ ID NO: 276813 - DNA, 1878 bp, Artificial Sequence
  derived and/or modified sequence
atgtgcgagaccagcgccttctacgtgcccggcgtggcccccatcaactttcaccagaacgaccccgttgaaatcaaggccgtcaagctaacgagcagtagaacacaactcccctatgagtactacagtttgcccttttgccagcccagcaagattacctataaagcggagaacctgggggaagtcttaagaggcgataggatagtgaatacgccgtttcaggtcctaatgaacagcgagaagaagtgtgaagtgctgtgcagccagagcaacaagccagtgacccttaccgtggagcaatcaaggttggtcgctgaacgaatcactgaagactactacgtgcacctgatagctgacaatctcccggttgccacccgactggagctgtacagcaaccgcgactccgacgataaaaaaaaggagaaggacgtccagttcgagcacggctatcgtttaggattcacggacgtcaacaagatttatctgcacaaccatctcagttttattttatactaccatagggaagacatggaagaggatcaggagcacacttatagagttgttcgcttcgaggttatcccccagagtattcgtctggaggacttgaaggccgacgaaaagtctagttgtaccctacccgaaggtacaaattcgtccccgcaggagattgatcccacaaaggagaatcagctctatttcacctatagcgtgcactgggaagagtctgatattaaatgggcaagtcgctgggacacttatcttaccatgtcagacgtccagatccactggtttagtataatcaatagtgtggtggtcgtgtttttcctgtcaggcatcctcagcatgatcattataaggactctgcgaaaagacattgctaattataataaggaagatgatattgaggacacaatggaggaatcagggtggaaactagttcatggagatgtgtttcggccaccccagtatcccatgattctatcttccctgttgggttccggaattcaactcttctgcatgatactaattgttatctttgtggccatgcttggcatgctctcaccttcatcccggggcgcgctcatgaccacagcttgttttctgttcatgtttatgggcgtcttcggtggatttagcgcaggcaggctgtacaggaccctgaagggtcaccggtggaagaaaggagccttttgtacggcaactttataccccggagtcgtttttgggatatgttttgttctcaattgtttcatctggggaaagcatagttctggcgcagtgccctttcctaccatggtggcactgctttgtatgtggtttggcatctccttacccctggtgtatctagggtactattttggcttccggaagcagccatatgacaatcccgtcagaacaaaccaaatcccaaggcaaattcctgagcagcgttggtatatgaatcgtttcgtgggcattttaatggccggaatcttaccatttggagcaatgtttattgaactatttttcatcttcagcgcaatctgggagaaccagttttactatctgtttggatttttgttcctggtattcatcatcttggtcgtgtcttgcagtcagataagcatcgtgatggtatacttccagttgtgcgcggaggactacaggtggtggtggcgaaactttttggtgagcggaggaagtgccttctatgtactagtgtatgctatcttctactttgtaaacaagcttgacatcgtcgaattcattccatcgctgctgtactttggttacaccgccctaatggtgctgtcattctggcttcttaccggaaccattggattctatgctgcctacatgttcgtgagaaaaatctacgccgccgttaagattgactag

SEQ ID NO: 276814 - DNA, 735 bp, Artificial Sequence
  derived and/or modified sequence
atggcccagatgttcctggagcccctggccgacaagttcatctactgtcaagtgttgatgaatagtgagaagaagtgcgaagtgctgtgctcccagagcaataagcctgtcaccctgaccgtcgagcagagcagactggtggccgaaaggatcaccgaggattactatgtgcatctcatcgccgacaatctgccagtggcgacccgactggagctgtatagcaacagggactccgatgataaaaaaaaagagaaagatgtgcagtttgaacatgggtacaggctgggatttacagatgttaacaaaatttatctgcacaaccacttgtctttcattctgtactatcaccgggaggacatggaagaggatcaggagcatacatatcgggtggtcaggttcgaggtaataccccaaagcatacgccttgaagatctgaaagccgacgagaagtcctcctgcaccctcccagaaggaaccaacagtagccctcaggaaatcgaccccacaaaagaaaatcagctctactttacctactccgtgcactgggaagagtctgacataaagtgggcctccaggtgggacacttacctcacaatgtccgacgtccagattcattggtttagcatcatcaactccgtcgttgttgtgttcttcctttccgggattctgtctatgatcataatcagaacattgcgcaaggacattgctaattataacaaagaggacgacatatag

SEQ ID NO: 276815 - DNA, 1878 bp, Artificial Sequence
  derived and/or modified sequence
atgtgtgagaccagtgcattttacgtcccgggagtcgccccaattaacttccatcagaatgatcctgtggagattaaagctgtaaagctgaccagctctaggacccaactgccgtacgagtattattccttacccttttgtcagccaagtaagatcacatacaaggcagagaacttaggcgaggtcctcaggggtgatcgaattgtgaataccccttttcaggtcctgatgaattccgagaaaaagtgcgaggtgttgtgtagccagagcaataagcccgtcacactgactgtggagcaaagccgtctggtggccgaaaggattactgaggactactacgtgcatctgattgccgataatttgcctgtggctacgcggctggaactgtactctaaccgagacagcgacgacaaaaaaaaagaaaaggatgttcagttcgagcatgggtatcgactgggctttaccgacgtgaacaaaatatatctgcacaatcacctgtcttttatattgtactaccatagggaagacatggaggaagatcaggagcacacgtatcgtgttgttcggtttgaggtgatacctcaatccatcaggctggaagacctgaaggccgacgagaagtcctcctgtaccctcccagaaggaaccaatagctctccccaggagatcgaccccacaaaggaaaatcagctgtactttacctatagtgtccattgggaggagtccgacataaaatgggctagtcgctgggatacttacctcaccatgagtgacgtccagattcactggttctcaatcataaacagtgtcgtggtcgttttctttttgtccggaatacttagtatgattatcatcaggactttacgaaaggatattgccaactataacaaagaggacgacattgaggacacgatggaggagtccggatggaaattggtgcatggagacgtgttcaggcccccacagtaccctatgatcctgtcctcactcctaggtagcggcatacagttattctgtatgatcctgatcgttatctttgtcgccatgcttggtatgctgtcaccgtcaagcagaggggctctgatgacaacagcctgcttcctcttcatgttcatgggggtcttcggcggatttagcgccggacgtctttatcggacgctgaagggtcacaggtggaagaaaggcgcattctgtaccgctacactctaccccggagtcgtgttcggaatttgttttgttctgaattgttttatttggggcaagcattcaagcggggcagtcccttttcccaccatggttgcgctcctctgcatgtggtttgggataagcctgcccctagtctacctggggtattattttggcttccgcaaacagccgtacgataatcctgtacgaacaaaccagataccgcgacagatcccagagcaacgatggtacatgaacagattcgtaggcatcctaatggctggcatcttgcccttcggtgccatgttcatcgagcttttctttattttcagtgccatttgggaaaatcagttctactaccttttcgggttcctgttcttagtctttattatcctagtggtgagctgctcacaaatctccattgtgatggtgtactttcagctgtgcgcagaggattatcggtggtggtggcgcaatttcctggtctctggcggttcggcattttacgtgctagtgtatgctattttctacttcgtaaacaagctcgacatcgtggagttcatccccagcctgctttactttgggtatacggcactgatggtccttagcttttggctcttaaccgggaccatcggcttctacgctgcttacatgttcgtccgcaaaatatacgcagcggtgaagattgattag

SEQ ID NO: 276816 - DNA, 735 bp, Artificial Sequence
  derived and/or modified sequence
atggcccagatgtttctggaacctctagcagataagtttatctactgtcaggttctgatgaactccgaaaagaaatgtgaggtgttgtgcagtcagtcaaataaacctgttaccctgacagttgaacaatctaggctagttgcggagcgtatcactgaagactactacgtacatcttatcgcagacaacttgcccgttgccactcgcttggagttgtatagcaaccgtgactctgatgacaagaagaaagagaaggatgtgcagttcgagcacgggtacagactcgggttcactgatgtgaataaaatttatctgcacaatcacttgtcttttatcttgtactaccaccgggaggacatggaggaggatcaggaacatacctacagggtggtgagattcgaggtaattccacagtccataaggctggaggacttaaaggccgacgagaaaagctcctgcacactgcccgaggggaccaatagcagtccgcaggagattgaccctacgaaagagaaccagctgtattttacctactccgtacattgggaggaatccgacatcaaatgggctagtagatgggacacatacttaacgatgtcagatgtgcaaattcactggtttagtatcattaactccgtggtggtcgtcttttttctctccggtatcctgtccatgattatcatcagaaccctccggaaggatattgctaactacaataaggaggacgatatatag

SEQ ID NO: 276817 - protein, 180 aa, Artificial Sequence
  derived and/or modified sequence
MPVPASWPHPPCPFLLLTLLLGLTGVAGEDELQVIQPEKSVSVAAGESATLRCAMTSLIPVGPIMWFRGAGAGRELIYNQKEGHFPRVTTVSELTKRNNLDFSISISNITPADAGTYYCVKFRKGSPDDVEFKSGAGTELSVREAALAPTAPLLVALLLGPKLLLVVGVSAIYICWKQKA

SEQ ID NO: 276818 - DNA, 543 bp, Artificial Sequence
  derived and/or modified sequence
atgcccgtgcccgccagctggccccaccccccctgccccttcctgctgctgaccctgctgctgggcctgaccggcgtggccggcgaggacgagctgcaggtgatccagcccgagaagagcgtgagcgtggccgccggcgagagcgccaccctgagatgcgccatgaccagcctgatccccgtgggccccatcatgtggttcagaggcgccggcgccggcagagagctgatctacaaccagaaggagggccacttccccagagtgaccaccgtgagcgagctgaccaagagaaacaacctggacttcagcatcagcatcagcaacatcacccccgccgacgccggcacctactactgcgtgaagttcagaaagggcagccccgacgacgtggagttcaagagcggcgccggcaccgagctgagcgtgagagaggccgccctggcccccaccgcccccctgctggtggccctgctgctgggccccaagctgctgctggtggtgggcgtgagcgccatctacatctgctggaagcagaaggcctag

SEQ ID NO: 276819 - DNA, 543 bp, Artificial Sequence
  derived and/or modified sequence
atgcctgtgccggcgagctggccccacccaccatgccctttcctgctcctcacactgttactgggactgaccggagttgccggagaggatgaactccaggtaatccagcccgaaaaatctgtctccgtggctgctggcgagtccgccactttgaggtgtgcaatgacatccttgatccctgtcggcccaatcatgtggttcaggggagctggagcggggagagaactgatttacaatcagaaagagggacatttcccgcgcgtgacgacggtttccgaactcaccaaacgaaacaacctcgacttcagcatcagcatcagcaatattacacctgccgacgccggtacctactactgcgtcaagtttagaaaggggtcacctgatgatgttgagtttaaatctggagcgggcaccgagctttcagttagagaggccgccctggcaccaacggcccccctattggttgccctgctgctaggtccgaaattattgcttgtggtgggagtgagcgccatctatatctgctggaagcagaaggcgtag

SEQ ID NO: 276820 - DNA, 543 bp, Artificial Sequence
  derived and/or modified sequence
atgcctgtgcctgcctcctggccccaccccccctgccccttcctgctgctgaccctgctgctgggcctgactggagtggccggagaagatgagctgcaggtgatccagcctgagaagtctgtgtctgtggccgccggggagagcgccaccctgcgctgtgccatgaccagcctcatccctgtgggccccatcatgtggttccggggggccggggccggccgggagctgatctacaaccagaaggagggccacttcccccgggtgaccaccgtgtctgagctgaccaagaggaacaacctggacttcagcatcagcatcagcaacatcaccccagcagatgctggcacctactactgtgtgaagttcaggaagggcagcccagatgatgtggagttcaagagcggggccggcacagagctgtctgtgcgggaggccgccctggcccccacagcccccctgctggtggccctgctgctgggccccaagctgctgctggtggtgggcgtgtctgccatctacatctgctggaagcagaaggcctag

SEQ ID NO: 276821 - DNA, 543 bp, Artificial Sequence
  derived and/or modified sequence
atgcccgtgcccgccagctggccccaccccccctgccccttcctgctcctgacactgctgctgggcctgactggcgtggctggcgaagacgaattgcaggtgatccagccagaaaagagcgtatctgtggcagccggagagagtgctacactgcggtgtgcaatgacgtctctgattcctgtcggacctattatgtggtttcgaggcgccggcgccggtagagagctgatctacaaccagaaagagggccattttcctcgggtgacgacagttagtgaattgacgaaaaggaacaacctagatttctcaatttccatttccaacataacacccgccgacgccggcacttattactgtgtcaaattccgaaaaggatctcctgacgatgttgagtttaagagtggtgcaggcacggaacttagtgttcgtgaggccgccctagctcccaccgctccccttctagtggcactgttgttggggcctaaactcctgctagtagtaggagttagtgcaatttacatctgttggaagcagaaagcctag

SEQ ID NO: 276822 - DNA, 543 bp, Artificial Sequence
  derived and/or modified sequence
atgccagtccctgcctcctggcctcaccccccatgcccattcctcctactcaccctcctgttgggccttaccggcgtagccggagaggatgagctccaggtgatccaacccgaaaagtcagtgagcgttgcagccggtgagagcgcaacactacgatgcgccatgactagcctgatccctgtgggccctatcatgtggttccgaggagctggagccggtagagagctgatctacaatcaaaaggagggacattttcctagagtgaccacggtctccgaactgacaaaacgaaataatctcgactttagcataagcatctccaacatcacacctgcagacgcagggacatattactgtgtgaaattcagaaagggcagtcctgatgatgtggagttcaagtcaggggcaggcacagaactgtccgtccgtgaggcggctctggcgccaacggctcccctgctggtggctctattactgggtcccaaattattgctagtggtgggtgttagcgcgatttacatttgctggaaacagaaagcttag

SEQ ID NO: 276823 - DNA, 1659 bp, Artificial Sequence
  derived and/or modified sequence
atgcctgtcccagcctcctggccccaccctccttgtcctttcctgctgctgactctattgctgggactcacaggagtggcaggtgaggacgagctacaggtgattcagcctgaaaagtccgtatcagttgcagctggagagtcggccactctgcgctgtgctatgacgtccctgatccctgtggggcccatcatgtggtttagaggagctggagcaggccgggaattaatctacaatcagaaagaaggccacttcccacgggtaacaactgtttcagaactcacaaagagaaacaacctggacttttccatcagcatcagtaacatcaccccagcagacgccggcacctactactgtgtgaagttccggaaagggagccctgacgacgtggagtttaagtctggagcaggcactgagctgtctgtgcgcgaagcagcgctggctcctactgctccactcctcgtagctctcctcctgggccccaagctgctactggtggttggtgtctctgccatctacatctgctggaaacagaaggcctgactgaccctcagtctctgctgcctcctcctttcttgagaagctcagcctgagagaaggagctggcgagaaccttccccacactcagctccaaacgcctcctctcccaggtcatctgcctgcccacacgctcctgttccaccttcacaagaccatgatgccccaaagcagtgtctctattcacggtcctgagcaggggccatgggattgggctctgggcactgactcatggcacctccctagaaggtgagaaacactccaaatctaaacacaccaggacttctcccatccgtcgccttgggactggccataaaccacagactctctccaggctctcaagagttatcctgtcttctggattcctgcctaccccaactcccccagccttgttgaggttctctactgcctcctgaatacacatgaacccctataccaattttaagaaaaaaatgattctctttcctctttgtccaagcatcctatccctcaaacccaaaaagaaagaagctctcccttctctctctgtgatggagacagtatttcttctagtatcctgcagccttcccagtcctgctgcttgtggtagaaatgctgccacagcccaacattgaggagccctcgatgactgccctttacaactcatattcagttctgcctccaaaatgcatgtgtccacttacatgagatggtaaatgtttaacaatggactttctgaaagggaaaaaccaaaagctgttttgcagtgcttgccaatttctctagtgtaataactcccaacctgaccaatttcacactgccaacagttaaacaaccagattgcaagattcctgaaatttaacaattggttttcagggcccagtccaagcctgctgctggaaacctcagagttaaatccctattctccacacctctcacctccaccacccctccctgtcccagccagcatcatctctttggggaccactcctctggctttcatttttcagccacagtgattctttggaaaagtcaaatcatatcacttctctgcttcttccccaacacagctgcatggctcccgctctccctccttcaagtctctgctcaatgtcacttcattaaaggcaccttctataaact

SEQ ID NO: 276824 - DNA, 96 bp, Artificial Sequence
  derived and/or modified sequence
acaaaccactgctcaaggaaataaggacacaaacaaatggaacaacattccgtgctcatggataggaagaatcaatatcgtgaaaatggccatact

SEQ ID NO: 276825 - DNA, 3111 bp, Artificial Sequence
  derived and/or modified sequence
ataccggagttttgctctatcactgtatcatggacagcaagcttatggaacttattcctcaaaaagtgggacatgctgaaaatacaaacctagcttgagtttagttatgtccctaaatgttaactgatccctgtgggtcagtagggagacagctggcatccgtttccaaccagccaaggatattcggtcgactgtactgactgaccactttgctcaggccgcaagtgtccctcagaaaagcctgaggacttattaaggtcatggaaggttgccttggccaggaactcttttctaatcacatgtttttgacttccctctctagccctaaccggcagccatttgttctctttggtaatcactccacacgagaaaacctgaatgctggcaactttaacttcccttctgaaggacatctggtacgaagcactggtcccggcgggagctttgccaagcacatggtagcccagtgtgtctcaccaaagggacctcttgcttgttcgagaacatacttttttggagctactcatgttccttacttgggtggtgacagcaagctgcccaagaaaactgaacaaatgctattgtcccagatatatgctgctgttattgaggctgttttggctggcattgcatgttatgctaaaacttccagtctaacaaaggccaaggaggtagcagagcaaactctgggatctgggttagattcctttgagttgattccgtttaaggcagccctgcgctccaagatgacttttcatatacatgctgtgaataatcagggaagaattgtaccgctggacagtgaagatagcttatcctttgtgaagacggcttgtatggccgtctatgacattcctgacttactgggaggcaatggttgtttaggatctgtggttttctctgaatcatttttgacttctcagatcttagttaaagaaaaggatggcactgttaccacagaaaccagctccgtagtcctgactgctgctgtacccagattctgctcctggctggtggaagataatgaagtaaaattgtctgagaaaacccagcaagcagtgaggggggatgagtctttcctgggcacttatctaacaggaggagaaggagcatatctttattccagcaatctacagtcctggcctgaggaagggaatgttcatttcttctctagtggccttctgttttctcactgtcgtcatagaagtatcatcatttccaaggatcacatgaattccatttccttctatgatggggattccaccagtactgttgctgctcttctcatagacttcaaaagctcattgcttcctcacctcccagttcatttccatggatcaagcaattttctgatgattgcccttttccccaaatcgaagatataccaagcattttactcagaggtcttctccctctggaaacagcaggataactcagggatctctttaaaagtgatccaggaagatggattatctgtggaacaaaagagattgcactccagtgcacagaagctcttcagtgccctgagccagcctgctggggagaaacggagttccctaaagttactctcagccaaactcccagagctggactggtttctccagcatttcgccatcagcagcattagccaggagcctgtgatgcggacccatcttcctgtgctgctgcagcaagctgaaatcaacactactcacagaatagaaagtgacaagatggatggtgtatcgccaaatcatggacagctctgaatgttttcatgctgcacacttccagagatacctttccagtgccctagaggcccagcagaaccgctctgcgcgccagtcagcctacatccgcaagaagaccagactgctggtggtgttacaaggctacacagatgttattgatgttgtccaggccctgcagacccacccagactcaaatgtcaaggcctccttcaccattggtgccatcacagcatgtgtggagcccatgagctgctacatggagcacagatttctctttcctaaatgtcttgaccagtgttcacaaggcctggtgagtaacgtggtattcaccagtcacaccacggagcagcggcaccctctccttgttcagctgcagagcctcatcagggctgccaatcctgctgcagccttcattcttgcagaaaatgggattgtcaccaggaatgaagacattgagctgattctctcagaaaacagtttttcaagtcctgagatgctacgatctcgatatttaatgtatcctggctggtatgaaggtaaattgaatgctggatcagtctatcccctaatggttcagatctgcgtatggtttggccgtcccttggagaagactcgctttgtggccaaatgtaaagcaattcagtcctccatcaagccaagtcccttctccggaaacatctaccacatcctgggcaaagtgaagttttcagactctgagaggaccatggaggtctgctacaacacactggccaactccttgagcatcatgccagttttggaaggacccacaccaccaccagactccaaaagcgtatctcaagacagcagcgggcagcaggagtgctaccttgtgttcatcggctgctccctgaaggaagacagcatcaaggactggctgcggcagtcagctaagcagaagcctcagaggaaagccctgaagaccagggggatgctgacgcaacaggagatcaggagcatccacgtaaaacgccacttggaacccctacctgcaggctacttttataatggcacccaatttgttaacttctttggtgacaaaactgattttcacccactcatggaccagttcatgaatgactacgtggaagaagccaaccgggaaattgagaagtataaccaggagctggaacagcaggagtatcatgacctctttgagctgaagccctagaggaaggctgggcccgtacgtcctgcagaatgtccaccttggagatggacgaacgggtgtcttaacctcagctctgctggaggcctctcccttaaggggctgtctttgttctccttggcctgtgtgggctggcttgagtgcatgttgtctttattccctgtatagcgctgaagagcatcacctgcaccattg

SEQ ID NO: 276826 - protein, 495 aa, Artificial Sequence
  derived and/or modified sequence
MEGCLGQELFSNHMFLTSLSSPNRQPFVLFGNHSTRENLNAGNFNFPSEGHLVRSTGPGGSFAKHMVAQCVSPKGPLACSRTYFFGATHVPYLGGDSKLPKKTEQMLLSQIYAAVIEAVLAGIACYAKTSSLTKAKEVAEQTLGSGLDSFELIPFKAALRSKMTFHIHAVNNQGRIVPLDSEDSLSFVKTACMAVYDIPDLLGGNGCLGSVVFSESFLTSQILVKEKDGTVTTETSSVVLTAAVPRFCSWLVEDNEVKLSEKTQQAVRGDESFLGTYLTGGEGAYLYSSNLQSWPEEGNVHFFSSGLLFSHCRHRSIIISKDHMNSISFYDGDSTSTVAALLIDFKSSLLPHLPVHFHGSSNFLMIALFPKSKIYQAFYSEVFSLWKQQDNSGISLKVIQEDGLSVEQKRLHSSAQKLFSALSQPAGEKRSSLKLLSAKLPELDWFLQHFAISSISQEPVMRTHLPVLLQQAEINTTHRIESDKMDGVSPNHGQL

SEQ ID NO: 276827 - DNA, 1488 bp, Artificial Sequence
  derived and/or modified sequence
atggagggctgtttgggacaggagttgttttccaatcatatgttcctgactagcttgagcagccccaatcggcagcccttcgtgctgtttggtaaccactctacacgcgaaaacttaaatgctggcaacttcaacttcccaagtgaaggacacctggttcgaagcacggggccaggcggcagcttcgccaaacacatggtggcccagtgtgtatcgcccaagggaccactggcctgtagtagaacgtatttttttggggctacccatgttccatacctggggggggatagcaagctgccaaaaaaaacagagcagatgctcctgagtcagatttatgccgctgtgatcgaggctgtcctcgccggcatcgcctgctacgctaaaactagctctttaaccaaggctaaggaggtcgccgagcagaccctaggaagcggccttgactcatttgagctgatcccttttaaagctgcgctgcggtctaaaatgacatttcacattcacgctgtgaacaaccaaggaagaatagtccccctggactcggaggattcactgagcttcgtaaagacagcatgtatggccgtttacgatatacctgatctgctggggggcaacgggtgcctcggaagcgttgtattcagtgagtctttcctgacctctcagatcttagtaaaggaaaaagatgggaccgttacgacagaaaccagttccgtggtgctcactgccgccgtaccgagattttgcagctggctcgttgaggataatgaggtgaagctcagcgagaaaacccaacaggccgtgagaggagatgaatccttcctgggcacatatctgacggggggggagggagcctacctgtacagctctaacctgcagtcgtggcccgaagaaggcaacgttcacttttttagttccggccttctgttctcacactgtcggcatagatctattattatttccaaagaccatatgaactcaattagcttctacgacggtgactccacaagcaccgtggcagccctgctgattgatttcaagtccagcttactgccacacttgccggtacacttccacggctccagtaactttctcatgatagccctgttcccaaaatctaagatttaccaggcgttctactccgaggtgttcagtctctggaaacagcaggataacagcggaatctcccttaaggtcattcaggaggacggcctgtccgtagaacagaagagactccattcctccgcccagaagcttttttctgccctgagtcagcctgctggggagaagcggtcgagtctgaagctgctttcagcaaagctcccagaacttgactggtttctgcagcacttcgcgatatcttctatatcccaggagcccgttatgcgcactcatctacctgtgctgctgcagcaggcagagattaacacaacacataggatagagtccgataagatggacggcgtctctcctaaccacggacagctttag

SEQ ID NO: 276828 - DNA, 1488 bp, Artificial Sequence
  derived and/or modified sequence
atggagggctgcctgggccaggagctgttcagcaaccacatgttcctgaccagcctgagcagccccaaccggcagccctttgtgctgtttggaaaccacagcacccgggagaacctgaatgccggcaacttcaacttccccagcgagggccacctggtgcgcagcacaggccctgggggcagctttgccaagcacatggtggcccagtgtgtgagccccaagggccccctggcctgcagcaggacctacttctttggagccacccacgtgccctacctgggcggggacagcaagctgcccaagaagacagagcagatgctgctgagccagatctatgctgctgtgattgaggccgtgctggccggcatcgcctgctacgccaagaccagcagcctgaccaaggccaaggaggtggccgagcagaccctgggcagcggcctggacagctttgagctgatccccttcaaggccgccctgcggagcaagatgaccttccacatccatgctgtgaacaaccagggccgcatcgtgcccctggacagcgaggacagcctgagctttgtgaagacagcctgcatggctgtgtatgacatcccagacctgctgggcggcaatggctgcctgggctctgtggtgttcagcgagagcttcctgaccagccagatcctggtgaaggagaaggatggcaccgtgaccacagagaccagctctgtggtgctgacagctgctgtgccccgcttctgctcctggctggtggaggacaatgaggtgaagctgtctgagaagacccagcaggccgtgagaggagatgagagcttcctgggcacctacctgactggaggagagggcgcctacctgtacagcagcaacctgcagagctggccagaggagggcaatgtgcacttcttcagcagcggcctgctcttcagccactgccgccacaggagcatcatcatcagcaaggaccacatgaacagcatctccttctatgatggagacagcaccagcacagtggccgccctgctgattgacttcaagagcagcctgctgccccacctgcctgtgcacttccacggcagcagcaacttcctgatgattgccctcttccccaagagcaagatctaccaggccttctacagcgaggtgttcagcctgtggaagcagcaggacaacagcggcatcagcctgaaggtgatccaggaggatggcctgtctgtggagcagaagaggctgcacagcagcgcccagaagctgttcagcgccctgagccagcctgctggggagaagaggagcagcctgaagctgctgagcgccaagctgcctgagctggactggttcctgcagcactttgccatcagcagcatcagccaggagcctgtgatgaggacccacctgcctgtgctgctgcagcaggccgagatcaacaccacccaccgcatcgagagtgacaagatggatggagtgagccccaaccacggccagctgtag

SEQ ID NO: 276829 - DNA, 1488 bp, Artificial Sequence
  derived and/or modified sequence
atggagggctgcctgggccaggagctgttcagcaaccacatgttcctgacatccttatctagtccgaacagacagccctttgtgctgtttggtaaccactcaacccgggaaaatctcaacgctgggaatttcaatttccctagtgaggggcaccttgtgcgcagcacaggcccgggcgggagtttcgctaagcacatggtcgcgcagtgcgtgagtcctaaaggccccttagcctgttctaggacttacttcttcggcgctactcacgtcccttacttgggtggggacagcaagctgcccaagaagaccgagcagatgttattatctcagatctatgccgccgtaattgaggcggtgttagcagggatcgcttgctacgctaaaacctcctcattgaccaaggccaaagaggtggcagagcagaccctgggcagtggcttagactcattcgagctcattcccttcaaggctgctttaaggagcaagatgacatttcacatccacgctgttaacaatcaaggaaggatcgtgcccctcgattccgaggattccctatccttcgttaagacagcgtgtatggccgtttatgacattccagatttgctgggagggaatgggtgtctggggtccgtcgtatttagcgagtccttcctgacctcccaaatcctggtcaaagaaaaggacggaaccgttacaaccgagacctccagcgtggtcttgaccgccgccgtgcctaggttttgttcttggctggtggaggacaacgaggtgaagttgagcgaaaagacgcagcaggccgttaggggggacgagtccttcctgggcacatacctgacaggaggtgagggcgcttatctgtactcctccaatcttcagagttggcctgaggaaggcaacgtccattttttttctagcgggctcttgtttagtcattgtcggcaccgaagcatcataatcagcaaggatcacatgaactctatcagcttttacgacggtgattcgacctccactgtggcagcccttttaattgacttcaaatcatccctgttacctcatctgcccgttcacttccatgggtctagcaatttcttaatgattgcccttttcccaaagtccaagatctatcaggccttctacagtgaagttttcagcctctggaagcagcaggacaactccggcatatctcttaaggttatacaggaagacggactgagcgtcgagcagaaaagactgcactcatctgcccagaaactgtttagcgccctgtcacaacctgcgggagaaaagaggtccagcctaaaactcctgtctgcaaaattacccgaactcgattggtttttgcagcactttgccatatctagcatttctcaagagcccgtcatgaggacacatttgcccgtgttgctgcagcaggctgaaattaacaccacacatagaatcgagagcgacaaaatggacggcgtttctccaaaccatggacagttgtag

SEQ ID NO: 276830 - DNA, 1488 bp, Artificial Sequence
  derived and/or modified sequence
atggaagggtgtctgggtcaggagctgtttagcaatcacatgtttcttacaagcctctcttcccccaatcggcagccgtttgtgctgtttgggaaccattctactcgggaaaatctgaacgctggtaacttcaactttccttcagaaggacatcttgtgcgaagcaccggtccaggcggaagcttcgctaaacacatggtggcccaatgcgtctctcccaaaggaccgctagcatgctcccgcacctacttcttcggagccacacacgtgccctacttaggaggagatagcaagttgcctaagaaaacggagcagatgcttctgagccagatttacgcagccgtaattgaggcggtgcttgccggaattgcttgctacgccaagaccagtagtctgacaaaggctaaggaggtcgccgaacagaccttaggttccgggctggactcttttgaactaataccattcaaagccgctctgcgctcaaagatgacctttcatatccacgcggtgaataaccaagggcgtattgtaccattggattccgaggattctttgtccttcgtgaagactgcttgtatggccgtctatgacattcctgatctcttgggcggaaatggctgcttaggctccgtggtgttcagcgagtcttttttaacttcacagattctggtgaaagagaaggatggcactgtgacgaccgaaaccagtagcgttgtgctcaccgctgctgtccctaggttctgcagctggctcgtcgaagataatgaggttaagttaagcgaaaagacccagcaggccgtgagaggagacgagagcttcttgggaacatatctgacgggcggagaaggagcttatttgtattcttctaacctccagagctggcccgaggaaggcaacgtccattttttcagttcagggcttctcttctcacattgtcgacatagatcaattattattagcaaagatcacatgaactcaattagcttttatgatggagactcaacctcaactgtggccgcactgcttatagattttaagagctctttgcttccccacctcccggtgcacttccacggaagcagtaatttcttgatgatcgcactgttcccgaagtcaaaaatctaccaggcattctattccgaagtattttcactgtggaagcagcaggacaattcaggaatcagtctgaaagtgatacaggaagacgggcttagcgtcgagcagaaaagactccactcttccgcccagaaactcttcagtgctctgtcccaacctgcaggggagaagagatccagcctgaagctgttatctgcaaaactgccggagcttgactggtttctacagcacttcgctatttcctccattagccaggagccagtgatgagaactcatctgccggtgctcttacagcaagccgaaatcaacacgacgcataggatagaatctgacaagatggatggagtctccccaaaccatggccagctttag

SEQ ID NO: 276831 - DNA, 1488 bp, Artificial Sequence
  derived and/or modified sequence
atggagggctgcctgggccaggagctgttcagcaaccacatgttcctgaccagcctgagcagccccaacagacagcccttcgtgctgttcggcaaccacagcaccagagagaacctgaacgccggcaacttcaacttccccagcgagggccacctggtgagaagcaccggccccggcggcagcttcgccaagcacatggtggcccagtgcgtgagccccaagggccccctggcctgcagcagaacctacttcttcggcgccacccacgtgccctacctgggcggcgacagcaagctgcccaagaagaccgagcagatgctgctgagccagatctacgccgccgtgatcgaggccgtgctggccggcatcgcctgctacgccaagaccagcagcctgaccaaggccaaggaggtggccgagcagaccctgggcagcggcctggacagcttcgagctgatccccttcaaggccgccctgagaagcaagatgaccttccacatccacgccgtgaacaaccagggcagaatcgtgcccctggacagcgaggacagcctgagcttcgtgaagaccgcctgcatggccgtgtacgacatccccgacctgctgggcggcaacggctgcctgggcagcgtggtgttcagcgagagcttcctgaccagccagatcctggtgaaggagaaggacggcaccgtgaccaccgagaccagcagcgtggtgctgaccgccgccgtgcccagattctgcagctggctggtggaggacaacgaggtgaagctgagcgagaagacccagcaggccgtgagaggcgacgagagcttcctgggcacctacctgaccggcggcgagggcgcctacctgtacagcagcaacctgcagagctggcccgaggagggcaacgtgcacttcttcagcagcggcctgctgttcagccactgcagacacagaagcatcatcatcagcaaggaccacatgaacagcatcagcttctacgacggcgacagcaccagcaccgtggccgccctgctgatcgacttcaagagcagcctgctgccccacctgcccgtgcacttccacggcagcagcaacttcctgatgatcgccctgttccccaagagcaagatctaccaggccttctacagcgaggtgttcagcctgtggaagcagcaggacaacagcggcatcagcctgaaggtgatccaggaggacggcctgagcgtggagcagaagagactgcacagcagcgcccagaagctgttcagcgccctgagccagcccgccggcgagaagagaagcagcctgaagctgctgagcgccaagctgcccgagctggactggttcctgcagcacttcgccatcagcagcatcagccaggagcccgtgatgagaacccacctgcccgtgctgctgcagcaggccgagatcaacaccacccacagaatcgagagcgacaagatggacggcgtgagccccaaccacggccagctgtag

SEQ ID NO: 276832 - protein, 254 aa, Artificial Sequence
  derived and/or modified sequence
MNFVFSLFSDKNFCVISLPHLTPEFFLIQNFVKMVPFNTCTLEQDLYVFHRAGLLKSINIRFATLLDTPGVENLVSTLMLNKSILEDLDRYNKARKDPDIEYIRSHYNIEDFIYFSHHQREEHGHMHHFALNPIFRHYTKFFLKEILRLGFKSCLYYRVYPKSREGKFQNPYAHSLTSALHYLVPVRPRRQIVYPLEKLGINAPSKAVSKDPMSYALNHTNRKLTLEPKITVNAKIIVVGASSVGISFLETLVF

SEQ ID NO: 276833 - DNA, 4042 bp, Artificial Sequence
  derived and/or modified sequence
accgtttccatggtgaccaggctgcgcgtcctccttgcggcagcgcgtggagtgcggcgtcctggagctgcggatgagtggacttttttctctcttttggggacaggataaaaaatgtcagtactcacttctccaagaggaaaggtagaagttgttcattgccgaagaacagaatcacaggatgtttattgtatcaaaagccttattagaaaatttacctgcaagctgtttgggaagctaaatatcatctatcttctagaaaaggccaaccttgctgttaccctctgcaatgacaaggaggagatcatggcccaggccaccttcctggactaccccaactggaatgttgccaagcaggatgactgggtgtcagtgttccgggagctcgacagtgacatcccatgcacacccctgaatacgttgttcatgcacctctttgtggccgtggatgagtattctgttggctgttgcaaagagattcttcgaaccgtgtataaggcagtgccagagctgcacttcatatttctcatcgtgccatcctacatgagcctaggctcaactctcataactgtttttgaccaagtggggaacatcccgtgtctgacgtatgaggaagactttgcagtgcatatatgtcacaggcacagccactatcctcagctgcacgttcgcaaagccagggtggaagaccatgacgatctcatgccaatatttatgcgctatgacacaattctgaaggaaacttacggtgaatacttcctggccgaactaatagaggcccaagatgaagagaatcatgctgttgtgtgtgaggtggaaggcacagctgttgggttcatgagtgtgtgctcaagagtgaacatgcaactgctgcatgagtgctttgacttgggccctttccacggactctgtttcccacatcctgatgacgttctggaatcaccacaagacctaagtgtccgaagaagtcaagatgctgagctcaggagtagcagccaaggttcccaaaaaatagtcgaggagttgcaggaacctgtctctccagataccatggaaaacatccagggaaatattgccagagaagctgcatccgaggaagctttaacagcagtccaaagtggaaatgttagtgaaccggaggacatagaaaaactcagtgacatctccactggatatgcacagtatcaccatgtcagcagtaggagcttggcatcgctcgtactgcctgaagagcccgtccacttccgccccatctacaggggagcctcagctgctttttgtattcagctgttttgtattgatgagaaatatgaagcaaggtcgctggattttatgaattttgttttcagtcttttttctgataagaacttctgtgtaatttctctgccccatctcacccccgagttcttcctcatccagaacttcgtgaaaatggtccctttcaacacctgcaccctcgagcaggacctctacgtcttccaccgggctggattgctcaagtccattaatataagatttgccactctcttggatactcctggtgtggaaaatcttgtcagcaccctcatgttgaataaaagcatattggaggacttagaccgttacaacaaggctcgcaaagaccctgacattgagtacatacggtcccattacaacattgaagatttcatctacttcagtcaccaccagcgcgaagaacacgggcacatgcatcactttgccctcaaccccattttccggcactacaccaagttctttctgaaggagatcctgcgtttaggctttaaatcctgtctctactaccgtgtttacccaaaatccagagaaggcaagttccagaacccctacgcccactccctgacatctgcccttcattacttggttcccgtgcgaccacgacgacagattgtctatcctctggaaaagcttggcataaacgctccatcaaaggcggtctccaaggatccgatgagttatgctttaaaccatacaaacagaaaactaacattggaacctaaaattactgtcaatgccaagatcattgtggttggtgcatccagtgttggaatttccttcctagagacattggtattttgctctcacatgaagtttaataatcttaccctgatttcaactcatggactcccaggaaaaaaacttctggacactgaacaaaggaaatttttagccagcgaccactgttttaatgataaagattatgcactgatgtcactgtgctcctgggttaatgtcgtggtgggtagaatgaccggcatagaccgagcagccaagcacgttgtgctttccacggacgagatcgtgccctacgaccacctcatcctctgcaccgggcagcagtaccaggtcccatgccctacagaggctgatattagtcaacacctgacaaacagggaggttcccaacagcagtcagcggcggtacacggggaaagttccttgcaaccatttcactctcaacgaggaagaggattgctttaaggcactgatttggataaggaataactccatcaccacagaagggaatatcattgtctatgggaatacaattgatacttacaccaccgtggagacgctcttaaaccttggcgtgagcggcagccgcatccacctcgtgcagcccccgcccgcctccaccatcacctgcatcaacaactactcggtggagagcgccgtggcggacgcgctaggagccgccggagtcactatgtaccgggatgcgatcctggcccagtggaatgacggcctgcacccagaccccatctacagcgcctccttcaccacacccaccaagcctttcagactccagtgctctatgttcttcagcttctgtgagaagaatgtggattatgaaacgtttaaagccctcaatgatgcatgtcttgtgtatgacagtcgacttgtgattgataccaacttccacaccaacgacatagccatcagagctgctggctccctcaccaaattctccaatagatactactcaaatgagtggactcacagcaacttcagttccaaagaaattggctttcagctggcagcagctatgctacatctctttgatccaacccttgagcctgtgaccgagccaccagctaatcttgaccggctcatccccatgtacaagggagccaagattcaagggggcattcttcctgggtcttaccattatctgcatattgccaagcctgccattccaactcccttggaggtacaaatggcacagcctaattatggtttagaactagtaaccggcagtgcgaaaaatgggacttacttccgaattcatattaacaagtataaaatggtggaaaccatcacgtgcctttctagggagcccttccccgcctccaactacatccgcttgtttggccagcacgagcaactcctcaacaacctgtgtgctcggtacgatgaaaacctgatcacagatctctatagctacttcaccgagccgtggtgcctggccctgttccacgatcgttttattgatctcaggaaagagttacgccaaatcttagcctccaaggaggaggaagatcttccttccatagagcagttagcccatcaaatagaagatgaggaaatcaacccgactgagaagcccaggcaatacctcaaaagagtttttgaggaatccatctacaaaaccctggtggagagaagcactcttgactacctgcactataaccgctaccacctgcccatgtacgcgtggccaggcatcgtttagttgtaggcagggtctcccctttatggttttcatttatttagttcctggaaacgcgctctgtagaaatagaaaagttctctgcagcctggtttgacagcgaagccagcccctggtggttttgttcattcctttccttccctgacttatgcctgtagttttctatcatcccagtaggtggcacacggccgtgtgcctctcttctggggcaggctcgctttacaaatcccaggcatgttcctgtgcagaataatccatttcagcaataaaatgagatcatagtgtgtaaaacttg

SEQ ID NO: 276834 - DNA, 765 bp, Artificial Sequence
  derived and/or modified sequence
atgaacttcgtgttcagcctgttcagcgacaagaacttctgcgtgatcagcctgccccacctgacccccgagttcttcctgatccagaacttcgtgaagatggtgcccttcaacacctgcaccctggagcaggacctgtacgtgttccacagagccggcctgctgaagagcatcaacatcagattcgccaccctgctggacacccccggcgtggagaacctggtgagcaccctgatgctgaacaagagcatcctggaggacctggacagatacaacaaggccagaaaggaccccgacatcgagtacatcagaagccactacaacatcgaggacttcatctacttcagccaccaccagagagaggagcacggccacatgcaccacttcgccctgaaccccatcttcagacactacaccaagttcttcctgaaggagatcctgagactgggcttcaagagctgcctgtactacagagtgtaccccaagagcagagagggcaagttccagaacccctacgcccacagcctgaccagcgccctgcactacctggtgcccgtgagacccagaagacagatcgtgtaccccctggagaagctgggcatcaacgcccccagcaaggccgtgagcaaggaccccatgagctacgccctgaaccacaccaacagaaagctgaccctggagcccaagatcaccgtgaacgccaagatcatcgtggtgggcgccagcagcgtgggcatcagcttcctggagaccctggtgttctag

SEQ ID NO: 276835 - DNA, 765 bp, Artificial Sequence
  derived and/or modified sequence
atgaacttcgtgttttccctgttctcagacaagaacttctgtgtgatttcgctgccgcacctcacgcccgagttctttctgattcagaactttgttaagatggttccctttaacacatgcaccctagaacaagatctgtatgtgttccaccgagctgggctgctcaaaagcatcaacatcagatttgctacattactggatactccaggggttgagaatctggtgtcaaccctgatgctgaacaagtcaatactggaggatctggaccgatataacaaggcgagaaaggaccccgacattgagtatataagaagtcactacaatatcgaggacttcatctactttagtcatcatcaaagggaagaacatgggcatatgcaccacttcgccctgaatcctatttttaggcattacacaaaattcttccttaaggaaatcctcagactgggttttaagtcttgtttgtactacagggtgtaccctaaatctagggagggcaagtttcagaatccttatgcacacagcctgacatccgcactgcactatctcgtacccgtcagaccccggcgacaaatcgtgtatcctttggagaagctcggtattaatgctccgtcaaaggccgtgtctaaggaccccatgtcatatgcactcaatcacactaacagaaagttgacgttagagcctaaaattactgtgaacgcaaagattatcgtggtgggggctagtagtgtcggcattagcttcctggaaacgttggtcttttag

SEQ ID NO: 276836 - DNA, 765 bp, Artificial Sequence
  derived and/or modified sequence
atgaactttgtgttcagcctcttcagtgacaagaacttctgtgtgatcagcctgccccacctgaccccagagttcttcctgatccagaactttgtgaagatggtgcccttcaacacctgcaccctggagcaggacctgtatgtgttccaccgggccggcctgctgaagagcatcaacatccgctttgccaccctgctggacaccccaggagtggagaacctggtgtccaccctgatgctgaacaagagcatcctggaggacctggaccgctacaacaaggccaggaaggaccctgacatcgagtacatccgcagccactacaacatcgaggacttcatctacttcagccaccaccagcgggaggagcacggccacatgcaccactttgccctgaaccccatcttccgccactacaccaagttcttcctgaaggagatcctgcggctgggcttcaagagctgcctgtactacagagtgtaccccaagagccgggagggcaagttccagaacccctatgcccacagcctgaccagcgccctgcactacctggtgcctgtgcggccccggcggcagatcgtgtaccccctggagaagctgggcatcaatgcccccagcaaggctgtgtccaaggaccccatgtcctatgccctgaaccacaccaacaggaagctgaccctggagcccaagatcaccgtgaatgccaagatcatcgtggtgggcgccagctctgtgggcatctccttcctggagaccctggtgttctag

SEQ ID NO: 276837 - DNA, 765 bp, Artificial Sequence
  derived and/or modified sequence
atgaacttcgtgttcagcctgttcagcgacaagaacttctgcgtgattagcttgccccatctgacacccgaattcttcctgatacagaattttgttaaaatggtgcctttcaatacatgcacactggaacaggacttgtatgttttccatagagctggtctcctgaaaagtattaacatccgattcgcgactttgctggatacgccaggtgtggaaaacttagtctctaccctgatgctcaataagagcatactggaggacctcgaccggtataataaggcgcggaaggaccctgacattgaatacatccgctcccattataatatcgaagactttatttactttagtcaccatcagcgggaggaacacgggcacatgcaccactttgctctgaaccctatatttagacattacaccaagtttttcctgaaagaaatcctccgcctcggatttaaatcatgtctttattatagggtctaccccaaatcgcgggagggaaagtttcagaacccatatgcccactccctcacatcagcactacattacctggttccagtgcgcccgcggcggcaaatcgtgtaccctttagagaaattaggcatcaacgcaccatcaaaggcagtgagcaaggaccccatgtcctacgccctaaaccatacaaaccggaaacttacccttgagcccaaaatcaccgtcaacgccaagatcatagtggtcggcgcctcaagtgtggggatctcatttctggaaaccctcgttttctag

SEQ ID NO: 276838 - DNA, 765 bp, Artificial Sequence
  derived and/or modified sequence
atgaatttcgtgttcagtttgttttcagacaaaaacttctgtgtaataagccttcctcatctgacgcctgagttcttcctcatccagaattttgttaagatggtgcccttcaacacttgcacgctcgagcaggacctctacgtcttccatcgggcaggccttttgaaatctatcaatataagatttgccaccctcctcgatactcccggagtggaaaacctggtgtccacattgatgctcaataaatctatcctcgaagacttagacaggtataacaaagctcgcaaggacccagatattgaatacattagaagccattataacatcgaagacttcatctattttagtcaccaccagcgagaggaacacggccatatgcaccattttgccctcaacccaatattcaggcactacactaaattcttcctgaaagaaattttgagactaggtttcaagtcctgcctttactaccgggtctatccaaagtctcgcgagggtaagtttcagaacccatacgcgcacagccttacttccgctctccactacctggttcccgtccgtcctagacgccagatcgtttaccctttggaaaaactgggcattaatgctccttctaaggccgtgtcaaaggacccaatgtcttacgcactgaatcacacaaaccgcaagctgacattggagcctaagatcaccgtgaacgcgaagatcattgtggtgggggcaagctcagttggaatctccttccttgaaactctggtgttctag

SEQ ID NO: 276839 - protein, 145 aa, Artificial Sequence
  derived and/or modified sequence
GLRESLFRTPRFGCFSIFPRRIRVEVEGTAVGFMSVCSRVNMQLLHECFDLGPFHGLCFPHPDDVLESPQDLSVRRSQDAELRSSSQGSQKIVEELQEPVSPDTMENIQGNIAREAASEEALTAVQSGNVSEPEVAGFYEFCFQS

SEQ ID NO: 276840 - DNA, 438 bp, Artificial Sequence
  derived and/or modified sequence
ggcctgagagagagcctgttcagaacccccagattcggctgcttcagcatcttccccagaagaatcagagtggaggtggagggcaccgccgtgggcttcatgagcgtgtgcagcagagtgaacatgcagctgctgcacgagtgcttcgacctgggccccttccacggcctgtgcttcccccaccccgacgacgtgctggagagcccccaggacctgagcgtgagaagaagccaggacgccgagctgagaagcagcagccagggcagccagaagatcgtggaggagctgcaggagcccgtgagccccgacaccatggagaacatccagggcaacatcgccagagaggccgccagcgaggaggccctgaccgccgtgcagagcggcaacgtgagcgagcccgaggtggccggcttctacgagttctgcttccagagctag

SEQ ID NO: 276841 - DNA, 438 bp, Artificial Sequence
  derived and/or modified sequence
gggctgagagaatccctgtttcgtactcccaggtttgggtgtttttctatctttccccgacgcatccgcgtggaggtggaaggaactgccgtggggtttatgtctgtgtgcagccgagttaacatgcagctgcttcacgagtgcttcgacctggggcctttccacgggttatgcttccctcatcccgatgatgtactagaaagcccacaggatctctcggtgcgtcggagccaggatgccgaactccgaagttcctcccaaggtagtcaaaagattgtcgaggaattgcaagagcctgtgagcccagatacgatggagaacatccaaggtaatattgctagagaggcggccagcgaggaggccctcactgccgtacagagcggaaacgtcagtgagcccgaggttgccggcttttatgagttttgcttccagagctag

SEQ ID NO: 276842 - DNA, 438 bp, Artificial Sequence
  derived and/or modified sequence
ggcctgcgggagagcctcttccgcaccccccgcttcggctgcttcagcatcttcccccggcgcatccgggtggaggtggagggcacagctgtgggcttcatgtctgtgtgcagccgggtgaacatgcagctgctgcatgaatgttttgacctgggccccttccacggcctgtgcttcccccacccagatgatgtgctggagagcccccaggacctgtctgtgagaagaagccaggatgctgagctgcggagcagcagccagggcagccagaagatcgtggaggagctgcaggagcctgtgtccccagacaccatggagaacatccagggcaacatcgcccgggaggccgccagcgaggaggccctgacagctgtgcagagcggaaatgtgtctgagcctgaggtggccggcttctatgagttctgcttccagagctag

SEQ ID NO: 276843 - DNA, 438 bp, Artificial Sequence
  derived and/or modified sequence
ggcctgcgggagagcctgttccggaccccccggttcggctgcttctcgatctttccaaggcgcatcagggtggaagtcgaggggaccgctgtgggatttatgtcggtttgttctcgagtgaacatgcagctgcttcatgagtgctttgacctaggtcctttccatggtctgtgctttccacacccagatgatgtcctcgaatccccacaagacttatcagtgcgcaggagccaggatgccgagctccggagctcttcccagggctcccaaaagattgtcgaagagctccaggagcctgtcagccccgacaccatggagaacatacaggggaacatcgccagagaggcagcttctgaggaggccctaacggcagtgcaatccggtaacgtgagtgagccggaagtcgcaggcttttacgagttttgcttccagtcgtag

SEQ ID NO: 276844 - DNA, 438 bp, Artificial Sequence
  derived and/or modified sequence
ggtctccgagagtcactcttcaggaccccacggttcggatgtttcagcatcttcccgaggcgcatccgcgtggaggtagaaggcacagctgttggttttatgtcagtatgcagccgcgtgaatatgcaattgctgcacgagtgctttgatctcggcccatttcacgggttgtgttttcctcatcccgatgacgttttggagagtcctcaggacctgagtgtccggcgaagccaagatgctgagcttcgctcttcttctcaaggctcacagaaaattgttgaggagttgcaggagccagtgagtccagatactatggaaaacattcagggcaatatcgcacgggaggctgcaagcgaggaggcccttactgccgtccagagcggcaatgtttcagaacctgaagtcgcagggttctatgagttctgcttccagtcttag

SEQ ID NO: 276845 - protein, 200 aa, Artificial Sequence
  derived and/or modified sequence
MSYALNHTNRKLTLEPKITVNAKIIVVGASSVGISFLETLVFCSHMKFNNLTLISTHGLPGKKLLDTEQRKFLASDHCFNDKDYALMSLCSWVNVVVGRMTGIDRAAKHVVLSTDEIVPYDHLILCTGQQYQVPCPTEADISQHLTNREVPNSSQRRYTGKVPCNHFTLNEEEDCFKALIWIRNNSITTEDGGRASVLFC

SEQ ID NO: 276846 - protein, 320 aa, Artificial Sequence
  derived and/or modified sequence
MSYALNHTNRKLTLEPKITVNAKIIVVGASSVGISFLETLVFCSHMKFNNLTLISTHGLPGKKLLDTEQRKFLASDHCFNDKDYALMSLCSWVNVVVGRMTGIDRAAKHVVLSTDEIVPYDHLILCTGQQYQVPCPTEADISQHLTNREVPNSSQRRYTGKVPCNHFTLNEEEDCFKALIWIRNNSITTEGNIIVYGNTIDTYTTVETLLNLGVSGSRIHLVQPPPASTITCINNYSVESAVADALGAAGVTMYRDAILAQWNDGLHPDPIYSASFTTPTKPFRLQCSGAFFLGLTIICILPSLPFQLPWRYKWHSLIMV

SEQ ID NO: 276847 - DNA, 1059 bp, Artificial Sequence
  derived and/or modified sequence
tgcgtataatgcacatgactctcttgaagtgatgacaatgaacagccatggccaagcacccatgcacagatgagttatgctttaaaccatacaaacagaaaactaacattggaacctaaaattactgtcaatgccaagatcattgtggttggtgcatccagtgttggaatttccttcctagagacattggtattttgctctcacatgaagtttaataatcttaccctgatttcaactcatggactcccaggaaaaaaacttctggacactgaacaaaggaaatttttagccagcgaccactgttttaatgataaagattatgcactgatgtcactgtgctcctgggttaatgtcgtggtgggtagaatgaccggcatagaccgagcagccaagcacgttgtgctttccacggacgagatcgtgccctacgaccacctcatcctctgcaccgggcagcagtaccaggtcccatgccctacagaggctgatattagtcaacacctgacaaacagggaggttcccaacagcagtcagcggcggtacacggggaaagttccttgcaaccatttcactctcaacgaggaagaggattgctttaaggcactgatttggataaggaataactccatcaccacagaagatggaggaagagcatcagtgttattctgctgacttgcccagttgtcagggatggtgatgctgtggtgcccccttaaagggaaatgttttttcaagatttaagactgactcccagcagccagtgcataaagccatttggagtgcctgcttttgtccaccaaatagccaggataagaagtatgtggaaattagtttcctgtcttacatgtaggtgattttctccaggtctggtgcttaatgactcccccaggcacctctcaggtaggtgctcttaacactgaaatgctaggaccaagctctgggagccttcagggaaacctgacctggccaagttcatttaactctgtgtagaggcccttttcaagtaaattctcaagtaaaaaaagttaagaaaaaatgttaacatcttgccttaaaaaa

SEQ ID NO: 276848 - DNA, 3203 bp, Artificial Sequence
  derived and/or modified sequence
ggcttaagagagagcctcttcagaactccaagatttggatgtttttctatttttcccagaagaattcgtgttgaggtggaaggcacagctgttgggttcatgagtgtgtgctcaagagtgaacatgcaactgctgcatgagtgctttgacttgggccctttccacggactctgtttcccacatcctgatgacgttctggaatcaccacaagacctaagtgtccgaagaagtcaagatgctgagctcaggagtagcagccaaggttcccaaaaaatagtcgaggagttgcaggaacctgtctctccagataccatggaaaacatccagggaaatattgccagagaagctgcatccgaggaagctttaacagcagtccaaagtggaaatgttagtgaaccggaggtcgctggattttatgaattttgttttcagtcttttttctgataagaacttctgtgtaatttctctgccccatctcacccccgagttcttcctcatccagaacttcgtgaaaatggtccctttcaacacctgcaccctcgagcaggacctctacgtcttccaccgggctggattgctcaagtccattaatataagatttgccactctcttggatactcctggtgtggaaaatcttgtcagcaccctcatgttgaataaaagcatattggaggacttagaccgttacaacaaggctcgcaaagaccctgatggaacactgctgcaggcatttgtagctgaagttgcagaacaaatagttggtattgcagtgatcagaaatgaaatggacattgagtacatacggtcccattacaacattgaagatttcatctacttcagtcaccaccagcgcgaagaacacgggcacatgcatcactttgccctcaaccccattttccggcactacaccaagttctttctgaaggagatcctgcgtttaggctttaaatcctgtctctactaccgtgtttacccaaaatccagagaaggcaagttccagaacccctacgcccactccctgacatctgcccttcattacttggttcccgtgcgaccacgacgacagattgtctatcctctggaaaagcttggcataaacgctccatcaaaggcggtctccaaggatccgatgagttatgctttaaaccatacaaacagaaaactaacattggaacctaaaattactgtcaatgccaagatcattgtggttggtgcatccagtgttggaatttccttcctagagacattggtattttgctctcacatgaagtttaataatcttaccctgatttcaactcatggactcccaggaaaaaaacttctggacactgaacaaaggaaatttttagccagcgaccactgttttaatgataaagattatgcactgatgtcactgtgctcctgggttaatgtcgtggtgggtagaatgaccggcatagaccgagcagccaagcacgttgtgctttccacggacgagatcgtgccctacgaccacctcatcctctgcaccgggcagcagtaccaggtcccatgccctacagaggctgatattagtcaacacctgacaaacagggaggttcccaacagcagtcagcggcggtacacggggaaagttccttgcaaccatttcactctcaacgaggaagaggattgctttaaggcactgatttggataaggaataactccatcaccacagaagggaatatcattgtctatgggaatacaattgatacttacaccaccgtggagacgctcttaaaccttggcgtgagcggcagccgcatccacctcgtgcagcccccgcccgcctccaccatcacctgcatcaacaactactcggtggagagcgccgtggcggacgcgctaggagccgccggagtcactatgtaccgggatgcgatcctggcccagtggaatgacggcctgcacccagaccccatctacagcgcctccttcaccacacccaccaagcctttcagactccagtgctctatgttcttcagcttctgtgagaagaatgtggattatgaaacgtttaaagccctcaatgatgcatgtcttgtgtatgacagtcgacttgtgattgataccaacttccacaccaacgacatagccatcagagctgctggctccctcaccaaattctccaatagatactactcaaatgagtggactcacagcaacttcagttccaaagaaattggctttcagctggcagcagctatgctacatctctttgatccaacccttgagcctgtgaccgagccaccagctaatcttgaccggctcatccccatgtacaagggagccaagattcaagggggcattcttcctgggtcttaccattatctgcatattgccaagcctgccattccaactcccttggaggtacaaatggcacagcctaattatggtttagaactagtaaccggcagtgcgaaaaatgggacttacttccgaattcatattaacaagtataaaatggtggaaaccatcacgtgcctttctagggagcccttccccgcctccaactacatccgcttgtttggccagcacgagcaactcctcaacaacctgtgtgctcggtacgatgaaaacctgatcacagatctctatagctacttcaccgagccgtggtgcctggccctgttccacgatcgttttattgatctcaggaaagagttacgccaaatcttagcctccaaggaggaggaagatcttccttccatagagcagttagcccatcaaatagaagatgaggaaatcaacccgactgagaagcccaggcaatacctcaaaagagtttttgaggaatccatctacaaaaccctggtggagagaagcactcttgactacctgcactataaccgctaccacctgcccatgtacgcgtggccaggcatcgtttagttgtaggcagggtctcccctttatggttttcatttatttagttcctggaaacgcgctctgtagaaatagaaaagttctctgcagcctggtttgacagcgaagccagcccctggtggttttgttcattcctttccttccctgacttatgcctgtagttttctatcatcccagtaggtggcacacggccgtgtgcctctcttctggggcaggctcgctttacaaatcccaggcatgttcctgtgcagaataatccatttcagcaataaaatgagatcatagtgtgtaaaacttg

SEQ ID NO: 276849 - DNA, 603 bp, Artificial Sequence
  derived and/or modified sequence
atgagctacgccctgaaccacaccaacagaaagctgaccctggagcccaagatcaccgtgaacgccaagatcatcgtggtgggcgccagcagcgtgggcatcagcttcctggagaccctggtgttctgcagccacatgaagttcaacaacctgaccctgatcagcacccacggcctgcccggcaagaagctgctggacaccgagcagagaaagttcctggccagcgaccactgcttcaacgacaaggactacgccctgatgagcctgtgcagctgggtgaacgtggtggtgggcagaatgaccggcatcgacagagccgccaagcacgtggtgctgagcaccgacgagatcgtgccctacgaccacctgatcctgtgcaccggccagcagtaccaggtgccctgccccaccgaggccgacatcagccagcacctgaccaacagagaggtgcccaacagcagccagagaagatacaccggcaaggtgccctgcaaccacttcaccctgaacgaggaggaggactgcttcaaggccctgatctggatcagaaacaacagcatcaccaccgaggacggcggcagagccagcgtgctgttctgctag

SEQ ID NO: 276850 - DNA, 963 bp, Artificial Sequence
  derived and/or modified sequence
atgagctacgccctgaaccacaccaacagaaagctgaccctggagcccaagatcaccgtgaacgccaagatcatcgtggtgggcgccagcagcgtgggcatcagcttcctggagaccctggtgttctgcagccacatgaagttcaacaacctgaccctgatcagcacccacggcctgcccggcaagaagctgctggacaccgagcagagaaagttcctggccagcgaccactgcttcaacgacaaggactacgccctgatgagcctgtgcagctgggtgaacgtggtggtgggcagaatgaccggcatcgacagagccgccaagcacgtggtgctgagcaccgacgagatcgtgccctacgaccacctgatcctgtgcaccggccagcagtaccaggtgccctgccccaccgaggccgacatcagccagcacctgaccaacagagaggtgcccaacagcagccagagaagatacaccggcaaggtgccctgcaaccacttcaccctgaacgaggaggaggactgcttcaaggccctgatctggatcagaaacaacagcatcaccaccgagggcaacatcatcgtgtacggcaacaccatcgacacctacaccaccgtggagaccctgctgaacctgggcgtgagcggcagcagaatccacctggtgcagcccccccccgccagcaccatcacctgcatcaacaactacagcgtggagagcgccgtggccgacgccctgggcgccgccggcgtgaccatgtacagagacgccatcctggcccagtggaacgacggcctgcaccccgaccccatctacagcgccagcttcaccacccccaccaagcccttcagactgcagtgcagcggcgccttcttcctgggcctgaccatcatctgcatcctgcccagcctgcccttccagctgccctggagatacaagtggcacagcctgatcatggtgtag

SEQ ID NO: 276851 - DNA, 603 bp, Artificial Sequence
  derived and/or modified sequence
atgtcatacgcccttaatcatactaataggaaacttactctcgagcccaagatcacagtaaacgcgaaaattattgtggtgggtgcgagctcagtaggaatttcctttctggaaaccctcgtgttctgtagtcacatgaagtttaacaatctaactctgatctctacccatgggcttccaggtaagaaattactagacaccgaacagcgaaaatttctggctagcgatcactgttttaacgataaggactacgcactgatgtctttgtgttcatgggtcaatgtggtggtgggcaggatgacagggatcgaccgggctgccaagcacgttgtgttgtcgactgatgagatcgttccatatgaccatctaatactgtgcaccgggcagcagtaccaagtcccgtgtccgacagaggccgacatatcccagcacctgaccaatagagaagttcctaacagcagtcagaggcgctacacgggaaaagtgccatgcaaccacttcaccctcaacgaggaagaagactgttttaaagcactgatttggatccggaacaactctataacaacggaagatggcggacgcgcatcagttctcttttgttag

SEQ ID NO: 276852 - DNA, 963 bp, Artificial Sequence
  derived and/or modified sequence
atgagttacgccctgaatcatacaaatcggaagctgaccctggaacctaagattactgtgaacgccaagattatcgtggttggagctagttctgtcggcatctcgtttctggaaaccttggtgttttgctcccatatgaaattcaataatttgaccctcatttccacgcacggtctgcccggtaagaagttgttggatactgaacaacggaaatttctggcctcagatcactgttttaacgataaagattacgcacttatgtccttgtgttcctgggtgaatgtggttgttggccgtatgaccggcatcgaccgggcagctaagcatgtcgtgttaagcacagatgaaattgtgccatacgatcacctgatcctatgtactggacaacagtatcaggtcccctgcccaaccgaagcagatatcagtcagcatctcaccaacagagaggtgcctaattcctcccaacgtcgttacaccggcaaggtgccgtgtaatcactttactttgaacgaagaagaggactgtttcaaggcactgatttggattaggaacaattctatcaccactgaggggaatatcattgtctatggcaataccatcgacacatacacaaccgtggaaaccctgctaaatctcggagtaagcggctcaagaatacatctggttcagccccccccagccagtactattacctgcattaacaactattcagtggagtcagctgtggctgacgctctcggtgcagctggcgtgacgatgtatagggacgctatcctagcccagtggaatgacggccttcatcccgaccccatctactccgcctcgttcaccacgcccaccaaaccattcagacttcagtgctcaggggccttctttcttggcctcaccatcatttgcatcctgccgtccctgccatttcagttgccgtggcgctataagtggcacagcctcattatggtgtag

SEQ ID NO: 276853 - DNA, 603 bp, Artificial Sequence
  derived and/or modified sequence
atgagctacgcattgaaccatacaaatcggaaactcaccctcgaaccaaagataactgtgaacgccaagataatagtcgtgggagctagctcagtcggtatttcattcctcgagacccttgtgttttgcagtcacatgaaatttaacaatctaactttgataagcacgcacggactgccgggcaaaaagctgttggatactgaacagagaaaatttctcgctagcgatcactgcttcaacgacaaggactacgccctgatgagtctttgctcctgggtaaacgtggtagtgggcagaatgacaggcattgatagagcagctaagcacgtggtgctctccacggatgagattgtgccttatgaccacttaatcctgtgcacagggcagcaatatcaagtgccctgtcctaccgaggccgatatttcacagcacctgaccaatagggaagttcccaattctagccagcggcggtatacggggaaagtgccctgcaatcatttcacgctcaacgaagaggaggactgcttcaaagcccttatctggatccgcaataattcaataactacagaagacggtggacgggctagtgtgctcttctgctag

SEQ ID NO: 276854 - DNA, 603 bp, Artificial Sequence
  derived and/or modified sequence
atgtcctatgccctgaaccacaccaacaggaagctgaccctggagcccaagatcaccgtgaatgccaagatcatcgtggtgggcgccagctctgtgggcatctccttcctggagaccctggtgttctgcagccacatgaagttcaacaacctgaccctcatcagcacccacggcctgcccgggaagaagctgctggacacagagcagaggaagttcctggccagtgaccactgcttcaatgacaaggactatgccctgatgagcctgtgctcctgggtgaatgtggtggtgggccgcatgactggaattgaccgggccgccaagcacgtggtgctgagcacagatgaaattgtgccctatgaccacctgatcctgtgcaccggccagcagtaccaggtgccctgccccacagaagctgacatcagccagcacctgaccaaccgggaggtgcccaacagcagccagaggcgctacacaggcaaggtgccctgcaaccacttcaccctgaatgaggaggaggactgcttcaaggccctgatctggatccggaacaacagcatcaccacagaagatggcggccgggcctctgtgctcttctgctag

SEQ ID NO: 276855 - DNA, 963 bp, Artificial Sequence
  derived and/or modified sequence
atgtcctatgccctgaaccacaccaacaggaagctgaccctggagcccaagatcaccgtgaatgccaagatcatcgtggtgggcgccagctctgtgggcatctccttcctggagaccctggtgttctgcagccacatgaagttcaacaacctgaccctcatcagcacccacggcctgcccgggaagaagctgctggacacagagcagaggaagttcctggccagtgaccactgcttcaatgacaaggactatgccctgatgagcctgtgctcctgggtgaatgtggtggtgggccgcatgactggaattgaccgggccgccaagcacgtggtgctgagcacagatgaaattgtgccctatgaccacctgatcctgtgcaccggccagcagtaccaggtgccctgccccacagaagctgacatcagccagcacctgaccaaccgggaggtgcccaacagcagccagaggcgctacacaggcaaggtgccctgcaaccacttcaccctgaatgaggaggaggactgcttcaaggccctgatctggatccggaacaacagcatcaccacagagggcaacatcatcgtgtatggcaacaccatcgacacctacaccaccgtggagaccctgctgaacctgggcgtgtctggcagccgcatccacctggtgcagcccccaccagccagcaccatcacctgcatcaacaactacagcgtggagagcgctgtggctgatgccctgggcgctgctggggtgaccatgtacagagatgccatcctggcccagtggaatgatggcctgcacccagaccccatctacagcgccagcttcaccacccccaccaagcccttccggctgcagtgcagcggggccttcttcctgggcctgaccatcatctgcatcctgcccagcctgcccttccagctgccctggagatacaagtggcacagcctcatcatggtgtag

SEQ ID NO: 276856 - DNA, 603 bp, Artificial Sequence
  derived and/or modified sequence
atgagctacgccctgaaccacaccaaccggaagctgaccctggagcctaaaataaccgttaacgcgaagataattgttgtgggcgcaagttctgtcggaattagctttcttgagacgctcgttttttgctctcatatgaaattcaataatcttacacttattagcacacacggactcccaggaaagaagctacttgacaccgagcagaggaagtttttggcctccgatcactgctttaacgacaaggattacgccctgatgtcattatgtagctgggttaacgtcgtcgttgggaggatgactggaattgaccgagccgcaaagcatgttgtgctgtctacagacgaaattgtcccgtacgatcacctgattttatgcactggacagcaatatcaggtcccctgccctactgaagcagatattagtcagcacctgaccaacagagaggtcccgaactctagccaacggagatacacgggcaaggtgccttgtaaccattttacactcaacgaggaagaagattgctttaaggctctgatatggattcgaaacaacagcattacaactgaggatggcggaagagcgtccgtgctgttctgttag

SEQ ID NO: 276857 - DNA, 963 bp, Artificial Sequence
  derived and/or modified sequence
atgagctacgccctgaaccacaccaaccggaagctgaccctggagcccaaaataacagtaaatgcaaaaattatcgtggtgggtgcctcttctgtaggtatctccttcttggagacattagtgttctgcagtcacatgaagttcaataatctcacgctgatctccacccatgggctccctggaaaaaagctgttagataccgaacagcggaagtttctggccagcgaccactgctttaacgataaagattacgctctcatgtcgctttgtagctgggttaatgtggtggtgggcaggatgaccggaattgatcgggccgccaaacatgtggtgctgtcaacggatgagatcgttccatacgaccaccttattctgtgtaccggccaacagtaccaggtgccttgtcctactgaagctgacatcagccagcatttgacaaatagggaggtgcctaattcctcacagcgtaggtacacaggcaaggtaccatgtaaccacttcactcttaacgaagaggaggattgttttaaggcccttatctggataagaaataatagcattacaaccgaaggtaacataatcgtttacggcaataccatcgatacatataccactgtcgaaacactgctgaacctgggagtcagtggatcgcgtatacatctcgttcagccgccgcccgctagcactattacttgcatcaacaactatagtgtggaaagcgctgtggcggatgctctaggagcagctggtgtgacaatgtacagagatgccattcttgctcagtggaatgacggcctgcaccctgatccgatatatagtgcttcgtttaccacgcccacaaagccattccgacttcagtgcagtggcgccttcttcctcgggctgacaatcatctgcatcttgccaagtctcccatttcaactgccttggcgatataaatggcactctcttattatggtgtag

SEQ ID NO: 276858 - DNA, 603 bp, Artificial Sequence
  derived and/or modified sequence
atgagctacgccctgaaccacaccaaccggaagctgaccctggagccgaaaatcaccgtgaacgcgaagattatcgtagtcggagcttcatcagttggcatcagttttctggaaacactggttttctgctctcacatgaaatttaacaacttaactctgatcagcacacacggccttccggggaaaaaactgctggacacagagcagagaaaatttctggcttctgaccactgctttaatgataaggactacgccctgatgtccctttgtagctgggtcaacgtagtcgtgggccgtatgactggcattgatagggctgctaagcacgttgtcttatccacagatgagatcgttccatacgaccacctcatcctctgtaccggacagcaataccaggtaccctgccctacagaggccgatatttctcagcatcttaccaacagagaggtgcccaacagctcccagcgccggtataccgggaaggtgccgtgcaatcacttcacactgaatgaggaagaggactgtttcaaggccctgatttggattagaaacaattctatcacaaccgaggacggagggagggcctccgtgctcttttgttag

SEQ ID NO: 276859 - DNA, 603 bp, Artificial Sequence
  derived and/or modified sequence
atgtcttacgcactgaaccacacaaaccgcaaactgaccctggagccaaaaatcaccgtaaatgccaaaataatcgtggtgggtgcttcctctgtggggatctctttcctcgaaacactggtcttttgttctcatatgaaatttaacaaccttaccctgatctcgactcacggtctcccagggaagaagctccttgacactgaacagcgcaagttcctggcctcagatcactgctttaacgacaaagattatgcactgatgtcgctgtgcagctgggtcaacgtggttgtggggaggatgaccggaattgacagggccgctaagcatgtggtgctgtcaacagacgagatcgtcccatacgaccacctcattctctgcacaggacagcagtaccaggtcccatgtccaacagaggcggatatctcccagcatttgactaatagggaggtgccaaattccagtcagcgtaggtacacgggtaaagtgccctgtaaccactttaccctgaacgaggaggaagactgcttcaaagcccttatctggatccgtaataatagcataactactgaggatggcggaagagcctcagtgcttttttgctag

SEQ ID NO: 276860 - DNA, 963 bp, Artificial Sequence
  derived and/or modified sequence
atgagctatgctctgaatcatacaaataggaaactgactttggaacccaaaatcaccgtgaacgctaaaataatcgtcgtcggcgcttcaagcgtgggcatctcctttctggagacgctggtattttgttcccacatgaaattcaataatttaacactgataagcacccatggcctccccggaaagaaactactggacacagagcagagaaagtttctggcaagcgatcattgttttaacgataaagactacgccctcatgtcactgtgctcctgggtgaacgtggtcgtgggccgtatgaccggcattgatcgtgcggcaaagcatgtagttctgagcaccgatgagatcgtcccatatgatcacctgattctctgcacagggcagcagtaccaggttccctgtccaacagaagctgatattagtcaacacttgaccaatcgagaagtgcctaattcttcacagcgacgctacacgggaaaagtcccctgtaatcatttcacactcaatgaagaggaagactgtttcaaagctcttatatggatcaggaataactccattacgactgaaggaaacataattgtatacggaaacacaatcgacacttacacaaccgtagagactctcctcaatctgggcgtctcaggttctaggatccatctggtccaacccccacctgcatctaccattacctgtatcaataactatagcgtggagtcagcagttgcggatgcactgggcgcagccggtgtcacaatgtatagagatgccatcctggcgcagtggaacgacggactgcatcctgatccaatttattcagcctcattcaccactcctaccaaaccgttcaggctgcagtgctctggagccttcttcctgggtctgactatcatctgtatcctgccttcccttcccttccagctcccgtggcggtacaagtggcattctctaatcatggtttag

SEQ ID NO: 276861 - DNA, 603 bp, Artificial Sequence
  derived and/or modified sequence
atgagctatgccctgaaccacacaaatagaaagctcacgctggagccaaaaatcacagtcaacgccaagattatcgtcgttggtgcctcgagcgtcggaatttccttcttggaaactctggtgttctgttcacacatgaagtttaataatcttacactgatctccacacatggcctcccgggaaagaagcttctggacacagaacaacgtaaatttctggcatctgaccactgtttcaatgacaaagattatgcactgatgtcactgtgctcttgggtgaacgtagtcgtggggagaatgacaggcatagatagggcagctaaacatgtcgtcctcagcactgacgagatagttccttacgatcacctgattctgtgtaccggacagcagtaccaggttccttgtccgacggaagccgatataagtcagcacctaactaatagggaagtgcccaactcctcccagcgccgatacacagggaaggtcccatgtaatcatttcactctcaacgaggaagaggactgtttcaaggcccttatttggatccggaacaatagtataaccaccgaagatgggggacgcgctagtgtcctgttctgttag

SEQ ID NO: 276862 - DNA, 564 bp, Artificial Sequence
  derived and/or modified sequence
atgtcaggcggcggtcatggaggggtctgcttcctgtgctgtatactgcttcagggccggaagggagtgtggctcagacttaggaagatcctcttttgcgtactggggctttatatcgctatcccctttctgataaagttgtgccctggcattcaggctaagctgatatttctgaacttcgttagggtgccttattttatcgacttaaaaaagccccaggatcaaggcctgaaccacacttgcaactactacctgcagcccgaggaggacgtcactattggcgtctggcatacagtgccagccgtgtggtggaagaacgctcaaggtaaggaccaaatgtggtatgaggacgccctcgcctcctcccacccgatcattctctatctacacggcaatgcaggaacccggggcggcgaccaccgcgtcgaactgtacaaagtcctgagctcccttggctaccacgtggtaactttcgactaccgcggctggggtgattctgtgggtacccctagtgaacgaggcatgacctacgatgccctccacgttttcgactggatcaagtag

SEQ ID NO: 276863 - DNA, 564 bp, Artificial Sequence
  derived and/or modified sequence
atgtctgggggcggccacggcggcgtgtgcttcctgtgctgcatcctgctgcagggcaggaaaggagtgtggctgcggctgaggaagatcctcttctgtgtgctgggcctgtacatcgccatccccttcctgatcaagctgtgccccggcatccaggccaagctgatcttcctgaactttgtgcgggtgccctacttcatcgacctgaagaagccccaggaccagggcctgaaccacacctgcaactactacctgcagccagaagaagatgtgaccatcggcgtgtggcacacagtgcctgctgtgtggtggaagaatgcccagggcaaggaccagatgtggtatgaagatgccctggccagcagccaccccatcatcctgtacctgcacggcaatgccggcacccggggcggggaccaccgggtggagctgtacaaggtgctgagcagcctgggctaccacgtggtgacctttgactaccggggctggggagacagcgtgggcaccccatctgagcggggcatgacctatgatgccctgcacgtgtttgactggatcaagtag

SEQ ID NO: 276864 - DNA, 564 bp, Artificial Sequence
  derived and/or modified sequence
atgagcggcggcggccacggcggcgtgtgcttcctgtgctgcatcctcctgcaggggaggaagggcgtttggctcagactgcgaaagatccttttctgcgttcttggtctgtacatcgctataccattcctgatcaaattgtgcccgggcatacaggccaagctgatctttctcaattttgtccgggtgccttattttatcgatctgaagaagccccaggatcaggggcttaaccatacctgcaattattaccttcaacccgaggaggacgtgactattggtgtgtggcacacagtgcctgctgtctggtggaaaaacgctcaggggaaagatcagatgtggtatgaagatgccttggcgagttcacatcctataatcctctatctccatgggaatgctggtacaaggggcggagatcaccgggtggagctctacaaggtgctgagttctctgggctatcatgtggtgacatttgactatagaggatggggtgactccgtggggaccccgtcagagagaggaatgacatacgacgcgctgcacgtctttgattggatcaaatag

SEQ ID NO: 276865 - DNA, 564 bp, Artificial Sequence
  derived and/or modified sequence
atgtcagggggaggccatgggggagtgtgttttctgtgctgtatattgctgcagggacgaaaaggagtttggctccgactgagaaagatcctgttctgtgtgctggggctgtacattgccatcccctttctaattaagctctgccccggaatacaagccaagttgattttcctcaatttcgtcagggtgccctacttcattgacctgaagaagccacaggaccaggggctgaaccacacctgtaactactatctgcagccagaagaggatgtcaccattggtgtatggcacaccgtgccagccgtgtggtggaaaaatgcccagggaaaagaccagatgtggtacgaggatgctcttgccagctcacatcccattatactatatctccacggcaacgctggaacacggggaggcgatcaccgggttgagctgtataaagtcctgagttctctagggtaccatgtggtgacgttcgactacagaggctggggggacagcgtcggaactccaagcgagcgcggaatgacgtatgacgccctgcatgtcttcgactggattaaatag

SEQ ID NO: 276866 - DNA, 615 bp, Artificial Sequence
  derived and/or modified sequence
cgggaggcctgaggaggccgctctttcctgatacgaggttacagctggggtctgatgtcaggtggggggcatggtggggtctgctttctctgctgtattcttctgcaagggcgaaagggcgtgtggttgcgcctgaggaagatacttttctgtgttttggggttgtacattgccattccatttctcatcaaactatgtcctggaatacaggccaaactgattttcttgaatttcgtaagagttccctatttcattgatttgaaaaaaccacaggatcaaggtttgaatcacacgtgtaactactacctgcagccagaggaagacgtgaccattggagtctggcacaccgtccctgcagtctggtggaagaacgcccaaggcaaagaccagatgtggtatgaggatgccttggcttccagccaccctatcattctgtacctgcatgggaacgcaggtaccagaggaggcgaccaccgcgtggagctttacaaggtgctgagttcccttggttaccatgtggtcacctttgactacagaggttggggtgactcagtgggaacgccatctgagcggggcatgacctatgacgcactccacgtttttgactggatcaaa

SEQ ID NO: 276867 - DNA, 564 bp, Artificial Sequence
  derived and/or modified sequence
atgagcggcggcggccacggcggcgtgtgcttcctgtgctgcatcctgctgcagggcagaaagggcgtgtggctgagactgagaaagatcctgttctgcgtgctgggcctgtacatcgccatccccttcctgatcaagctgtgccccggcatccaggccaagctgatcttcctgaacttcgtgagagtgccctacttcatcgacctgaagaagccccaggaccagggcctgaaccacacctgcaactactacctgcagcccgaggaggacgtgaccatcggcgtgtggcacaccgtgcccgccgtgtggtggaagaacgcccagggcaaggaccagatgtggtacgaggacgccctggccagcagccaccccatcatcctgtacctgcacggcaacgccggcaccagaggcggcgaccacagagtggagctgtacaaggtgctgagcagcctgggctaccacgtggtgaccttcgactacagaggctggggcgacagcgtgggcacccccagcgagagaggcatgacctacgacgccctgcacgtgttcgactggatcaagtag

SEQ ID NO: 276868 - protein, 385 aa, Artificial Sequence
  derived and/or modified sequence
MAALSGVRWLTRALVSAGNPGAWRGLSTSAAAHAASRSQAEDVRVEGSFPVTMLPGDGVGPELMHAVKEVFKAAAVPVEFQEHHLSEVQNMASEEKLEQVLSSMKENKVAIIGKIHTPMEYKGELASYDMRLRRKLDLFANVVHVKSLPGYMTRHNNLDLVIIREQTEGEYSSLEHESARGVIECLKIVTRAKSQRIAKFAFDYATKKGRGKVTAVHKANIMKLGDGLFLQCCEEVAELYPKIKFETMIIDNCCMQLVQNPYQFDVLVMPNLYGNIIDNLAAGLVGGAGVVPGESYSAEYAVFETGARHPFAQAVGRNIANPTAMLLSASNMLRHLNLEYHSSMIADAVKKVIKVGKVRTRDMGGYSTTTDFIKSVIGHLQTKGS

SEQ ID NO: 276869 - protein, 233 aa, Artificial Sequence
  derived and/or modified sequence
MKMGERWSSLFPFPVSPSCCFLLTQSARGVIECLKIVTRAKSQRIAKFAFDYATKKGRGKVTAVHKANIMKLGDGLFLQCCEEVAELYPKIKFETMIIDNCCMQLVQNPYQFDVLVMPNLYGNIIDNLAAGLVGGAGVVPGESYSAEYAVFETGARHPFAQAVGRNIANPTAMLLSASNMLRHLNLEYHSSMIADAVKKVIKVGKVRTRDMGGYSTTTDFIKSVIGHLQTKGS

SEQ ID NO: 276870 - DNA, 1627 bp, Artificial Sequence
  derived and/or modified sequence
gcgggaaacatggcggcattgagcggagtccgctggctgacccgagcgctggtctccgccgggaaccctggggcatggagaggtctgagtacctcggccgcggcgcacgctgcatcgcggagccaggccgaggacgtgagggtggagggctcctttcccgtgaccatgcttccgggagacggtgtggggcctgagctgatgcacgccgtcaaggaggtgttcaaggctgccgctgtcccagtggagttccaggagcaccacctgagtgaggtgcagaatatggcatctgaggagaagctggagcaggtgctgagttccatgaaggagaacaaagtggccatcattggaaagattcataccccgatggagtataagggggagctagcctcctatgatatgcggctgaggcgtaagttggacttatttgccaacgtagtccatgtgaagtcacttcctgggtatatgactcggcacaacaatctagacctggtgatcattcgagagcagacagaaggggagtacagctctctggaacatgaggtgaggccccagaaactgggggagggcaaggatgaagatgggagagaggtggagctccttgtttcccttcccagtgtcacctagctgctgctttcttcttacccagagtgcaaggggtgtgattgagtgtttgaagattgtcacacgagccaagtctcagcggattgcaaagttcgcctttgactatgccaccaagaaggggcggggcaaggtcactgctgtccacaaggccaacatcatgaaacttggggatgggttgttcctgcagtgctgtgaggaagttgctgaactgtaccccaaaatcaaatttgagacaatgatcatagacaactgctgcatgcagctggtgcagaatccttaccagtttgatgtgcttgtgatgcccaatctctatgggaacattattgacaatctggctgctggcctggttgggggagctggtgtggtccctggtgagagctatagtgcagaatacgcagtctttgagacgggtgcccggcacccatttgcccaggcagtgggcaggaatatagccaatcccacggccatgctgctgtcggcttccaacatgctgcggcatcttaatcttgagtatcactccagcatgatcgcagatgcggtgaagaaggtgatcaaagttggcaaggtgcggactcgagacatgggcggctacagcaccacaaccgacttcatcaagtctgtcatcggtcacctgcagactaaagggagctagagccctttatttcttccaaccttgcaaggaccacactccccatacccttcagtgcagtgtaccagggaagagaccttgtgcctctaagcagtggaccatggtcaccttgctgggtagagcctaggttgtccttgggccggcttccttaggggacagactgttgggtggtgatggggattgttaggatggagcccaggccacatggatgatgatgattctcccccacaggttcgaacctctgacatgggtggctatgctacttgccatgacttcactgaggctgtcattgctgccttgccccacccataggccctgtccatacccatgtaaggtgttcaataaagaacatgaacc

SEQ ID NO: 276871 - protein, 410 aa, Artificial Sequence
  derived and/or modified sequence
MLSQLAMLQGSLLLVVATMSVAQQTRQEADRGCETLVVQHGHCSYTFLLPKSEPCPPGPEVSRDSNTLQRESLANPLHLGKLPTQQVKQLEQALQNNTQWLKKLERAIKTILRSKLEQVQQQMAQNQTAPMLELGTSLLNQTTAQIRKLTDMEAQLLNQTSRMDAQMPETFLSTNKLENQLLLQRQKLQQLQGQNSALEKRLQALETKQQEELASILSKKAKLLNTLSRQSAALTNIERGLRGVRHNSSLLQDQQHSLRQLLVLLRHLVQERANASAPAFIMAGEQVFQDCAEIQRSGASASGVYTIQVSNATKPRKVFCDLQSSGGRWTLIQRRENGTVNFQRNWKDYKQGFGDPAGEHWLGNEVVHQLTRRAAYSLRVELQDWEGHEAYAQYEHFHLGSENQLYRVVV

SEQ ID NO: 276872 - DNA, 1233 bp, Artificial Sequence
  derived and/or modified sequence
atgctctctcagcttgccatgctgcagggctcgctgctccttgtagtggctacgatgtccgttgcccaacagacacggcaagaagccgacaggggatgcgagacactggtagtccagcatgggcattgttcatacacctttctgctgcccaaatccgagccctgtccacctggaccagaggtgtcccgcgactccaatacgctgcagagagaatctttagcaaaccccctgcacttgggaaagctgccgactcaacaagttaagcagctggaacaggctctacagaataacacacagtggctaaagaagctcgagcgcgcaattaagactatcttgagatcgaaactcgagcaagtccaacaacagatggctcaaaaccagactgcacccatgcttgagctcggaacttcccttcttaaccagacgactgctcaaataagaaagcttacagatatggaggctcaactgttgaaccagacctctcgtatggacgcccagatgccggaaacctttctatcgacaaataagctcgagaatcagctgctgctccagagacagaaactgcagcagctgcaggggcagaattctgcactcgaaaaacggctgcaagcactcgagaccaagcagcaggaggagttggctagcattttgtccaagaaggccaagttgctgaataccctgtctaggcaatccgcagcgcttacgaacatagagcgtggattgaggggcgttaggcacaactctagcctactgcaagaccaacaacactccctgcgtcagctgctggtgctgcttcggcatttagtgcaggagagggccaacgcctctgcgccagcctttattatggccggtgagcaagttttccaggattgtgcggagatccagcggtcaggcgctagcgcatccggggtgtacaccattcaggtctccaatgccacaaaaccccgcaaggtgttctgtgacctgcagagctctggagggaggtggacactgattcagaggagggagaacggcacagttaactttcaacgaaattggaaagattataagcagggatttggcgatccagctggcgaacattggctggggaatgaagtggtgcaccagctgactcgcagggcggcttatagtttacgcgttgaattgcaggactgggagggccacgaggcctacgcccagtatgagcacttccacctcgggtccgagaatcagctgtacagagtcgtggtgtag

SEQ ID NO: 276873 - DNA, 1233 bp, Artificial Sequence
  derived and/or modified sequence
atgctgagccagctggccatgctgcagggcagcctgctgctggtggtggccaccatgtctgtggcccagcagacccggcaggaggccgaccggggctgtgagaccctggtggtgcagcacggccactgcagctacaccttcctgctgcccaagtctgagccctgccccccaggccctgaggtgtcccgggacagcaacaccctgcagcgggagagcctggccaaccccctgcacctgggcaagctgcccacccagcaggtgaagcagctggagcaggccctgcagaacaacacccagtggctgaagaagctggagcgggccatcaagaccatcctgcggagcaagctggagcaggtgcagcagcagatggcccagaaccagacagcccccatgctggagctgggcaccagcctgctgaaccagaccacagcccagatcaggaagctgacagacatggaggcccagctgctgaaccagaccagcaggatggatgcccagatgcctgagaccttcctgagcaccaacaagctggagaaccagctgctgctgcagaggcagaagctgcagcagctgcagggccagaacagcgccctggagaagaggctgcaggccctggagaccaagcagcaggaggagctggccagcatcctgagcaagaaggccaagctgctgaacaccctgagccggcagagcgctgccctgaccaacatcgagcggggcctgcggggcgtgcgccacaacagcagcctgctgcaggaccagcagcacagcctgcggcagctgctggtgctgctgcggcacctggtgcaggagcgggccaatgccagcgccccagccttcatcatggccggggagcaggtgttccaggactgtgccgagatccagaggtctggggccagcgccagcggcgtgtacaccatccaggtgtccaatgccaccaagcccaggaaggtgttctgtgacctgcagagcagcggcggccgctggaccctcatccagaggcgggagaatggaacagtgaacttccagaggaactggaaggactacaagcagggctttggagaccctgctggggagcactggctgggcaatgaggtggtgcaccagctgacccggcgggccgcctacagcctgcgggtggagctgcaggactgggagggccacgaggcctatgcccagtatgagcacttccacctgggcagcgagaaccagctgtacagagtggtggtgtag

SEQ ID NO: 276874 - DNA, 1233 bp, Artificial Sequence
  derived and/or modified sequence
atgctgagccagctggccatgctgcagggcagcctgctgctggtggtggcaactatgtccgtcgcccagcaaaccagacaggaagctgatcgcggatgcgagacattagtggtgcagcatgggcactgcagctatacattcctgcttcccaagtctgaaccatgcccccctgggcctgaggtgagtagggatagcaacacattgcagagagaaagtctcgcgaatcccctccatctcggaaagctacctactcagcaggtgaagcagcttgaacaagctctccagaacaatacccagtggctgaagaagctggagagagccatcaagacgatactgcgcagcaagctcgaacaggtccaacagcaaatggctcaaaaccagaccgccccaatgctggaactgggtaccagtctgctaaatcagactactgcacaaatcaggaagctaactgacatggaggcacagctcctgaatcagaccagccggatggatgctcaaatgcctgaaaccttcctgtcgacaaataagctagagaatcagttactgctgcagcgccagaagctgcagcagttgcagggacaaaattccgccctcgagaaaaggctgcaagcgttagaaaccaaacaacaagaggaactcgcaagcattctctccaagaaagctaaactcctgaacacgctcagccggcaatctgccgccctcacaaacattgagcggggactgcgcggcgtacggcataactccagcctcttgcaagatcagcagcacagcctgaggcagttactcgttctgttgcgccatttggttcaggaaagggccaacgcctcagcacccgcattcattatggcaggggaacaagtgtttcaagactgtgctgagatccaacgctctggcgcttcagcctcaggcgtgtacactatacaagtctccaatgcaaccaaacctcgcaaggtgttttgtgatctccagtcctcaggagggagatggacactcattcagcggcgggaaaacggaaccgtgaatttccaaagaaattggaaggactacaagcagggcttcggtgatccggccggcgagcattggttaggcaacgaggtagtgcatcaactgacacgtcgggctgcgtatagccttcgtgtggaactgcaggattgggaaggtcacgaggcctacgctcagtacgaacactttcacctgggcagtgagaaccagttatacagggtggtcgtgtag

SEQ ID NO: 276875 - DNA, 1702 bp, Artificial Sequence
  derived and/or modified sequence
agacagaggtttgtagctgcagctgcaggcaagcctggccactgttggctgcagcaggacatcccaggcacagcccctagggctctgagcagacatccctcgccattgacacatcttcagatgctctcccagctagccatgctgcagggcagcctcctccttgtggttgccaccatgtctgtggctcaacagacaaggcaggaggcggataggggctgcgagacacttgtagtccagcacggccactgtagctacaccttcttgctgcccaagtctgagccctgccctccggggcctgaggtctccagggactccaacaccctccagagagaatcactggccaacccactgcacctggggaagttgcccacccagcaggtgaaacagctggagcaggcactgcagaacaacacgcagtggctgaagaagctagagagggccatcaagacgatcttgaggtcgaagctggagcaggtccagcagcaaatggcccagaatcagacggcccccatgctagagctgggcaccagcctcctgaaccagaccactgcccagatccgcaagctgaccgacatggaggctcagctcctgaaccagacatcaagaatggatgcccagatgccagagacctttctgtccaccaacaagctggagaaccagctgctgctacagaggcagaagctccagcagcttcagggccaaaacagcgcgctcgagaagcggttgcaggccctggagaccaagcagcaggaggagctggccagcatcctcagcaagaaggcgaagctgctgaacacgctgagccgccagagcgccgccctcaccaacatcgagcgcggcctgcgcggtgtcaggcacaactccagcctcctgcaggaccagcagcacagcctgcgccagctgctggtgttgttgcggcacctggtgcaagaaagggctaacgcctcggccccggccttcataatggcaggtgagcaggtgttccaggactgtgcagagatccagcgctctggggccagtgccagtggtgtctacaccatccaggtgtccaatgcaacgaagcccaggaaggtgttctgtgacctgcagagcagtggaggcaggtggaccctcatccagcgccgtgagaatggcaccgtgaattttcagcggaactggaaggattacaaacagggcttcggagacccagctggggagcactggctgggcaatgaagtggtgcaccagctcaccagaagggcagcctactctctgcgtgtggagctgcaagactgggaaggccacgaggcctatgcccagtacgaacatttccacctgggcagtgagaaccagctatacagggtggtggtttgacgcctgtggcctgtcaaacctcaacggcgtctactaccacgctcccgacaacaagtacaagatggacggcatccgctggcactacttcaagggccccagctactcactgcgtgcctctcgcatgatgatacggcctttggacatctaacgagcagctgtgccagaggctggaccacacaggagaagctcggacttggcactcctggacaacctggacccagatgcaagacactgtgccaccgccttccctgacaccctgggcttcctgagccagccctccttgacccagaagtccagaagggtcatctgccccccaactcccctccgtctgtgacatggagggtgttcg

SEQ ID NO: 276876 - DNA, 1233 bp, Artificial Sequence
  derived and/or modified sequence
atgttgagccagctagcaatgctacagggttcacttcttctggtcgtagccacgatgagcgtggcgcagcagacacgtcaggaagctgaccggggttgtgagactcttgtggtccagcacgggcattgttcttatacctttctgctgcctaagtcggaaccctgtccgccaggcccagaggtgtcccgagatagtaatactctgcagcgggagagcctggcaaacccactgcacctagggaagctccctacacagcaggtcaagcagctggaacaggcgctgcagaacaatacccagtggttgaagaagctcgaacgcgcaatcaaaacaatcttacgctcaaagctggagcaggtgcagcagcagatggcccaaaaccagacagcaccaatgctggagctggggactagtctcctaaatcaaacaactgctcagatcaggaaacttacagacatggaagctcaattgctcaaccagacatctaggatggacgcacagatgcccgagacattcctctcgaccaacaagctcgagaaccaactgctcctgcaaagacagaagttgcagcagctgcagggtcagaacagtgcactggaaaagcggctacaggccctcgaaaccaaacagcaggaggaactcgcttcaattctgagcaagaaagccaaactgttgaataccctctctaggcagagcgcagccctgacgaacattgaaaggggactccgaggggttagacataactcatcgttgctccaggaccagcagcattcactgcgccagctgctggtattgctaagacacctggttcaggaaagggcaaatgccagcgcccctgccttcattatggcaggagagcaggttttccaggactgtgcagaaattcaaaggagcggtgctagtgcctcaggggtctacacaattcaggtttcaaacgcaactaagccaagaaaggtgttctgcgatctgcagagctctggcggtcgctggacactgattcagagaagagagaacgggaccgttaattttcagagaaattggaaggactataaacaggggtttggagaccccgcaggcgaacactggctggggaatgaggtggtccatcagttgacacgtagagcggcatattctttgcgggtggagctgcaagactgggagggccacgaggcatacgcccaatatgaacatttccacctcggttcagaaaatcagttataccgagtagtcgtttag

SEQ ID NO: 276877 - DNA, 1233 bp, Artificial Sequence
  derived and/or modified sequence
atgctgagccagctggccatgctgcagggcagcctgctgctggtggtggccaccatgagcgtggcccagcagaccagacaggaggccgacagaggctgcgagaccctggtggtgcagcacggccactgcagctacaccttcctgctgcccaagagcgagccctgcccccccggccccgaggtgagcagagacagcaacaccctgcagagagagagcctggccaaccccctgcacctgggcaagctgcccacccagcaggtgaagcagctggagcaggccctgcagaacaacacccagtggctgaagaagctggagagagccatcaagaccatcctgagaagcaagctggagcaggtgcagcagcagatggcccagaaccagaccgcccccatgctggagctgggcaccagcctgctgaaccagaccaccgcccagatcagaaagctgaccgacatggaggcccagctgctgaaccagaccagcagaatggacgcccagatgcccgagaccttcctgagcaccaacaagctggagaaccagctgctgctgcagagacagaagctgcagcagctgcagggccagaacagcgccctggagaagagactgcaggccctggagaccaagcagcaggaggagctggccagcatcctgagcaagaaggccaagctgctgaacaccctgagcagacagagcgccgccctgaccaacatcgagagaggcctgagaggcgtgagacacaacagcagcctgctgcaggaccagcagcacagcctgagacagctgctggtgctgctgagacacctggtgcaggagagagccaacgccagcgcccccgccttcatcatggccggcgagcaggtgttccaggactgcgccgagatccagagaagcggcgccagcgccagcggcgtgtacaccatccaggtgagcaacgccaccaagcccagaaaggtgttctgcgacctgcagagcagcggcggcagatggaccctgatccagagaagagagaacggcaccgtgaacttccagagaaactggaaggactacaagcagggcttcggcgaccccgccggcgagcactggctgggcaacgaggtggtgcaccagctgaccagaagagccgcctacagcctgagagtggagctgcaggactgggagggccacgaggcctacgcccagtacgagcacttccacctgggcagcgagaaccagctgtacagagtggtggtgtag

SEQ ID NO: 276878 - DNA, 1389 bp, Artificial Sequence
  derived and/or modified sequence
atgacagcttggacgatgggcgctagaggccttgacaaacggggatctttcttcaagctgatcgataccatcgcctcagaaattggggagttgaagcaagagatggtgcgtacagatgtgaacctcgaaaacggactagaacccgccgagacacactctatggtccgccacaaagacggtggctattcagaggaggaggatgtgaaaacgtgtgcgcgggattctggatacgactcgctctcaaaccggctatctatactagaccggctcctccacacacacccaatttggttacagcttagtcttagcgaggaagaagccgcggaagtgttacaggcccaaccaccaggcatattcctcgtacataaaagcactaagatgcagaagaaagtgctgagcctccgcctcccctgtgaattcggggctccccttaaagagttcgccatcaaggagtccacctacaacgtggttctcgaaaaagccatgcacaagtgtatactgaaaccactgaaggggcacgtcgaggccatgcttaaggattttcatatggcagacggatcatggaagcagctgaaggagaatcttcagttggtgcggcaacggaatcctcaggaattgggggttttcgcaccgacgcctgatttcgtcgacgtggaaaaaatcaaggtgaaatttatgaccatgcagaaaatgtacagtcccgaaaaaaaggtgatgctccttctacgagtgtgtaagctgatctacaccgtcatggagaataattccgggaggatgtatggggccgacgattttcttccagtcttgacttatgtaatagcacagtgcgacatgttggaactggatacagaaatcgagtatatgatggagctgttagacccatcccttttacacggcgagggcgggtactatcttacctccgcatacggagctcttagcttaattaagaacttccaagaggagcaagcggcgcgtctgctttcatccgagacaagggacacactgagacagtggcataagagaaggacaacaaacagaacaatcccctccgtggacgacttccagaactacctgcgggtggcgttccaggaagtgaactctggatgcaccggaaaaactctgttggtcaggccctatattactacagaagacgtgtgccagatttgcgccgagaagtttaaggtgggggatccggaagaatactctttgttcctatttgtggatgaaacctggcaacaacttgccgaagacacatacccccagaagataaaagccgaactgcatagtcgaccacagccacacatctttcactttgtgtataagcgcattaagaacgacccgtacgggattatttttcagaacggagaggaggacctgaccacttcgtag

SEQ ID NO: 276879 - DNA, 1389 bp, Artificial Sequence
  derived and/or modified sequence
atgacagcctggaccatgggcgcccggggcctggacaagaggggcagcttcttcaagctgattgacaccatcgccagcgagatcggggagctgaagcaggagatggtgaggacagatgtgaacctggagaatggcctggagcctgctgagacccacagcatggtgcgccacaaggatggcggctacagcgaggaggaggatgtgaagacctgtgcccgggacagcggctatgacagcctgagcaaccggctgagcatcctggaccggctgctgcacacccaccccatctggctgcagctgagcctgtctgaggaggaggccgctgaggtgctgcaggcccagcccccaggcatcttcctggtgcacaagagcaccaagatgcagaagaaggtgctgagcctgcggctgccctgtgaatttggagcccccctgaaggagtttgccatcaaggagagcacctacaacgtggtgctggagaaggccatgcacaagtgcatcctgaagcccctgaagggccacgtggaggccatgctgaaggacttccacatggctgatggctcctggaagcagctgaaggagaacctgcagctggtgcggcagaggaacccccaggagctgggcgtgtttgcccccaccccagactttgtggatgtggagaagatcaaggtgaagttcatgaccatgcagaagatgtacagccctgagaagaaggtgatgctgctgctgcgggtgtgcaagctgatctacacagtgatggagaacaacagcggccgcatgtacggggctgatgacttcctgcctgtgctgacctacgtgattgcccagtgtgacatgctggagctggacacagaaattgagtacatgatggagctgctggaccccagcctgctgcacggggagggcggctactacctgaccagcgcctatggagccctgagcctcatcaagaacttccaggaggagcaggccgcccggctgctgagcagcgagacccgggacaccctgcggcagtggcacaagaggaggaccaccaacagaaccatccccagcgtggatgacttccagaactacctgcgggtggccttccaggaggtgaacagcggctgcaccgggaagaccctgctggtgcggccctacatcaccacagaagatgtgtgccagatctgtgccgagaagttcaaggtgggggaccctgaggagtacagcctcttcctgtttgtggatgagacctggcagcagctggccgaggacacctacccccagaagatcaaggccgagctgcacagccggccccagccccacatcttccactttgtgtacaagaggatcaagaatgacccctacggcatcatcttccagaatggagaggaggacctgaccaccagctag

SEQ ID NO: 276880 - DNA, 1389 bp, Artificial Sequence
  derived and/or modified sequence
atgaccgcctggaccatgggcgcccggggcctggacaagcggggctctttcttcaaactcattgataccattgcctctgaaatcggagagctgaagcaggaaatggtcagaaccgatgtgaacctcgaaaatggtctagaacctgcggagactcacagcatggtgcgccataaagatggcggttattccgaagaagaagacgtgaagacttgcgctagagatagcggctacgacagcttatccaaccggctgagcatcttggacagactgttgcacacccacccaatctggctccagctgtccctttccgaggaggaagccgccgaggtcctccaggctcagcctccgggcattttcctagtgcacaagagcaccaagatgcagaaaaaggtgctgagccttcggctgccttgcgagttcggcgccccactgaaggaattcgcaataaaggagagcacctataatgtcgtcctggaaaaggctatgcacaaatgcatcttaaagccactcaaagggcatgtcgaggctatgcttaaggactttcacatggccgatggttcctggaagcagctgaaggagaacctgcagcttgttcgtcagagaaatccgcaagaattaggagtttttgccccaactcctgattttgttgatgtcgaaaagatcaaggtcaagtttatgactatgcagaaaatgtacagtccggaaaagaaggtgatgctgctgctgcgcgtgtgtaagctcatctatacagtcatggaaaataattccggacggatgtacggcgctgatgattttctgcccgtgctaacctatgtgatagcacaatgcgacatgcttgaactggacaccgaaattgaatacatgatggagctgctggacccatcattgctacatggtgagggcgggtattacctgacatctgcttatggcgcgctgagcctgatcaaaaatttccaggaggagcaggccgcacggttgctctcctctgaaacgcgggacaccctgcggcagtggcacaagcggagaacgactaaccggacaattccctcagtcgatgatttccagaattatcttagagtggccttccaggaggtcaacagtggttgcactgggaagaccctcctggttcgcccgtatattacaacagaagatgtctgccaaatctgtgcagaaaagttcaaggtgggcgaccctgaagaatactctctctttctgttcgtcgacgaaacttggcaacaactagccgaagacacctaccctcagaagatcaaagcagagctgcattcaagaccccaacctcacatcttccactttgtgtacaaacggattaagaatgacccatacggcattatctttcagaacggagaagaggacctgacaacatcatag

SEQ ID NO: 276881 - DNA, 1389 bp, Artificial Sequence
  derived and/or modified sequence
atgacagcctggactatgggcgcacgcggattggataaacggggatctttcttcaaattgatcgacaccattgcatccgaaattggagagctgaagcaggaaatggttcggaccgacgtgaacttagagaacggtctggagccggctgagacccactcgatggtcaggcacaaggacggtgggtattccgaggaagaggacgtaaaaacatgcgcgagggatagcggttacgatagcctctcaaataggttgagcatcttagatagactgctgcatacacacccaatctggctgcagttatcactgagcgaggaagaggccgctgaggtcctccaggcacaacccccaggaatttttctcgtgcataaatccaccaagatgcagaaaaaggttctcagtctgcggttgccatgcgaattcggtgcaccgctgaaggagttcgccatcaaggaatctacatacaacgtagtgctggaaaaggctatgcataaatgcatcctcaagccacttaagggacatgtggaggctatgctgaaagattttcacatggcagacggttcatggaagcagctgaaagagaatttgcagttggtaaggcagcgcaatccacaggagctcggcgtgtttgcaccaactcccgacttcgtggacgtggagaagatcaaagttaagttcatgacaatgcaaaagatgtatagcccagagaaaaaggtcatgctactgcttcgggtatgcaagctgatctatactgttatggaaaataattccggcaggatgtacggcgctgatgactttctgcctgtccttacttatgtgatcgcccagtgtgatatgctagaattagataccgaaatcgaatatatgatggagctgctggatccctccttactgcacggcgaagggggatactatctgaccagtgcctacggcgctctcagcctcattaagaatttccaggaagagcaggccgcaagactgctttcttctgagacaagagacacacttcggcagtggcataagcgtaggactaccaatcgaacgatcccttccgtagatgatttccaaaactatctaagagtggccttccaggaagtgaactccggatgtacaggcaagaccttgttggtccgtccctatattaccaccgaggacgtgtgtcaaatctgtgccgaaaaatttaaggttggcgaccccgaagaatacagtttatttctgttcgttgacgagacctggcagcaattagcggaggatacctacccacagaaaattaaggctgaactgcacagcaggccccagccgcacattttccattttgtgtacaagagaataaagaacgatccctacggcatcatctttcaaaacggggaggaggacctcacaacaagctag

SEQ ID NO: 276882 - DNA, 1837 bp, Artificial Sequence
  derived and/or modified sequence
gagtccccggcgtgcagtggagcctcgctgggggaaatgacagcttggaccatgggcgcccgcggtctggacaagcgaggaagtttctttaagctcattgacacaattgcctcggagatcggagaactgaaacaggagatggtgcggacagatgtcaacctggaaaatggcctggaacccgctgaaacccacagcatggtaagacacaaggatggtggctattccgaggaagaggacgtgaagacctgtgcccgggactcaggctatgacagcctctccaacaggctcagcatcttggaccggctcctccacacccaccccatatggctgcagctgagtctgagtgaggaggaggcagcagaggtcctgcaggcccagcctccggggatcttcctggttcataaatctaccaagatgcagaagaaagtcctctccctccgcctgccctgtgaatttggggccccactcaaggaatttgccataaaggaaagcacatacaatgtggtgctggaaaaagccatgcacaagtgcatcttgaagcccctcaaggggcacgtggaggccatgctgaaggactttcacatggccgatggctcatggaagcaactcaaggagaacctgcagcttgtgcggcagaggaatccgcaggagctgggggtcttcgccccgacccctgattttgtggatgtggagaaaatcaaagtcaagttcatgaccatgcagaagatgtattcgccggaaaagaaggtcatgctgctgctgcgggtctgcaagctcatttacacggtcatggagaacaactcagggaggatgtatggcgctgatgacttcttgccagtcctgacctatgtcatagcccagtgtgacatgcttgaattggacactgaaatcgagtacatgatggagctcctagacccatcgctgttacatggagaaggaggctattacttgacaagcgcatatggagcactttctctgataaagaatttccaagaagaacaagcagcgcgactgctcagctcagaaaccagagacaccctgaggcagtggcacaaacggagaaccaccaaccggaccatcccctctgtggacgacttccagaattacctccgagttgcatttcaggaggtcaacagtggttgcacaggaaagaccctccttgtgagaccttacatcaccactgaggatgtgtgtcagatctgcgctgagaagttcaaggtgggggaccctgaggagtacagcctctttctcttcgttgacgagacatggcagcagctggcagaggacacttaccctcaaaaaatcaaggcggagctgcacagccgaccacagccccacatcttccactttgtctacaaacgcatcaagaacgatccttatggcatcattttccagaacggggaagaagacctcaccacctcctagaagacaggcgggacttcccagtggtgcatccaaaggggagctggaagccttgccttcccgcttctacatgcttgagcttgaaaagcagtcacctcctcggggacccctcagtgtagtgactaagccatccacaggccaactcggccaagggcaactttagccacgcaaggtagctgaggtttgtgaaacagtaggattctcttttggcaatggagaattgcatctgatggttcaagtgtcctgagattgtttgctacctacccccagtcaggttctaggttggcttacaggtatgtatatgtgcagaagaaacacttaagatacaagttcttttgaattcaacagcagatgcttgcgatgcagtgcgtcaggtgattctcactcctgtggatggcttcatccctgccttcct

SEQ ID NO: 276883 - DNA, 1389 bp, Artificial Sequence
  derived and/or modified sequence
atgaccgcctggaccatgggcgccagaggcctggacaagagaggcagcttcttcaagctgatcgacaccatcgccagcgagatcggcgagctgaagcaggagatggtgagaaccgacgtgaacctggagaacggcctggagcccgccgagacccacagcatggtgagacacaaggacggcggctacagcgaggaggaggacgtgaagacctgcgccagagacagcggctacgacagcctgagcaacagactgagcatcctggacagactgctgcacacccaccccatctggctgcagctgagcctgagcgaggaggaggccgccgaggtgctgcaggcccagccccccggcatcttcctggtgcacaagagcaccaagatgcagaagaaggtgctgagcctgagactgccctgcgagttcggcgcccccctgaaggagttcgccatcaaggagagcacctacaacgtggtgctggagaaggccatgcacaagtgcatcctgaagcccctgaagggccacgtggaggccatgctgaaggacttccacatggccgacggcagctggaagcagctgaaggagaacctgcagctggtgagacagagaaacccccaggagctgggcgtgttcgcccccacccccgacttcgtggacgtggagaagatcaaggtgaagttcatgaccatgcagaagatgtacagccccgagaagaaggtgatgctgctgctgagagtgtgcaagctgatctacaccgtgatggagaacaacagcggcagaatgtacggcgccgacgacttcctgcccgtgctgacctacgtgatcgcccagtgcgacatgctggagctggacaccgagatcgagtacatgatggagctgctggaccccagcctgctgcacggcgagggcggctactacctgaccagcgcctacggcgccctgagcctgatcaagaacttccaggaggagcaggccgccagactgctgagcagcgagaccagagacaccctgagacagtggcacaagagaagaaccaccaacagaaccatccccagcgtggacgacttccagaactacctgagagtggccttccaggaggtgaacagcggctgcaccggcaagaccctgctggtgagaccctacatcaccaccgaggacgtgtgccagatctgcgccgagaagttcaaggtgggcgaccccgaggagtacagcctgttcctgttcgtggacgagacctggcagcagctggccgaggacacctacccccagaagatcaaggccgagctgcacagcagaccccagccccacatcttccacttcgtgtacaagagaatcaagaacgacccctacggcatcatcttccagaacggcgaggaggacctgaccaccagctag

SEQ ID NO: 276884 - protein, 186 aa, Artificial Sequence
  derived and/or modified sequence
  misc_feature (1)..(1): Xaa can be any naturally occurring amino acid
XDLSKSRENLSAVMLYNPGLFPIKGPICLRLEFERQQREELEKLESKRKLIEEMEEKQKSDKAELERMQQEVETQRKETEIVQLQIRKQEESLKRRSFHIENKLKDLLAEKEKFEEERLREQQEIELQKKRQEEETFLRVQEELQRLKELNNNEKAEKFQIFQELDQLQKEKDEQYAKLELEKKRL

SEQ ID NO: 276885 - DNA, 105 bp, Artificial Sequence
  derived and/or modified sequence
aacggaatcaaacggaattatcgaatggaatcgaagagaatcatcgaatggccacgaatggaatcatctaatggaatggaatggaataatccatggacccgaatg

SEQ ID NO: 276886 - DNA, 97 bp, Artificial Sequence
  derived and/or modified sequence
aaacggaatcaaacggaattatcgaatggaatcgaagagaatcatcgaatggactcgaatggaatcatctaatggaatggaatggaagaatccatgg

SEQ ID NO: 276887 - DNA, 88 bp, Artificial Sequence
  derived and/or modified sequence
atcaaacggaatcaaacggaattatcgaatggaatcgaagagaatcatcgaacggactcgaatggaatcatctaatggaatgggatgg

SEQ ID NO: 276888 - DNA, 95 bp, Artificial Sequence
  derived and/or modified sequence
gaatcaagcggaattatcgaatggaatcgaagagaatcatcgaaaggactcgaatggaatcatctaatggaatggaatggaataatacacggacc

SEQ ID NO: 276889 - DNA, 100 bp, Artificial Sequence
  derived and/or modified sequence
aaacggaatcaaacggaattatcgaatggaatcgaagagaatcatcgaacggactcgaatggaatcatctaatggaatggaatggaagaatccatggact

SEQ ID NO: 276890 - DNA, 103 bp, Artificial Sequence
  derived and/or modified sequence
aacaccaaacggaaaaaaacggaattatcgaatggaatcgaagagaatcttcgaacggacccgaatgggatcatctaatggaatggaatggaataatccatgg

SEQ ID NO: 276891 - DNA, 103 bp, Artificial Sequence
  derived and/or modified sequence
aatggaatcaacatcaaacggaatcaagcgaaattatcgaatggaatcgaagagaatcatcgaatggactcgaatggaatcatctaatggaatggaatgggat

SEQ ID NO: 276892 - DNA, 100 bp, Artificial Sequence
  derived and/or modified sequence
atcaaacggaatcaaacggaattatcgaatggaatcgaagagaatcatcgaatggactcgaatggaatcatctaatggaatggaatggaagaatccatgg

SEQ ID NO: 276893 - DNA, 84 bp, Artificial Sequence
  derived and/or modified sequence
aacggaatcacgcggaattatcgaatggaatcgaagagaatcatcgaatggactcgaatggaatcatctaatggaatggaatgg

SEQ ID NO: 276894 - DNA, 95 bp, Artificial Sequence
  derived and/or modified sequence
caacatcaaacggaatcaaacggaattatcgaatggaatcgaagagaatcatcgaatggactcgaatggaatcatctaatggaatggaatggaag

SEQ ID NO: 276895 - DNA, 561 bp, Artificial Sequence
  derived and/or modified sequence
tgagacctgagcaagagcagagagaacctgagcgccgtgatgctgtacaaccccggcctgttccccatcaagggccccatctgcctgagactggagttcgagagacagcagagagaggagctggagaagctggagagcaagagaaagctgatcgaggagatggaggagaagcagaagagcgacaaggccgagctggagagaatgcagcaggaggtggagacccagagaaaggagaccgagatcgtgcagctgcagatcagaaagcaggaggagagcctgaagagaagaagcttccacatcgagaacaagctgaaggacctgctggccgagaaggagaagttcgaggaggagagactgagagagcagcaggagatcgagctgcagaagaagagacaggaggaggagaccttcctgagagtgcaggaggagctgcagagactgaaggagctgaacaacaacgagaaggccgagaagttccagatcttccaggagctggaccagctgcagaaggagaaggacgagcagtacgccaagctggagctggagaagaagagactgtag

SEQ ID NO: 276896 - DNA, 561 bp, Artificial Sequence
  derived and/or modified sequence
taagacctgtcgaagtcaagagagaacctgagtgccgtgatgttgtataacccaggactgtttcccatcaaaggcccaatatgcctccggctggaattcgaacgccagcagagggaggagctcgagaagctcgagtcaaagagaaagctgattgaagagatggaggaaaaacagaaatcggacaaggcagagctggagcggatgcagcaggaggtggagacccagcggaaggagactgagattgtccaattgcagatcaggaagcaggaagagtctttgaagagaaggtcctttcacatcgagaataaactcaaggatcttcttgccgaaaaggaaaaatttgaggaagagagactgcgggaacagcaggagattgagctgcagaaaaagaggcaggaagaagagaccttcctacgtgttcaggaggagctgcagagacttaaagagctcaacaacaatgaaaaagcagagaaatttcagattttccaggagctggaccagctgcagaaggagaaagacgaacagtacgcaaaacttgaactggagaagaaaagattgtag

SEQ ID NO: 276897 - DNA, 561 bp, Artificial Sequence
  derived and/or modified sequence
tgagacctgagcaagagccgggagaacctgtctgctgtgatgctgtacaaccctggcctcttccccatcaagggccccatctgcctgcggctggagtttgagcggcagcagcgggaggagctggagaagctggagagcaagaggaagctgattgaggagatggaggagaagcagaagagtgacaaggccgagctggagaggatgcagcaggaggtggagacccagaggaaggagacagaaattgtgcagctgcagatcaggaagcaggaggagagcctgaagagaagaagcttccacatcgagaacaagctgaaggacctgctggccgagaaggagaagtttgaggaggagcggctgcgggagcagcaggagattgagctgcagaagaagaggcaggaggaggagaccttcctgcgggtgcaggaggagctgcagaggctgaaggagctgaacaacaatgagaaggccgagaagttccagatcttccaggagctggaccagctgcagaaggagaaggatgagcagtatgccaagctggagctggagaagaagaggctgtag

SEQ ID NO: 276898 - DNA, 556 bp, Artificial Sequence
  derived and/or modified sequence
ccgacctctcgaagtcccgtgagaacctgtctgcagtcatgttgtataaccccggtcttttccctataaaaggacccatctgtctaagacttgaatttgagaggcaacagcgtgaagaacttgaaaaattagaaagtaaaaggaaactcatagaagaaatggaggaaaagcagaaatcagacaaggctgaactggagcggatgcagcaggaggtggagacccagcgcaaggagacagaaatcgtgcagctccagattcgcaagcaggaggagagcctcaaacgccgcagcttccacatcgagaacaagctaaaggatttacttgcggagaaggaaaaatttgaagaggagaggctgagggaacagcaggaaatcgagctgcagaagaagagacaagaagaagagacctttctccgcgtccaagaagaactccaacgactcaaagaactcaacaacaacgagaaggctgagaagtttcagatatttcaagaactggaccagctccaaaaggaaaaagatgaacagtatgccaagcttgaactggaaaaaaagagact

SEQ ID NO: 276899 - DNA, 561 bp, Artificial Sequence
  derived and/or modified sequence
tgagacctgagcaagagccgggagaacctgagcgccgtgatgctgtataaccccgggctcttccccatcaaagggcctatttgcctccgcctcgaattcgaaaggcagcaacgcgaagaacttgagaagttggaatccaagaggaagctgattgaggaaatggaggagaagcagaagagtgacaaggccgaactggagcgcatgcagcaggaggtggaaacccagcgaaaagagaccgaaattgtgcagctgcaaatcaggaaacaggaggagtccctgaagagacggtcgtttcatattgagaacaagctgaaggacctgctggccgagaaagaaaagttcgaagaggagaggctgagggaacagcaggaaatagagctgcagaagaagagacaggaggaggaaactttccttcgggtgcaggaagagctgcaacgcctgaaagagctgaataacaatgagaaggccgaaaagttccagatttttcaggaattagaccaacttcagaaagagaaggatgagcagtatgctaagttggagctggagaagaagaggctgtag

SEQ ID NO: 276900 - DNA, 561 bp, Artificial Sequence
  derived and/or modified sequence
tgagacctgtccaagtcccgagaaaatctttcagccgtcatgctgtataatccgggactatttcccattaaaggcccaatttgcctgcgactagagttcgaacgccagcaaagggaagaactggaaaaacttgagtccaaacgcaaattaatcgaggaaatggaggaaaaacaaaagagcgataaagcagaactcgaacgtatgcagcaggaggtggagacccaaagaaaggagacggaaatcgtgcagcttcagattcgcaaacaggaggaatccctgaaaaggagatccttccacatcgaaaacaagctgaaggatttgctcgccgagaaggagaaattcgaggaggagagactgagggagcagcaggagatagaactccaaaagaagagacaggaagaggagacctttcttagagttcaggaagaactccagaggcttaaggagctcaacaataatgagaaagcagagaagtttcagatattccaggaattggatcagctgcagaaagagaaagacgaacaatacgccaagctcgaactggaaaagaagagactgtag

SEQ ID NO: 276901 - DNA, 113 bp, Artificial Sequence
  derived and/or modified sequence
gaatggaatcaacatcaaacggaatcaaacggaattatcgaatggaatcgaagagaatcatcgaatggccacgaatggaatcatctaatggaatggaatggaataatccatgg

SEQ ID NO: 276902 - DNA, 106 bp, Artificial Sequence
  derived and/or modified sequence
atcaacatcaaacggaatcaaacggaattatcgaatggaatcgaagagaatcatcaaatggactcgaatggaatcatctaatggaatggaatggaagaatccatgg

SEQ ID NO: 276903 - protein, 1287 aa, Artificial Sequence
  derived and/or modified sequence
MASVKVAVRVRPMNRREKDLEAKFIIQMEKSKTTITNLKIPEGGTGDSGRERTKTFTYDFSFYSADTKSPDYVSQEMVFKTLGTDVVKSAFEGYNACVFAYGQTGSGKSYTMMGNSGDSGLIPRICEGLFSRINETTRWDEASFRTEVSYLEIYNERVRDLLRRKSSKTFNLRVREHPKEGPYVEDLSKHLVQNYGDVEELMDAGNINRTTAATGMNDVSSRSHAIFTIKFTQAKFDSEMPCETVSKIHLVDLAGSERADATGATGVRLKEGGNINKSLVTLGNVISALADLSQDAANTLAKKKQVFVPYRDSVLTWLLKDSLGGNSKTIMIATISPADVNYGETLSTLRYANRAKNIINKPTINEDANVKLIRELRAEIARLKTLLAQGNQIALLDSPTALSMEEKLQQNEARVQELTKEWTNKWNETQNILKEQTLALRKEGIGVVLDSELPHLIGIDDDLLSTGIILYHLKEGQTYVGRDDASTEQDIVLHGLDLESEHCIFENIGGTVTLIPLSGSQCSVNGVQIVEATHLNQGAVILLGRTNMFRFNHPKEAAKLREKRKSGLLSSFSLSMTDLSKSRENLSAVMLYNPGLEFERQQREELEKLESKRKLIEEMEEKQKSDKAELERMQQEVETQRKETEIVQLQIRKQEESLKRRSFHIENKLKDLLAEKEKFEEERLREQQEIELQKKRQEEETFLRVQEELQRLKELNNNEKAEKFQIFQELDQLQKEKDEQYAKLELEKKRLEEQEKEQVMLVAHLEEQLREKQEMIQLLRRGEVQWVEEEKRDLEGIRESLLRVKEARAGGDEDGEELEKAQLRFFEFKRRQLVKLVNLEKDLVQQKDILKKEVQEEQEILECLKCEHDKESRLLEKHDESVTDVTEVPQDFEKIKPVEYRLQYKERQLQYLLQNHLPTLLEEKQRAFEILDRGPLSLDNTLYQVEKEMEEKEEQLAQYQANANQLQKLQATFEFTANIARQEEKVRKKEKEILESREKQQREALERALARLERRHSALQRHSTLGMEIEEQRQKLASLNSGSREQSGLQASLEAEQEALEKDQERLEYEIQQLKQKIYEVDGVQKDHHGTLEGKVASSSLPVSAEKSHLVPLMDARINAYIEEEVQRRLQDLHRVISEGCSTSADTMKDNEKLHNGTIQRKLKYERMVSRSLGANPDDLKDPIKISIPRYVLCGQGKDAHFEFEVKLAALEFPPKKLFGNKDERVIAERRSHLEKYLRDFFSVMLQSATSPLHINKVGLTLSKHTICEFSPFFKKGVFDYSSHGTG

SEQ ID NO: 276904 - DNA, 3864 bp, Artificial Sequence
  derived and/or modified sequence
atggccagcgtgaaggtggccgtgagagtgagacccatgaacagaagagagaaggacctggaggccaagttcatcatccagatggagaagagcaagaccaccatcaccaacctgaagatccccgagggcggcaccggcgacagcggcagagagagaaccaagaccttcacctacgacttcagcttctacagcgccgacaccaagagccccgactacgtgagccaggagatggtgttcaagaccctgggcaccgacgtggtgaagagcgccttcgagggctacaacgcctgcgtgttcgcctacggccagaccggcagcggcaagagctacaccatgatgggcaacagcggcgacagcggcctgatccccagaatctgcgagggcctgttcagcagaatcaacgagaccaccagatgggacgaggccagcttcagaaccgaggtgagctacctggagatctacaacgagagagtgagagacctgctgagaagaaagagcagcaagaccttcaacctgagagtgagagagcaccccaaggagggcccctacgtggaggacctgagcaagcacctggtgcagaactacggcgacgtggaggagctgatggacgccggcaacatcaacagaaccaccgccgccaccggcatgaacgacgtgagcagcagaagccacgccatcttcaccatcaagttcacccaggccaagttcgacagcgagatgccctgcgagaccgtgagcaagatccacctggtggacctggccggcagcgagagagccgacgccaccggcgccaccggcgtgagactgaaggagggcggcaacatcaacaagagcctggtgaccctgggcaacgtgatcagcgccctggccgacctgagccaggacgccgccaacaccctggccaagaagaagcaggtgttcgtgccctacagagacagcgtgctgacctggctgctgaaggacagcctgggcggcaacagcaagaccatcatgatcgccaccatcagccccgccgacgtgaactacggcgagaccctgagcaccctgagatacgccaacagagccaagaacatcatcaacaagcccaccatcaacgaggacgccaacgtgaagctgatcagagagctgagagccgagatcgccagactgaagaccctgctggcccagggcaaccagatcgccctgctggacagccccaccgccctgagcatggaggagaagctgcagcagaacgaggccagagtgcaggagctgaccaaggagtggaccaacaagtggaacgagacccagaacatcctgaaggagcagaccctggccctgagaaaggagggcatcggcgtggtgctggacagcgagctgccccacctgatcggcatcgacgacgacctgctgagcaccggcatcatcctgtaccacctgaaggagggccagacctacgtgggcagagacgacgccagcaccgagcaggacatcgtgctgcacggcctggacctggagagcgagcactgcatcttcgagaacatcggcggcaccgtgaccctgatccccctgagcggcagccagtgcagcgtgaacggcgtgcagatcgtggaggccacccacctgaaccagggcgccgtgatcctgctgggcagaaccaacatgttcagattcaaccaccccaaggaggccgccaagctgagagagaagagaaagagcggcctgctgagcagcttcagcctgagcatgaccgacctgagcaagagcagagagaacctgagcgccgtgatgctgtacaaccccggcctggagttcgagagacagcagagagaggagctggagaagctggagagcaagagaaagctgatcgaggagatggaggagaagcagaagagcgacaaggccgagctggagagaatgcagcaggaggtggagacccagagaaaggagaccgagatcgtgcagctgcagatcagaaagcaggaggagagcctgaagagaagaagcttccacatcgagaacaagctgaaggacctgctggccgagaaggagaagttcgaggaggagagactgagagagcagcaggagatcgagctgcagaagaagagacaggaggaggagaccttcctgagagtgcaggaggagctgcagagactgaaggagctgaacaacaacgagaaggccgagaagttccagatcttccaggagctggaccagctgcagaaggagaaggacgagcagtacgccaagctggagctggagaagaagagactggaggagcaggagaaggagcaggtgatgctggtggcccacctggaggagcagctgagagagaagcaggagatgatccagctgctgagaagaggcgaggtgcagtgggtggaggaggagaagagagacctggagggcatcagagagagcctgctgagagtgaaggaggccagagccggcggcgacgaggacggcgaggagctggagaaggcccagctgagattcttcgagttcaagagaagacagctggtgaagctggtgaacctggagaaggacctggtgcagcagaaggacatcctgaagaaggaggtgcaggaggagcaggagatcctggagtgcctgaagtgcgagcacgacaaggagagcagactgctggagaagcacgacgagagcgtgaccgacgtgaccgaggtgccccaggacttcgagaagatcaagcccgtggagtacagactgcagtacaaggagagacagctgcagtacctgctgcagaaccacctgcccaccctgctggaggagaagcagagagccttcgagatcctggacagaggccccctgagcctggacaacaccctgtaccaggtggagaaggagatggaggagaaggaggagcagctggcccagtaccaggccaacgccaaccagctgcagaagctgcaggccaccttcgagttcaccgccaacatcgccagacaggaggagaaggtgagaaagaaggagaaggagatcctggagagcagagagaagcagcagagagaggccctggagagagccctggccagactggagagaagacacagcgccctgcagagacacagcaccctgggcatggagatcgaggagcagagacagaagctggccagcctgaacagcggcagcagagagcagagcggcctgcaggccagcctggaggccgagcaggaggccctggagaaggaccaggagagactggagtacgagatccagcagctgaagcagaagatctacgaggtggacggcgtgcagaaggaccaccacggcaccctggagggcaaggtggccagcagcagcctgcccgtgagcgccgagaagagccacctggtgcccctgatggacgccagaatcaacgcctacatcgaggaggaggtgcagagaagactgcaggacctgcacagagtgatcagcgagggctgcagcaccagcgccgacaccatgaaggacaacgagaagctgcacaacggcaccatccagagaaagctgaagtacgagagaatggtgagcagaagcctgggcgccaaccccgacgacctgaaggaccccatcaagatcagcatccccagatacgtgctgtgcggccagggcaaggacgcccacttcgagttcgaggtgaagctggccgccctggagttcccccccaagaagctgttcggcaacaaggacgagagagtgatcgccgagagaagaagccacctggagaagtacctgagagacttcttcagcgtgatgctgcagagcgccaccagccccctgcacatcaacaaggtgggcctgaccctgagcaagcacaccatctgcgagttcagccccttcttcaagaagggcgtgttcgactacagcagccacggcaccggctag

SEQ ID NO: 276905 - DNA, 3864 bp, Artificial Sequence
  derived and/or modified sequence
atggccagtgttaaggtcgcagtcagagttcgaccgatgaacaggcgagaaaaggatctggaggctaaattcataattcagatggaaaagtccaaaaccacaatcactaatctgaagataccagaaggcggcactggggacagcggtcgagagagaacaaagaccttcacctacgatttttctttctatagtgctgacacaaagtcacctgactacgtcagccaggagatggttttcaaaacgctgggcacagatgtcgtgaagagcgcgttcgaaggctataacgcatgtgttttcgcctacggtcagactggttctggaaaaagttacacaatgatgggtaattcaggtgatagcgggttaattcctagaatatgtgaaggactgttttccagaatcaatgaaactactcgctgggatgaggcaagttttcgaacagaagtgtcttatctggaaatctacaatgagcgggtcagggacctgttacggaggaagtcaagtaaaactttcaatctgcgggtcagggaacaccctaaggagggaccatatgtggaagatctttcaaagcacctggtgcagaattatggggacgtggaagagttaatggatgccggaaatatcaatcgcacgacggcagcaacagggatgaatgatgtttctagcagaagtcacgcaatttttaccatcaagtttacgcaagctaagtttgactccgagatgccttgcgagacagtctctaaaatccaccttgtagatttagccggtagcgagcgagcagacgccactggagcaaccggcgttagactcaaagaaggcggaaatattaacaagagtctggttactctcggaaatgtcataagcgctttggccgatctgtcccaggatgctgccaacaccctagcaaaaaagaaacaggtgtttgtaccatatcgggattccgtgctgacctggttgctgaaagactctctcgggggcaacagcaaaaccattatgattgcaactattagtccagctgacgttaattacggggaaaccctcagtacgcttaggtacgccaatcgcgcgaaaaacattattaacaagccaacaatcaacgaggacgctaacgtgaagctgatccgggaactgagggcggaaattgctcggctaaaaacgttgctggcacaggggaaccagattgccctgctcgattccccgactgccctttctatggaggaaaaactgcagcagaacgaagcacgggtccaggagttaactaaggagtggactaataagtggaatgaaacccagaatatcctaaaagagcagacactggcgctcaggaaggaaggcatcggcgttgtgcttgattccgagctaccacacctcatcggcatcgacgatgatcttcttagcaccggcatcatactgtatcatcttaaggagggccagacatatgttggccgagacgatgcatcgaccgagcaggatatcgtcttgcatggcctcgacctggaatctgagcactgcatatttgaaaacattggtgggaccgtcactttgattccgctgtcagggtcacagtgttccgttaacggagtccagattgtcgaggccacccacctgaatcagggagccgtcatcctcctggggcggaccaacatgttcagatttaaccatccaaaagaggccgcgaagttgcgtgaaaaacggaaaagcggcctgttgagctcattcagtctgtctatgacggatctgtcaaaaagccgggaaaatctgagcgctgtgatgttgtataacccaggtctagagttcgaacgacagcagagggaagagttggaaaaattggaaagtaagcgcaaactgatcgaagaaatggaagagaaacagaaatccgacaaggctgagctggaacgcatgcaacaggaggtggagacccaaagaaaggagaccgagatcgtgcaactccagatcagaaagcaggaggaaagcttgaaacggaggagctttcatattgaaaacaagttaaaggacctgctagccgaaaaggaaaaatttgaagaggagagactgcgcgaacaacaagagatcgaactgcagaagaagcgccaggaggaggagacattccttcgggttcaagaagagctgcagcggctgaaagagcttaacaacaacgagaaggccgagaaatttcagatcttccaggagctcgaccagctgcagaaggagaaagacgaacagtacgccaaattagagctggagaagaagcggctggaagaacaggagaaagagcaggtgatgctcgttgcccacctggaagagcagctgagggagaaacaggagatgatccagctgttacgacgaggcgaagtccagtgggttgaagaggagaaaagagacctagaaggcatacgcgaatccctgctgagagtgaaggaggcccgggctggaggcgatgaagacggtgaggagctggaaaaggcacaactacgctttttcgaatttaagaggcgtcagctggttaaactcgtcaacctggagaaagacttagtccagcaaaaagacatactcaaaaaggaggtccaggaggagcaggagatcctcgaatgtcttaaatgtgagcatgacaaggagagcagacttctggaaaagcatgatgagagcgtgactgatgtgactgaggtgcctcaggatttcgagaagataaaacccgtagagtaccgactgcagtacaaggagcgccagctgcagtacctgctgcagaaccacctacctacactgctcgaggagaagcagagggcttttgagattctggaccgcggacccctatccctggacaacacgctgtatcaggtagagaaggaaatggaggagaaggaagaacagctggcccagtatcaggcgaacgccaatcagctgcaaaagttgcaggcgacctttgagtttacagcaaacattgcacgtcaagaggaaaaggttcgcaaaaaagagaaggagattctcgagtcacgcgaaaagcagcagcgagaagcccttgagagagccctggcccgcttggagcgacgtcatagtgccctgcagcgccactccaccctgggaatggagatcgaggagcagcggcagaaattagcctctctaaattccgggagccgggaacaatccggcttgcaagcgtcattggaggctgagcaggaagcgctggagaaagatcaggagcgcctggagtatgagatacagcagctgaagcagaagatttatgaagtcgatggtgtacagaaagaccaccatgggactctcgagggaaaggtagccagctcctcactgcccgtgagcgcagagaaatctcatctggtgccactcatggatgcacgaattaacgcgtacatcgaagaagaagttcagaggcgcttacaagacctgcaccgcgtgataagcgagggatgctccacttccgcagataccatgaaggataacgagaaattacacaacggcactatacaaaggaaactcaagtatgaacggatggtttctaggagtttgggggccaatcctgacgatttaaaagatcccatcaagatctccattcctagatatgtcttatgcgggcagggcaaagacgcgcacttcgaattcgaagtcaaactcgccgctcttgagttccctccaaaaaagctgtttggtaacaaggacgaaagagtgattgccgagaggcgttcccacctggaaaagtaccttagagatttcttctccgttatgcttcagtcggccactagccctctgcacattaacaaagtgggactgaccttatcgaaacacaccatttgcgaattcagcccattttttaagaagggcgtcttcgactatagcagtcacggaacagggtag

SEQ ID NO: 276906 - DNA, 5170 bp, Artificial Sequence
  derived and/or modified sequence
gcaggtggggctgccgcggaactccaggtccggccgggagcagaggggcgggggcgagagggaagtgggcgggagccgcgatctgagtagccagcgtcgccggcgaccgcggagttctgggctagtgggaccccgcgcgggctggttcgggatgagcgatggcatcggtcaaggtggccgtgagggtccggcccatgaatcgcagggaaaaggacttggaggccaagttcattattcagatggagaaaagcaaaacgacaatcacaaacttaaagataccagaaggaggcactggggactcaggaagagaacggaccaagaccttcacctatgacttttctttttattctgctgatacaaaaagcccagattacgtttcacaagaaatggttttcaaaaccctcggcacagatgtcgtgaagtctgcatttgaaggttataatgcttgtgtctttgcatatgggcaaactggatctggaaagtcatacactatgatgggaaattctggagattctggcttaatacctcggatctgtgaaggactcttcagtcggataaatgaaaccaccagatgggatgaagcttcttttcgaactgaagtcagctacttagaaatttataacgaacgtgtgagagatctacttcggcggaagtcatctaaaaccttcaatttgagagtccgtgagcatcccaaagaaggcccttatgttgaggatttatccaaacatttagtacagaattatggtgacgtagaagaacttatggatgcgggcaatatcaaccggaccaccgcagcgactgggatgaacgacgtcagtagcaggtctcatgccatcttcaccatcaagttcactcaggctaaatttgattctgaaatgccatgtgaaaccgtcagtaagatccacttggttgatcttgccggaagtgagcgtgcagatgccaccggagccaccggggttaggctaaaggaagggggaaatattaacaagtccctcgtgactctggggaacgtcatttctgccttagctgatttatctcaggatgctgcaaatactcttgcaaagaagaagcaagttttcgtgccttacagggattctgtgttgacttggttgttaaaagatagccttggaggaaactctaaaactatcatgattgccaccatttcacctgctgatgtcaattatggagaaaccctaagtactcttcgctatgcaaatagagccaaaaacatcatcaacaagcctaccattaatgaggatgccaacgtcaaacttatccgtgagctgcgagctgaaatagccagactgaaaacgctgcttgctcaagggaatcagattgccctcttagactcccccacagctttaagtatggaggaaaaacttcagcagaatgaagcaagagttcaagaattgaccaaggaatggacaaataagtggaatgaaacccaaaatattttgaaagaacaaactctagccctcaggaaagaagggattggagttgttttggattctgaactgcctcatttgattggcatcgatgatgaccttttgagtactggaatcatcttatatcatttaaaggaaggtcagacatacgttggtagagacgatgcttccacggagcaagatattgttcttcatggccttgacttggagagtgagcattgcatctttgaaaatatcggggggacagtgactctgatacccctgagtgggtcccagtgctctgtgaatggtgttcagatcgtggaggccacacatctaaatcaaggtgctgtgattctcttgggaagaaccaatatgtttcgctttaaccatccaaaggaagccgccaagctcagggagaagaggaagagtggccttctgtcctccttcagcttgtccatgaccgacctctcgaagtcccgtgagaacctgtctgcagtcatgttgtataaccccggacttgaatttgagaggcaacagcgtgaagaacttgaaaaattagaaagtaaaaggaaactcatagaagaaatggaggaaaagcagaaatcagacaaggctgaactggagcggatgcagcaggaggtggagacccagcgcaaggagacagaaatcgtgcagctccagattcgcaagcaggaggagagcctcaaacgccgcagcttccacatcgagaacaagctaaaggatttacttgcggagaaggaaaaatttgaagaggagaggctgagggaacagcaggaaatcgagctgcagaagaagagacaagaagaagagacctttctccgcgtccaagaagaactccaacgactcaaagaactcaacaacaacgagaaggctgagaagtttcagatatttcaagaactggaccagctccaaaaggaaaaagatgaacagtatgccaagcttgaactggaaaaaaagagactagaggagcaggagaaggagcaggtcatgctcgtggcccatctggaagagcagctccgagagaagcaggagatgatccagctcctgcggcgtggggaggtacagtgggtggaagaggagaagagggacctggaaggcattcgggaatccctcctgcgggtgaaggaggctcgtgccggaggggatgaagatggcgaggagttagaaaaggctcaactgcgtttcttcgaattcaagagaaggcagcttgtcaagctagtgaacttggagaaggacctggttcagcagaaagacatcctgaaaaaagaagtccaagaagaacaggagatcctagagtgtttaaaatgtgaacatgacaaagaatctagattgttggaaaaacatgatgagagtgtcacagatgtcacggaagtgcctcaagatttcgagaaaataaagccagtggagtacaggctgcaatataaagaacgccagctacagtacctcctgcagaatcacttgccaactctgttggaagaaaagcagagagcatttgaaattcttgacagaggccctctcagcttagacaacactctttatcaagtagaaaaggaaatggaagaaaaagaagaacagcttgcacagtaccaggccaatgcaaaccagctgcaaaagctccaagccacctttgaattcactgccaacattgcacgtcaggaggaaaaagtgaggaaaaaggaaaaggagattttggagtccagagagaagcagcagagagaggcgctggagcgggccctggccaggctggagaggagacattctgcgctgcagaggcactccaccctgggcatggagattgaagagcagaggcagaaacttgccagtctgaacagtggcagcagagagcagtcagggctccaggctagcctggaggctgagcaggaagccctggagaaggaccaggagaggttagaatatgaaatccagcagctgaaacagaagatttatgaggtcgatggtgttcaaaaagatcatcatgggaccctggaagggaaggtggcttcttccagcttgccagtcagtgctgaaaaatcacacctggttcccctcatggatgccaggatcaatgcttacattgaagaagaagtccaaagacgccttcaggatttgcatcgtgtgattagtgaaggctgcagtacatctgcagacacgatgaaggataatgagaaacttcacaatggcaccattcaacgtaaactaaaatatgagcggatggtttctcgctctttgggcgcaaatccagatgacctgaaggacccaattaaaattagtatcccacgctacgtcctctgcgggcaaggaaaggatgcacacttcgagtttgaggtcaagcttgctgcccttgaatttcctccaaagaaactatttggaaataaggatgaacgtgtgattgctgagagacgaagtcacttagagaaatacctcagggactttttcagcgtgatgctccagtccgcaacatctcccctccacatcaacaaagtgggactgactctctcgaaacataccatttgtgagttttcaccattcttcaagaaaggagtctttgactacagcagccacgggacggggtagagccaggggtgatggaggaaccaccacagcagtgccttctcgtcgaagcgggctccgatgcagggcagctcccccatgcgaggatccgggtctgcctcctcctgctgaagacagacatgcagcagcgggcccgggccacctcacgtttccatacctagtgcctgagtttggggatgggatgctctgcctgctgatgtggccctgacaggcagccgttaccgttccattgcggttgaacgtggccttttcccacagtgcttccttctcactgcgcagcaaagttcgtcccctgtggcaagatagatgtggttgggccatcgtgggttccctgagcccagccagcctgggacctcccaaagtgggtggcttaccagaccacccttaaatgactttcatctggtttcctctttcaccaaaatatactcgtattttttatatttcttccatgtggctggctatattccaagaaaagcattttaaattatttcattgtatttttttctttttttccctcatttgaatcagaacttttatataaaacccaaacactgatgtttacacagaatttcatattctgcaaaagggattttttgatccaatcatgactgtagtcttccatgcttgacaaattggatgtagacaacattacttaaaacttctataaatccctacaattaggatatttatttaaccttgaatattcaagaacattctcccaaatctaaatggctactgtgcattcttgagctttttctgctaagcacaaaatgaacgcaaagctaaatgcatatttttaagtattattcacattttttgttacagaatctattggatctttggctggaaaactagaatttatagcagtttattaatgataccttaaattactcaggacttaatgtagcattgcacttctgtgtacagtaaaactgctttgttttactaaagagaaaaatgtgagtggaaaaaatatgtatgtggtatatactcaaatgtatataattctatctatagatttatatatgtatacattctgtacagtagttccatcaaaatatgtaataattcacaccaattttattaaatgtatttgctttttcaaaatttaaattgagctgctatcaatattaaatgaagttatggcatct

SEQ ID NO: 276907 - DNA, 3864 bp, Artificial Sequence
  derived and/or modified sequence
atggcctctgtgaaggtggccgtgcgggtgcggcccatgaacagaagagagaaggacctggaggccaagttcatcatccagatggagaagagcaagaccaccatcaccaacctgaagatccctgagggcggcactggagacagcggccgggagaggaccaagaccttcacctatgacttctccttctacagcgctgacaccaagagcccagactatgtgtcccaggagatggtgttcaagaccctgggcacagatgtggtgaagagcgcctttgagggctacaatgcctgtgtgtttgcctacggccagacaggcagcggcaagagctacaccatgatgggcaacagcggggacagcggcctcatcccccgcatctgtgagggcctcttcagccgcatcaatgagaccacccgctgggatgaggccagcttcagaacagaggtgtcctacctggagatctacaatgaaagagtgcgggacctgctgcggaggaagagcagcaagaccttcaacctgcgggtgcgggagcaccccaaggagggcccctacgtggaggacctgagcaagcacctggtgcagaactatggagatgtggaggagctgatggatgctggcaacatcaacagaaccacagctgccaccggcatgaatgatgtgagcagccgcagccacgccatcttcaccatcaagttcacccaggccaagtttgacagcgagatgccctgtgagaccgtgtccaagatccacctggtggacctggccggcagcgagcgggcagatgccaccggggccactggagtgcggctgaaggagggcggcaacatcaacaagagcctggtgaccctgggcaatgtcatcagcgccctggccgacctgagccaggatgctgccaacaccctggccaagaagaagcaggtgtttgtgccctacagagattctgtgctgacctggctgctgaaggacagcctgggcggcaacagcaagaccatcatgattgccaccatcagccctgcagatgtgaactacggggagaccctgagcaccctgcgctatgccaacagagccaagaacatcatcaacaagcccaccatcaatgaagatgccaacgtgaagctgatccgggagctgcgggcagagatcgcccggctgaagaccctgctggcccagggcaaccagatcgccctgctggacagccccacagccctgtccatggaggagaagctgcagcagaatgaggcccgggtgcaggagctgaccaaggagtggaccaacaagtggaatgagacccagaacatcctgaaggagcagaccctggccctgaggaaggagggcattggagtggtgctggacagcgagctgccccacctgattggaattgatgatgacctgctgagcacaggcatcatcctgtaccacctgaaggagggccagacctacgtgggcagagatgatgccagcacagagcaggacatcgtgctgcacggcctggacctggagagcgagcactgcatctttgagaacatcggcggcaccgtgaccctcatccccctgagcggcagccagtgcagcgtgaatggagtgcagatcgtggaggccacccacctgaaccagggcgctgtgatcctgctgggccgcaccaacatgttccgcttcaaccaccccaaggaggccgccaagctgcgggagaagaggaagagcggcctgctgagcagcttcagcctgtccatgacagacctgagcaagagccgggagaacctgtctgctgtgatgctgtacaaccctggcctggagtttgagcggcagcagcgggaggagctggagaagctggagagcaagaggaagctgattgaggagatggaggagaagcagaagagtgacaaggccgagctggagaggatgcagcaggaggtggagacccagaggaaggagacagagatcgtgcagctgcagatcaggaagcaggaggagagcctgaagaggaggagcttccacatcgagaacaagctgaaggacctgctggccgagaaggagaagtttgaggaggagcggctgcgggagcagcaggagattgagctgcagaagaagaggcaggaggaggagaccttcctgcgggtgcaggaggagctgcagaggctgaaggagctgaacaacaatgagaaggccgagaagttccagatcttccaggagctggaccagctgcagaaggagaaggatgagcagtatgccaagctggagctggagaagaagaggctggaggagcaggagaaggagcaggtgatgctggtggcccacctggaggagcagctgcgggagaagcaggagatgatccagctgctgcggcggggggaggtgcagtgggtggaggaggagaagagggacctggagggcatccgggagagcctgctgcgggtgaaggaggcccgggctggaggagatgaagatggagaggagctggagaaggcccagctgcgcttctttgagttcaagaggcggcagctggtgaagctggtgaacctggagaaggacctggtgcagcagaaggacatcctgaagaaggaggtgcaggaggagcaggagatcctggagtgcctgaagtgtgaacatgacaaggagagccggctgctggagaagcatgatgaatctgtgacagatgtgacagaggtgccccaggactttgagaagatcaagcctgtggagtaccgcctgcagtacaaggagcggcagctgcagtacctgctgcagaaccacctgcccaccctgctggaggagaagcagagggcctttgagatcctggaccggggccccctgagcctggacaacaccctgtaccaggtggagaaggagatggaggagaaggaggagcagctggcccagtaccaggccaatgccaaccagctgcagaagctgcaggccacctttgagttcaccgccaacatcgcccggcaggaggagaaggtgaggaagaaggagaaggagatcctggagagccgggagaagcagcagcgggaggccctggagcgggccctggcccggctggagcggcggcacagcgccctgcagaggcacagcaccctgggcatggagattgaggagcagaggcagaagctggccagcctgaacagcggcagccgggagcagagcggcctgcaggccagcctggaggccgagcaggaggccctggagaaggaccaggagcggctggagtatgagatccagcagctgaagcagaagatctatgaggtggatggagtgcagaaggaccaccacggcaccctggagggcaaggtggccagcagcagcctgcctgtgtctgctgagaagagccacctggtgcccctgatggatgcccgcatcaatgcctacatcgaggaggaggtgcagaggcggctgcaggacctgcacagggtcatcagcgagggctgcagcaccagcgctgacaccatgaaggacaatgagaagctgcacaacggcaccatccagaggaagctgaagtatgaaagaatggtgagccgcagcctgggcgccaacccagatgacctgaaggaccccatcaagatcagcatccccaggtatgtgctgtgtggccagggcaaggatgcccactttgaatttgaggtgaagctggccgccctggagttcccccccaagaagctgtttggaaacaaggatgagcgggtgattgctgagcggcgcagccacctggagaagtacctgcgggacttcttctctgtgatgctgcagagcgccaccagccccctgcacatcaacaaggtgggcctgaccctgagcaagcacaccatctgtgagttcagccccttcttcaagaagggcgtgtttgactacagcagccacggcaccggctag

SEQ ID NO: 276908 - DNA, 3864 bp, Artificial Sequence
  derived and/or modified sequence
atggccagcgtgaaggtggccgtgcgggtgcggcccatgaaccggagagaaaaggatcttgaagcaaagtttatcatccagatggaaaaatccaagaccacaattactaatctcaaaattccagaggggggtactggagacagtggacgcgaaagaaccaagacattcacttacgacttctccttctactcagctgacactaagagtccagactatgtgagccaggaaatggtgttcaagaccctgggtaccgatgttgttaagagcgctttcgaaggatataatgcgtgcgttttcgcttacgggcagacgggatctgggaagtcttacactatgatgggtaacagtggcgatagcggtctgattccacgaatttgtgagggcctctttagcagaataaatgagacaaccagatgggacgaggccagctttagaacagaagtttcttacttagaaatttataatgagcgcgtgagggatctactacgtcgcaagtcctcaaagacctttaatctcagagtgcgggaacatccaaaggaaggtccttatgtagaggacttgtcgaaacatctggttcaaaactatggcgacgtggaggagctgatggatgccgggaatatcaatcgtaccacggctgcaacaggtatgaacgacgttagctcccgcagccacgcgatattcaccataaaatttacccaggctaagttcgatagcgaaatgccctgcgagacagtgtctaagatccacttagtggatctcgccggctcagagagggctgatgctactggggcaacaggtgtgcggctgaaggagggtgggaatatcaataagtccctcgtgactcttgggaacgtgataagcgctcttgctgacctgagtcaggacgcagccaacacgctggccaaaaagaaacaggtgttcgtgccatatagggactcggtgctgacttggttgctcaaagactctctcggaggaaattctaagactatcatgatcgctacaatatccccagccgacgtaaattatggcgagaccctctcgacgcttcgctatgccaatcgcgcaaagaacattattaacaagccaaccattaatgaggacgcgaacgttaagcttatcagggaactcagagcggagatagctaggctgaagacactgctagcgcaggggaaccaaatcgcgctcctcgacagcccaacagccctctctatggaagagaagctacagcaaaacgaagccagggttcaggagctaacaaaagagtggaccaataagtggaacgagacccagaatattttgaaggagcagacccttgctctccgcaaagaagggatcggtgtcgtgctggactcagagctgcctcacctgatcggaatagacgatgacctgttatccaccggaataattctgtaccacctcaaggaaggacaaacatacgtcggacgggacgacgcctccactgaacaggatattgtgttacacgggctggaccttgaaagtgaacactgcatcttcgagaatataggagggacagtgaccctcatacccttgtctgggtctcagtgttcagtgaacggcgttcagatcgtggaagccactcatctcaatcaaggcgccgttatcttattaggaagaacaaacatgtttagatttaatcatcctaaagaggctgccaaactgagggaaaagagaaagtcagggctgctgtcctcattttccctgagcatgactgatttatccaaatcgcgagagaacctgagcgcggtgatgttgtacaatccaggactggagttcgaacgtcaacagagagaagaactggagaagctggaatctaaacgtaagctgattgaagagatggaggagaaacagaaaagcgataaggctgaactcgagaggatgcagcaagaggtggaaacccaacgcaaggaaacggaaatcgtccagctgcagatccggaaacaggaagagtcactcaaacgtagatcctttcatatcgagaacaagctcaaagaccttcttgccgagaaggaaaagttcgaggaagaacggttgcgagagcaacaggagattgagctgcaaaaaaagaggcaggaggaggaaacattcttgagagtccaagaggaactgcaacgcctaaaggaactcaataacaacgagaaggctgagaaattccagatcttccaggaactcgatcagttgcagaaggaaaaggatgaacaatacgctaaactcgagctcgagaaaaaaaggcttgaagaacaggagaaagagcaggtgatgctcgtggctcatctggaagagcagctgcgggaaaaacaggagatgatccagctgcttaggcggggcgaagtgcagtgggttgaagaggaaaaaagagacctcgaaggaatccgcgaatcactgctcagagttaaggaggccagagccgggggcgatgaagacggcgaggaactcgagaaagcacaactcagatttttcgaatttaaaaggcgccaattggttaagttggtgaacctggaaaaagacctggtgcaacagaaagatatcctgaagaaggaggtccaggaagaacaggagatcctggagtgcctgaagtgcgaacacgataaggagagcagactgctagaaaaacacgatgagtccgtgacggacgtgaccgaagtgcctcaagactttgaaaagataaagcctgtggagtacaggctgcaatacaaggagcgccaactccagtacctacttcaaaatcatctgccaaccctgctagaagaaaagcagagggcattcgagattctggatcgcggtcccctgtcacttgataacactctataccaggtcgagaaggagatggaggagaaggaagagcagttggcacagtatcaggctaacgctaatcagctccagaagcttcaagccacctttgaattcaccgccaatattgcccgccaggaggagaaggtgagaaagaaggaaaaggagattctggagtctagggagaagcagcagcgggaagcactggaacgcgctcttgctcggttggagcggcgtcactcagccttacaacgacattctacacttgggatggagatagaggaacagcgacagaaacttgcgagcctgaattctggctctagggagcagtccggcctccaggcttcactcgaggcggaacaagaggcacttgagaaggatcaggaacggcttgaatacgagatccagcagctcaagcagaaaatttacgaggtggacggtgtacaaaaggaccaccatgggacgctggagggaaaagtggcatcaagcagcttaccagtgtccgccgagaagagccatttagtacctctcatggacgcgcgcatcaatgcctacattgaggaagaggtgcagcggagactccaggatcttcaccgcgtgattagtgagggttgtagtaccagcgccgacacgatgaaagacaatgaaaagctccacaatgggactattcagcgaaaactcaagtacgagagaatggtgtcacggtcactcggcgcaaatcctgacgacctgaaggatcctataaagatcagtataccaagatacgttctatgtggccagggtaaagacgcccactttgagtttgaagtcaagttggctgcactggagtttccccctaagaaactcttcggcaataaagatgagcgggtgattgcagaaaggcgttctcacctggagaagtacctgcgggatttttttagcgtcatgctgcagtccgccacctctcccctgcatattaataaggtcggccttacgttatccaaacatactatctgcgaattctcgcccttcttcaagaaaggcgtgtttgattactctagccacgggaccggatag

SEQ ID NO: 276909 - DNA, 3864 bp, Artificial Sequence
  derived and/or modified sequence
atggctagtgtcaaagtcgctgtgcgggtcaggccaatgaataggcgcgaaaaggatttggaggctaagtttattatccagatggaaaagtcaaaaacgaccattaccaatttgaagatccctgagggaggaacaggggacagcggacgggaacgcaccaagacttttacgtatgacttcagcttttattctgccgacaccaagagcccagattacgtttcacaggagatggtgtttaagacccttggcacagatgtggttaaatctgcctttgaggggtataatgcctgcgtatttgcttacggccagaccggctccgggaagagttacaccatgatgggcaacagcggggactccggcctgatcccgagaatttgcgagggcctgttctcccgaatcaacgagaccaccaggtgggatgaggcttcctttagaaccgaagtgtcctatctggagatatataacgagagagtccgggacctgctccgccgtaagtctagtaagacctttaatctccgggtgagagaacatcctaaagagggaccatatgtcgaggacctgagcaaacacttggtgcaaaactatggcgacgtggaggagcttatggatgctggtaacatcaaccgtacgaccgctgcgaccggcatgaatgacgtttcctcgcggtcccacgcaatcttcactataaagttcacacaggctaaattcgatagcgagatgccttgtgaaaccgtgagcaagatccatctggtagacctggcaggctccgagcgagctgacgccaccggggctaccggcgtgagactgaaggagggtggaaacatcaacaaaagtctagtgacactcggcaatgtgattagcgctcttgccgacttatcacaagatgccgctaatacgctggcaaagaagaaacaggtgttcgttccctatcgggattcagttcttacctggttgttgaaagatagtttaggcggtaactctaaaaccatcatgatcgcaactatcagtccggcagacgtgaattacggggagactctgtccactctacgctacgccaaccgagccaagaatattataaacaagcccacaattaatgaggacgccaacgtcaaactcatcagggagttacgagccgaaatcgctcggcttaaaactctgctggcgcagggcaaccaaatagccctccttgacagtcctactgcactgagtatggaggagaaactgcaacaaaatgaagccagggttcaggagttaaccaaggaatggacaaacaaatggaacgagactcagaacatcctgaaagagcagactttggcactgcggaaggagggaattggagtggtgctggattccgagctcccacacctaatcggcattgacgatgacctgctgagtacaggaatcattttatatcatcttaaagaagggcagacctacgtcggacgggacgatgccagtaccgaacaggacatcgtccttcacggcctggatcttgaatccgaacactgcatatttgagaacataggtggcacagtaactctcatccctctgtctggaagccagtgttccgttaacggcgtgcaaatcgtggaggcgactcatctgaatcaaggcgcagtcatactgctggggaggaccaacatgttcaggtttaatcatccaaaagaagcagccaagctgagagaaaaacggaagagcggcctgctgagcagttttagccttagtatgactgaccttagcaagagccgtgagaacctcagcgccgtgatgctgtacaatccaggcctagagttcgagagacaacagagagaagagttggagaagttagaatctaagcgcaaattaattgaagagatggaggaaaaacaaaagtcggataaggcagaactcgaaaggatgcaacaggaagtagagacgcaacggaaggaaacagaaatcgtccagctacaaatacgaaagcaggaagagtcccttaagaggcgctctttccacatagagaataagctcaaggacctgctcgccgagaaggaaaaatttgaggaagagcgcttaagagagcagcaagaaattgagctgcagaaaaaaagacaggaggaggaaacgttcctgagggtgcaggaagagctgcaacgcttgaaagagctcaataacaacgagaaggcggagaaattccagatttttcaggaattagaccagctccagaaagagaaagatgagcagtacgcgaagctcgaattggagaagaaaagactggaagagcaggagaaagagcaggtaatgctggttgcacacctggaagagcaactcagagagaagcaagaaatgattcagttgctcagacgcggagaagtgcagtgggtagaggaggaaaaacgtgaccttgagggaattagggagagcctgctgcgtgtaaaagaggcaagagcaggcggtgatgaagacggcgaggaacttgaaaaagcccaactgcgtttcttcgagtttaagaggagacagcttgtgaaattggtcaacttggaaaaggacttggtccagcagaaggacatcctaaagaaagaggtacaagaagagcaggaaatcctggagtgcttgaagtgtgaacatgataaggagagtagactgctcgagaaacacgacgaaagcgtgactgacgtgacagaagttccccaagacttcgaaaaaattaagcctgttgagtatcgccttcagtataaggagcgccaattgcagtacctactgcagaaccatctccctacactacttgaagagaaacagcgggctttcgagatcctggacagggggccactgagcctggacaacactctgtaccaggtggagaaggagatggaggaaaaggaggaacagttggcgcagtatcaggctaacgcaaatcagctacaaaagctgcaggccacctttgagtttaccgccaatattgccaggcaagaagaaaaggttaggaaaaaagagaaggaaattctggaatcccgagagaagcagcagagggaagccctggaacgggctctggcgcgtttggaacgtcgacacagcgccttacagaggcatagtacgctgggtatggaaatcgaagagcagcgccaaaaactagcatcattgaactcaggctcccgagaacagtccggcctgcaggccagcttggaagccgagcaggaggccctagaaaaggatcaggagcggttagagtacgaaatccagcaacttaaacagaaaatttatgaggtggatggggtgcagaaggatcaccatgggaccctggagggtaaagtcgcctctagttccttgccagtatcagcggagaagtcccatctggtccctcttatggatgcgaggatcaatgcatatatcgaggaagaggtacagcggagactccaagacctgcaccgggttatatccgagggatgctccacctctgcggataccatgaaagataatgagaagctgcataacggaacaatccaacgtaaactgaaatacgaacgaatggtgagccggtctcttggcgctaaccctgacgaccttaaagatcccatcaaaatcagtatacccaggtacgtgctttgcggccaaggcaaagatgcgcacttcgagtttgaggtcaagcttgccgcattagaatttccacccaaaaaactgttcgggaataaagacgagcgcgtaattgctgagcgaagatcccacctggaaaagtacctgagagactttttctccgtaatgttgcaatctgcaacaagcccactccacatcaacaaagtgggactgaccctcagtaagcacactatatgcgagttttccccgttctttaagaaaggggttttcgattactcaagccacggtactgggtag

SEQ ID NO: 276910 - protein, 289 aa, Artificial Sequence
  derived and/or modified sequence
MSRNSRKTIGKVRVDYIIIKPLPGYSCDMKSSFSKYWKPRIPLDVGHRGAGNSTTTAQLAKVQENTIASLRNAASHGAAFVEFDVHLSKDFVPVVYHDLTCCLTMKKNLWFRRKIPFQKISHFLLLRWVRQKQNKYPILFLTQGKSEIYPELMDLRSRTTPIAMSFAQFENLLGINVHTEDLLRNPSYIQEAKAKGLVIFCWGDDTNDPENRRKLKELGVNGLIYDRIYDWMPEQPNIFQVEQLERLKQELPELKSCLCPTVSRFVPSSLCGESDIHVDANGIDNVENA

SEQ ID NO: 276911 - protein, 264 aa, Artificial Sequence
  derived and/or modified sequence
  misc_feature (1)..(1): Xaa can be any naturally occurring amino acid
XCDMKSSFSKYWKPRIPLDVGHRGAGNSTTTAQLAKVQENTIASLRNAASHGAAFVEFDVHLSKDFVPVVYHDLTCCLTMKKNLWFRRKIPFQKISHFLLLRWVRQKQNKYPILFLTQGKSEIYPELMDLRSRTTPIAMSFAQFENLLGINVHTEDLLRNPSYIQEAKAKGLVIFCWGDDTNDPENRRKLKELGVNGLIYDRIYDWMPEQPNIFQVEQLERLKQELPELKSCLCPTVSRFVPSSLCGESDIHVDANGIDNVENA

SEQ ID NO: 276912 - DNA, 870 bp, Artificial Sequence
  derived and/or modified sequence
atgtcaaggaattctcgtaagaccattggtaaagtcagagtggactacattataatcaaaccattacctggctactcatgcgacatgaagagctccttttccaaatactggaaacccagaattcctttagacgtagggcatcggggtgccggcaactcgaccaccaccgctcagttggccaaggtccaggagaacactatcgcttctcttcggaatgccgcctcacacggcgcggccttcgtggagtttgatgtacatttgagtaaggatttcgtccccgtggtctaccatgacttgacctgttgtctaacgatgaaaaaaaacctgtggtttcgccggaagattccgttccaaaagataagccacttcctcctgttgaggtgggtccggcagaagcaaaacaagtatccaatcttattcctcacccagggaaagtctgagatatatcccgagctaatggatctccgcagtagaacaactccaatcgccatgagtttcgctcagttcgaaaacctgctgggcataaatgttcacactgaagatctgttgcgaaatcccagctacatacaggaagccaaggccaaaggattggttattttctgctggggtgatgacacaaacgaccccgagaacagacgaaaactgaaggagctgggcgtgaatggacttatctatgatcggatttacgattggatgcccgaacagccgaacatattccaggtggagcagctggaaaggctaaagcaggaactcccagaactgaagtcttgcctatgcccaacagtttcccgattcgtaccttcctctctgtgcggagagagtgatatccacgtagacgccaatggaatcgataacgtggagaatgcctag

SEQ ID NO: 276913 - DNA, 795 bp, Artificial Sequence
  derived and/or modified sequence
tagtgcgatatgaaatcatcatttagcaaatattggaaacctaggattcccttagacgtagggcacaggggcgctggcaacagtacaactactgcccaactggccaaagttcaggagaatactatcgccagtctgcggaacgccgcctcccatggcgcagctttcgttgagtttgacgtccacctttccaaggatttcgtccccgttgtgtaccacgacttaacttgttgtctcacaatgaagaaaaacctctggtttcgacggaaaataccatttcagaagattagccactttcttctgctgcgatgggtgcgccagaagcagaataaataccccatccttttccttacccaaggcaagtctgagatctacccggagctgatggatttacgtagccggacgacccctatagctatgtccttcgctcagttcgagaacctgttgggcatcaacgtacacaccgaagaccttctgcggaacccttcgtacatccaggaggcaaaggcgaaaggtttagttattttctgctggggggatgacacgaacgaccccgaaaatcgtaggaagcttaaagaactgggcgtgaacggtttgatttatgatcgaatatacgactggatgcccgagcaacctaacatctttcaggttgagcagctggaaagactgaagcaggagctcccagagttgaagtcatgtctatgtcccacagtctcccgcttcgtgccctcttctctgtgcggggaatccgacatccatgtggatgcgaatggtattgataacgtagagaacgcctag

SEQ ID NO: 276914 - DNA, 4015 bp, Artificial Sequence
  derived and/or modified sequence
ttgtgacatgaaatcttcattttccaagtattggaagccaagaataccattggatgttggccatcgaggtgcaggaaactctacaacaactgcccagctggctaaagttcaagaaaatactattgcttctttaagaaatgctgctagtcatggtgcagcctttgtagaatttgacgtacacctttcaaaggactttgtgcccgtggtatatcatgatcttacctgttgtttgactatgaaaaagaatctgtggttcaggaggaaaattccttttcagaaaatcagccatttccttctcttaagatgggttcggcaaaagcagaacaaatatccgatactatttttaactcaaggaaaatctgagatttatcctgaactcatggacctcagatctcggacaacccccattgcaatgagctttgcacagtttgaaaatctactggggataaatgtacatactgaagacttgctcagaaacccatcctatattcaagaggcaaaagctaagggactagtcatattctgctggggtgatgataccaatgatcctgaaaacagaaggaaattgaaggaacttggagttaatggtctaatttatgataggatatatgattggatgcctgaacaaccaaatatattccaagtggagcaattggaacgcctgaagcaggaattgccagagcttaagagctgtttgtgtcccactgttagccgctttgttccctcatctttgtgtggggagtctgatatccatgtggatgccaacggcattgataacgtggagaatgcttagtttttattgcacagaggtcattttgggggcgtgcaccgctgttctgggtattcatttttcatcactgagcattgttgatctatgccttttgggcttctcagttcaatgaagcaataatgaagtatttaactctttcactacagttcttgcaagtatgctatttaaattacttggccaggtataattgccagtcagtctctttatagtgagaaaatttattggttagtaatataaatattttaaactaaatatataaatctataatgttaaacatatgttcattaaaagcatagcactttgaaattaactatataaatagctcatatttacacttacagcttttcatttgatcaggtctgaaatctttagcacttaaggaaaatgactatgcataattatacctgaccatgaaaaaaataagtacctcaaatgcatgcatttgcactggtgattccaactgcacaaatctttgtgccatcttgtatataggtattttttacatgggttgacatgcacacaacaccattttcattcagtatgaaccttgaggctgctgccatttttccacttaaccaaaccagcctgaaggtgaacctcgaaacttgtttcataaatctttcaaaagttgttttacatcaatgttaaaatttcaaaatgctgcagggtaatttaatgtataaaatattagtaagaaaaagtatgtattgcatacttagtagaatagatcacaacatacaaattcaattcagtgcatgctttaggtgttaagcatgagattgtacatgtttactgttaggtccttgcatctgtggtgctaggtgagtatgagaagatgtcaaggactggacgtattttgttgcctaaaaaaaaaaggctgtttgtaggcgttttaaatatgcttattttgtgtgtctctcactacctattacacactgttgctttgtgggtttgttttgtatgtgcgtgtgttatacagtagttaaatttccatgcagaaaaataaatgtcctgaattttcatattagtattctttattgtatatcatgcatgtaatttatttagaaatgtaggtcttactaaatgtatatgcatgtatttcagattatactaggatttcttggattagaagcagattgtgttaactgtaacttaaagaatgaatgttaaataaaatgatacagatttattttcttcattacaaaatgaaatttcaagaaggtgttacttttgtagaatggttttataatatgacaagaaattttaatatagtgtctaccctaaagggatggcttatttgcatctaccttttactgcatgtttttcacaaggcagtttattcatatattgacatattttggtagtagctgagaacctaagacttgaaattatacattgtgtagtattttttaagctaagcaatgcaattttggtcagatcttatttgtgtgaagataggctctgaaatcctatggtattgcgtttgtaacgttgatattaatgcaaaatagtttaggaaatggagtcttctgcaagggttctgtatacttttcccacattgtatgagattttccaaaattttggtgtgaattgggcacttttggaaaactcctgaaaaagaattagtttccttcatctgcagacctttgtccaatacggttaccatttctttatagtaactcgattagccatatatgtttgtttctagtcctgctcctttgctcctctcctatgccttcccagtgctggctccattttgaagactcaaggacagaggggaagcagatcataaagagaaaaaggagacagaagaaaggatgaaggaaggaggtcatggggagtgtggcttctgagcagtttagttgctggggagagcagacagtcactgcctacaatacagacagaaccttcctgctcactttctgtcctatctcttcctgaccttatgaaccagtgttagtagatgattaaaacatgacaagcaatggctccttattttcacaggactaagtccgggccttcgtatcactagctgttgccttttacaccctgcttcagccaccctgtccctgtcattggccctggacttcctctctgtgcccgtgtgtcctctgcctgggagccctctcctcccatagtcactttctctctgccaaactcatttcttcttgtgcccaagacctctctcctgagcccttgtggaaacttcaggaaggatgaatccgtctttgtgctccacggctcgtaccttgatcaggctgtgcatcacagtaattctgttctaggtaggcagagttgatctttgtctcatctgccaggctgcaggctcttcaagggcagggaccttgtcatagtcatttttattttcacagtgcttggaacatggtggaaaatgaatgttggaattattggagtaatataatttgtatcaaatgtccttttgaattaagagatttagttatgtttactaagaatgtaaactttgaattggtttgcattttaacaattaggatggtttattgatgtgaattttgaaatgtagaggtataatgttaaattattttatactttatggaaatcaagtgaaatgtttgaaaaaatgccgccattatcctctggtattttctactctctggaattatgtgctgtaaatgatcggctgtaaatgtgaggcacaccacccacccctgtgtggaaagtgttgtggcgcttcctgccacccacccacctctctgccgttgctccttgtgacacttgtctgtcgtctcccatccaaactccaagcttacagctacctcagtactgctttgcttgtctgaaacacctcctttgccttccttcagtgtcccgctcaggtgcagcctcctccctaaagctcatctcagcttttgatctgaatgatgatggaaacatgcagacagcctctcagtcttactatttaatgttgtagctgggaaaaaacccagagaggttaactgatatactgggttgggactaggatgtgggttttgtgactctgaatcccatgttctcaaactacgctgccttccgaagtctggcatttgttagctcatgcttccttgtagtccagcttcttatgtgcctgttatattctccagtaagattgtaagccccttaagggcagggacgtctttgcatctctagcactgctatagtgttctatccttagttatgaactagataaataaatggtggtggcaacaa

SEQ ID NO: 276915 - DNA, 870 bp, Artificial Sequence
  derived and/or modified sequence
atgagcaggaacagcaggaagaccatcggcaaggtgcgggtggactacatcatcatcaagcccctgcccggctacagctgtgacatgaagagcagcttcagcaagtactggaagccccgcatccccctggatgtgggccacagaggagctggcaacagcaccaccacagcccagctggccaaggtgcaggagaacaccatcgccagcctgagaaatgctgccagccacggggccgcctttgtggagtttgatgtgcacctgagcaaggactttgtgcctgtggtgtaccatgacctgacctgctgcctgaccatgaagaagaacctgtggttccggaggaagatccccttccagaagatcagccacttcctgctgctgcgctgggtgcggcagaagcagaacaagtaccccatcctcttcctgacccagggcaagtctgagatctacccagagctgatggacctgcggagcaggaccacccccatcgccatgagctttgcccagtttgagaacctgctgggcatcaacgtgcacacagaggacctgctgaggaaccccagctacatccaggaggccaaggccaagggcctggtgatcttctgctggggagatgacaccaatgaccctgagaacagaaggaagctgaaggagctgggcgtgaatggcctcatctatgaccgcatctatgactggatgcctgagcagcccaacatcttccaggtggagcagctggagcggctgaagcaggagctgcctgagctgaagagctgcctgtgccccaccgtgtccagatttgtgcccagcagcctgtgtggggagagtgacatccacgtggatgccaatggaattgacaacgtggagaatgcctag

SEQ ID NO: 276916 - DNA, 795 bp, Artificial Sequence
  derived and/or modified sequence
tgatgtgacatgaagagcagcttcagcaagtactggaagccccgcatccccctggatgtgggccacagaggagctggcaacagcaccaccacagcccagctggccaaggtgcaggagaacaccatcgccagcctgagaaatgctgccagccatggagctgcctttgtggagtttgatgtgcacctgagcaaggactttgtgcctgtggtgtaccatgacctgacctgctgcctgaccatgaagaagaacctgtggttccggaggaagatccccttccagaagatcagccacttcctgctgctgcgctgggtgcggcagaagcagaacaagtaccccatcctcttcctgacccagggcaagtctgagatctacccagagctgatggacctgcggagcaggaccacccccatcgccatgagctttgcccagtttgagaacctgctgggcatcaacgtgcacacagaggacctgctgaggaaccccagctacatccaggaggccaaggccaagggcctggtgatcttctgctggggagatgacaccaatgaccctgaaaatagaaggaagctgaaggagctgggcgtgaatggcctcatctatgaccgcatctatgactggatgcctgagcagcccaacatcttccaggtggagcagctggagcggctgaagcaggagctgcctgagctgaagagctgcctgtgccccaccgtgtccagatttgtgcccagcagcctgtgtggggagagtgacatccacgtggatgccaacggcatcgacaacgtggagaatgcctag

SEQ ID NO: 276917 - DNA, 870 bp, Artificial Sequence
  derived and/or modified sequence
atgagccggaacagccggaagaccatcggcaaggtgcgggtggactacattatcattaagccccttccagggtactcctgtgacatgaagtcaagtttcagcaaatactggaaacccaggatacctctggatgtaggccacagaggagccgggaattccaccaccacggcccaactggcaaaggtgcaggaaaacactatcgcctctctgcggaacgctgcttcacacggggctgccttcgtagaattcgatgtgcacctgtcaaaggactttgtgcctgtggtgtatcatgacctgacatgctgtctcacaatgaagaaaaacctctggttccgtagaaagatacccttccagaaaatcagccacttcctgctcctgagatgggttagacagaagcagaacaagtaccccattctcttcctcacccaggggaaatcagagatttatccagaacttatggatcttcgtagtcgaacaacacccattgcgatgagttttgctcaatttgagaatttgctcggaatcaatgtccacacagaggaccttctgcggaacccttcctatatccaggaagccaaggcaaagggcctcgtcatcttctgctggggagacgatactaacgatccggagaatcgtaggaagttaaaggagcttggggtcaacgggctgatttacgaccggatctacgattggatgcctgagcagcccaatatctttcaggtggagcagctggaacggcttaaacaagagctaccggagcttaaaagttgtctgtgccccaccgtaagccgcttcgtgccatcctcgctgtgtggcgaatccgacatacacgtcgacgccaatgggattgataatgtggagaacgcctag

SEQ ID NO: 276918 - DNA, 795 bp, Artificial Sequence
  derived and/or modified sequence
tgatgcgacatgaagagcagcttcagcaagtactggaagccccggataccactggacgtgggtcatcgcggtgctggaaactcgacaacaacagcccagcttgcaaaggtgcaggaaaataccatcgcctctcttcgcaacgcggcttctcacggggctgcctttgtggagttcgacgtccatttgtctaaggattttgttccagtggtgtaccacgatctgacctgctgccttaccatgaaaaaaaatctgtggttccggagaaaaattccttttcagaaaattagccactttctgctgctcagatgggtcagacagaagcagaataaataccctattcttttcctgactcagggtaaatctgagatctatccggaactaatggatctgaggagcaggacaacaccaatcgcaatgagcttcgctcagtttgaaaacctattgggaattaacgtccataccgaggacctgctgcgaaacccaagctatattcaggaagctaaggctaaaggtttagtcatattctgctggggggacgacaccaacgacccagagaacaggagaaaactgaaagagctaggcgtgaacgggttaatctacgataggatatacgactggatgcccgaacagccaaatatcttccaggtagagcagctcgagaggctgaagcaagaactgcccgagctgaagtcttgcttgtgtcccactgtaagccggtttgttccctcctccctctgcggtgagagcgatattcatgtcgatgccaatggcatcgataatgtggaaaatgcctag

SEQ ID NO: 276919 - DNA, 870 bp, Artificial Sequence
  derived and/or modified sequence
atgagtcgaaatagtaggaagacaattggtaaggtgcgtgtggattacataattatcaagcccctcccgggatactcatgcgatatgaaatcaagtttttccaagtattggaagcccagaatccccctagatgtggggcacagaggtgctggaaacagtaccactactgcccagctggctaaagtacaagagaatacaattgcttccctgcgcaatgccgctagtcacggagctgcgtttgtggaattcgatgtgcatctctctaaagattttgtacctgtagtctatcacgacttaacctgctgcctgactatgaaaaaaaacctatggttccgcaggaaaattccgttccagaagattagtcactttctcttgttgcggtgggtacgccagaagcagaacaagtatcccatcctgtttctgacccagggaaagagtgaaatttatcctgaacttatggatcttcgctcccgaaccacaccaattgcaatgagcttcgcgcagttcgaaaatctcctgggaatcaatgtgcacacagaggatctcctaaggaatccttcatatatccaagaagcgaaggccaagggactggtgattttctgttggggtgacgatactaatgaccctgaaaatcggaggaaactgaaagagctgggtgtaaacggtctcatctatgacaggatttacgactggatgcctgaacaacccaatattttccaggtggaacagctggagcgccttaagcaggaactaccggaacttaagagctgtctatgtccgaccgtgagtcgattcgtgccctctagcctatgcggcgagtctgatatccatgtcgacgccaacgggatcgataacgtggaaaatgcttag

SEQ ID NO: 276920 - DNA, 795 bp, Artificial Sequence
  derived and/or modified sequence
tgatgcgatatgaaatccagcttctctaaatactggaagcctcggatacccctcgacgtgggccacaggggcgcaggaaacagtactacaaccgcccagttggctaaagtccaggagaacactatcgccagcttaagaaacgccgcttcccatggcgctgcctttgtcgaatttgatgtccatctgtccaaagattttgtcccggtagtgtatcatgatctgacatgttgcctgactatgaagaagaacctttggttcagaaggaaaataccttttcagaagatatcccacttcctgttgctgagatgggtgcgccagaaacaaaacaaatatcccattttgttcctgacccagggaaagagtgagatctacccagagctcatggacttgagatcaagaacaaccccgatcgcgatgtcattcgctcagttcgagaatctcctgggaatcaacgtacacaccgaagatcttctgcgtaatccgagctacatccaggaagctaaagccaaaggcctcgttattttctgctggggcgacgacacaaacgacccagagaacaggcgtaagctgaaggagctcggcgtaaacggccttatctatgaccggatctatgactggatgcccgaacagccaaacatcttccaggtggaacagctggagagattgaaacaggaactgcctgaattaaagtcttgtctgtgccctacggtgtctaggttcgttccctcttcattgtgcggtgaatccgacattcacgtggatgcaaacggaattgacaatgtggaaaacgcgtag

SEQ ID NO: 276921 - DNA, 870 bp, Artificial Sequence
  derived and/or modified sequence
atgagcagaaacagcagaaagaccatcggcaaggtgagagtggactacatcatcatcaagcccctgcccggctacagctgcgacatgaagagcagcttcagcaagtactggaagcccagaatccccctggacgtgggccacagaggcgccggcaacagcaccaccaccgcccagctggccaaggtgcaggagaacaccatcgccagcctgagaaacgccgccagccacggcgccgccttcgtggagttcgacgtgcacctgagcaaggacttcgtgcccgtggtgtaccacgacctgacctgctgcctgaccatgaagaagaacctgtggttcagaagaaagatccccttccagaagatcagccacttcctgctgctgagatgggtgagacagaagcagaacaagtaccccatcctgttcctgacccagggcaagagcgagatctaccccgagctgatggacctgagaagcagaaccacccccatcgccatgagcttcgcccagttcgagaacctgctgggcatcaacgtgcacaccgaggacctgctgagaaaccccagctacatccaggaggccaaggccaagggcctggtgatcttctgctggggcgacgacaccaacgaccccgagaacagaagaaagctgaaggagctgggcgtgaacggcctgatctacgacagaatctacgactggatgcccgagcagcccaacatcttccaggtggagcagctggagagactgaagcaggagctgcccgagctgaagagctgcctgtgccccaccgtgagcagattcgtgcccagcagcctgtgcggcgagagcgacatccacgtggacgccaacggcatcgacaacgtggagaacgcctag

SEQ ID NO: 276922 - DNA, 795 bp, Artificial Sequence
  derived and/or modified sequence
tgatgcgacatgaagagcagcttcagcaagtactggaagcccagaatccccctggacgtgggccacagaggcgccggcaacagcaccaccaccgcccagctggccaaggtgcaggagaacaccatcgccagcctgagaaacgccgccagccacggcgccgccttcgtggagttcgacgtgcacctgagcaaggacttcgtgcccgtggtgtaccacgacctgacctgctgcctgaccatgaagaagaacctgtggttcagaagaaagatccccttccagaagatcagccacttcctgctgctgagatgggtgagacagaagcagaacaagtaccccatcctgttcctgacccagggcaagagcgagatctaccccgagctgatggacctgagaagcagaaccacccccatcgccatgagcttcgcccagttcgagaacctgctgggcatcaacgtgcacaccgaggacctgctgagaaaccccagctacatccaggaggccaaggccaagggcctggtgatcttctgctggggcgacgacaccaacgaccccgagaacagaagaaagctgaaggagctgggcgtgaacggcctgatctacgacagaatctacgactggatgcccgagcagcccaacatcttccaggtggagcagctggagagactgaagcaggagctgcccgagctgaagagctgcctgtgccccaccgtgagcagattcgtgcccagcagcctgtgcggcgagagcgacatccacgtggacgccaacggcatcgacaacgtggagaacgcctag

SEQ ID NO: 276923 - protein, 1873 aa, Artificial Sequence
  derived and/or modified sequence
MFSRRSHGDVKKSTQKVLDPKKDVLTRLKHLRALLDNVDANDLKQFFETNYSQIYFIFYENFIALENSLKLKGNNKSQREELDSILFLFEKILQFLPERIFFRWHYQSIGSTLKKLLHTGNSIKIRCEGIRLFLLWLQALQTNCAEEQVLIFACLVPGFPAVMSSRGPCTLETLINPSPSVADVKIYPEEITPLLPAISGEKIAEDQTCFFLQILLKYMVIQAASLEWKNKENQDTGFKFLFTLFRKYYLPHLFPSFTKLTNIYKPVLDIPHLRPKPVYITTTRDNENIYSTKIPYMAARVVFIKWIVTFFLEKKYLTATQNTKNGVDVLPKIIQTVGGGAVQERAPELDGGGPTEQDKSHSNSSTLSDRRLSNSSLCSIEEEHRMVYEMVQRILLSTRGYVNFVNEVFHQAFLLPSCEIAVTRKVVQVYRKWILQDKPVFMEEPDRKDVAQEDAEKLGFSETDSKEASSESSGHKRSSSWGRTYSFTSAMSRGCVTEEENTNVKAGVQALLQVFLTNSANIFLLEPCAEVPVLLKEQVDACKAVLIIFRRMIMELTMNKKTWEQMLQILLRITEAVMQKPKDKQIKDLFAQSLAGLLFRTLMVAWIRANLCVYISRELWDDFLGVLSSLTEWEELINEWANIMDSLTAVLARTVYGVEMTNLPLDKLSEQKEKKQRGKGCVLDPQKGTTVGRSFSLSWRSHPDVTEPMRFRSATTSGAPGVEKARNIVRQKATEVEECQQSENAPAAGSGHLTVGQQQQVLRSSSTSDIPEPLCSDSSQGQKAENTQNSSSSEPQPIQENKGHVKREHEGITILVRRSSSPAELDLKDDLQQTQGKCRERQKSESTNSDTTLGCTNEAELSMGPWQTCEEDPELNTPTDVVADADARHWLQLSPTDASNLTDSSECLTDDCSIIAGGSLTGWHPDSAAVLWRRVLGILGDVNNIQSPKIHARVFCYLYELWYKLAKIRDNLAISLDNQSSPSPPVLIPPLRMFASWLFKAATLPNEYKEGKLQAYRLICAMMTRRQDVLPNSDFLVHFYLVMHLGLTSEDQDILNTIIRHCPPRFFSLGFPGFSMLVGDFITAAARVLSTDILTAPRSEAVTVLGSLVCFPNTYQEIPLLQSVPEVNEAITGTEDVKHYLINILLKNATEEPNEYARCIAVCSLGVWICEELAQCTSHPQVKEAINVIGVTLKFPNKIVAQVACDVLQLLVSYWEKLQMFETSLPRKMAEILVATVAFLLPSAEYSSVETDKKFIVSLLLCLLDWCMALPVSVLLHPVSTAVLEEQHSARAPLLDYIYRVLHCCVCGSSTYTQQSHYILTLADLSSTDYDPFLPLANVKSSEPVQYHSSAELGNLLTVEEEKKRRSLELIPLTARMVMAHLVNHLGHYPLSGGPAILHSLVSENHDNAHVEGSELSFEVFRSPNLQLFVFNDSTLISYLQTPTEGPVGGSPVGSLSDVRVIVRDISGKYSWDGKVLYGPLEGCLAPNGRNPSFLISSWHRDTFGPQKDSSQVEEGDDVLDKLLENIGHTSPECLLPSQLNLNEPSLTPCGMNYDQEKEIIEVILRQNAQEDEYIQSHNFDSAMKVTSQGQPSPVEPRGPFYFCRLLLDDLGMNSWDRRKNFHLLKKNSKLLRELKNLDSRQCRETHKIAVFYIAEGQEDKCSILSNERGSQAYEDFVAGLGWEVDLSTHCGFMGGLQRNGSTGQTAPYYATSTVEVIFHVSTRMPSDSDDSLTKKLRHLGNDEVHIVWSEHSRDYRRGIIPTAFGDVSIIIYPMKNHMFFIAITKKPEVPFFGPLFDGAIVSGKLLPSLVCATCINASRAVKCLIPLYQSFYEERALYLEAIIQNHREVMTFEDFAAQVFSPSPSYSLSGTD

SEQ ID NO: 276924 - protein, 1740 aa, Artificial Sequence
  derived and/or modified sequence
  misc_feature (1)..(1): Xaa can be any naturally occurring amino acid
XKIYPEEITPLLPAISGEKIAEDQTCFFLQILLKYMVIQAASLEWKNKENQDTGFKFLFTLFRKYYLPHLFPSFTKLTNIYKPVLDIPHLRPKPVYITTTRDNENIYSTKIPYMAARVVFIKWIVTFFLEKKYLTATQNTKNGVDVLPKIIQTVGGGAVQERAPELDGGGPTEQDKSHSNSSTLSDRRLSNSSLCSIEEEHRMVYEMVQRILLSTRGYVNFVNEVFHQAFLLPSCEIAVTRKVVQVYRKWILQDKPVFMEEPDRKDVAQEDAEKLGFSETDSKEASSESSGHKRSSSWGRTYSFTSAMSRGCVTEEENTNVKAGVQALLQVFLTNSANIFLLEPCAEVPVLLKEQVDACKAVLIIFRRMIMELTMNKKTWEQMLQILLRITEAVMQKPKDKQIKDLFAQSLAGLLFRTLMVAWIRANLCVYISRELWDDFLGVLSSLTEWEELINEWANIMDSLTAVLARTVYGVEMTNLPLDKLSEQKEKKQRGKGCVLDPQKGTTVGRSFSLSWRSHPDVTEPMRFRSATTSGAPGVEKARNIVRQKATEVEECQQSENAPAAGSGHLTVGQQQQVLRSSSTSDIPEPLCSDSSQGQKAENTQNSSSSEPQPIQENKGHVKREHEGITILVRRSSSPAELDLKDDLQQTQGKCRERQKSESTNSDTTLGCTNEAELSMGPWQTCEEDPELNTPTDVVADADARHWLQLSPTDASNLTDSSECLTDDCSIIAGGSLTGWHPDSAAVLWRRVLGILGDVNNIQSPKIHARVFCYLYELWYKLAKIRDNLAISLDNQSSPSPPVLIPPLRMFASWLFKAATLPNEYKEGKLQAYRLICAMMTRRQDVLPNSDFLVHFYLVMHLGLTSEDQDILNTIIRHCPPRFFSLGFPGFSMLVGDFITAAARVLSTDILTAPRSEAVTVLGSLVCFPNTYQEIPLLQSVPEVNEAITGTEDVKHYLINILLKNATEEPNEYARCIAVCSLGVWICEELAQCTSHPQVKEAINVIGVTLKFPNKIVAQVACDVLQLLVSYWEKLQMFETSLPRKMAEILVATVAFLLPSAEYSSVETDKKFIVSLLLCLLDWCMALPVSVLLHPVSTAVLEEQHSARAPLLDYIYRVLHCCVCGSSTYTQQSHYILTLADLSSTDYDPFLPLANVKSSEPVQYHSSAELGNLLTVEEEKKRRSLELIPLTARMVMAHLVNHLGHYPLSGGPAILHSLVSENHDNAHVEGSELSFEVFRSPNLQLFVFNDSTLISYLQTPTEGPVGGSPVGSLSDVRVIVRDISGKYSWDGKVLYGPLEGCLAPNGRNPSFLISSWHRDTFGPQKDSSQVEEGDDVLDKLLENIGHTSPECLLPSQLNLNEPSLTPCGMNYDQEKEIIEVILRQNAQEDEYIQSHNFDSAMKVTSQGQPSPVEPRGPFYFCRLLLDDLGMNSWDRRKNFHLLKKNSKLLRELKNLDSRQCRETHKIAVFYIAEGQEDKCSILSNERGSQAYEDFVAGLGWEVDLSTHCGFMGGLQRNGSTGQTAPYYATSTVEVIFHVSTRMPSDSDDSLTKKLRHLGNDEVHIVWSEHSRDYRRGIIPTAFGDVSIIIYPMKNHMFFIAITKKPEVPFFGPLFDGAIVSGKLLPSLVCATCINASRAVKCLIPLYQSFYEERALYLEAIIQNHREVMTFEDFAAQVFSPSPSYSLSGTGALASSLSADLEEPLSEEETEHPLLPLPRATKPRISRKFRCCTSALSRSSH

SEQ ID NO: 276925 - DNA, 5223 bp, Artificial Sequence
  derived and/or modified sequence
tgaaagatctaccccgaggagatcacccccctgctgcccgccatcagcggcgagaagatcgccgaggaccagacctgcttcttcctgcagatcctgctgaagtacatggtgatccaggccgccagcctggagtggaagaacaaggagaaccaggacaccggcttcaagttcctgttcaccctgttcagaaagtactacctgccccacctgttccccagcttcaccaagctgaccaacatctacaagcccgtgctggacatcccccacctgagacccaagcccgtgtacatcaccaccaccagagacaacgagaacatctacagcaccaagatcccctacatggccgccagagtggtgttcatcaagtggatcgtgaccttcttcctggagaagaagtacctgaccgccacccagaacaccaagaacggcgtggacgtgctgcccaagatcatccagaccgtgggcggcggcgccgtgcaggagagagcccccgagctggacggcggcggccccaccgagcaggacaagagccacagcaacagcagcaccctgagcgacagaagactgagcaacagcagcctgtgcagcatcgaggaggagcacagaatggtgtacgagatggtgcagagaatcctgctgagcaccagaggctacgtgaacttcgtgaacgaggtgttccaccaggccttcctgctgcccagctgcgagatcgccgtgaccagaaaggtggtgcaggtgtacagaaagtggatcctgcaggacaagcccgtgttcatggaggagcccgacagaaaggacgtggcccaggaggacgccgagaagctgggcttcagcgagaccgacagcaaggaggccagcagcgagagcagcggccacaagagaagcagcagctggggcagaacctacagcttcaccagcgccatgagcagaggctgcgtgaccgaggaggagaacaccaacgtgaaggccggcgtgcaggccctgctgcaggtgttcctgaccaacagcgccaacatcttcctgctggagccctgcgccgaggtgcccgtgctgctgaaggagcaggtggacgcctgcaaggccgtgctgatcatcttcagaagaatgatcatggagctgaccatgaacaagaagacctgggagcagatgctgcagatcctgctgagaatcaccgaggccgtgatgcagaagcccaaggacaagcagatcaaggacctgttcgcccagagcctggccggcctgctgttcagaaccctgatggtggcctggatcagagccaacctgtgcgtgtacatcagcagagagctgtgggacgacttcctgggcgtgctgagcagcctgaccgagtgggaggagctgatcaacgagtgggccaacatcatggacagcctgaccgccgtgctggccagaaccgtgtacggcgtggagatgaccaacctgcccctggacaagctgagcgagcagaaggagaagaagcagagaggcaagggctgcgtgctggacccccagaagggcaccaccgtgggcagaagcttcagcctgagctggagaagccaccccgacgtgaccgagcccatgagattcagaagcgccaccaccagcggcgcccccggcgtggagaaggccagaaacatcgtgagacagaaggccaccgaggtggaggagtgccagcagagcgagaacgcccccgccgccggcagcggccacctgaccgtgggccagcagcagcaggtgctgagaagcagcagcaccagcgacatccccgagcccctgtgcagcgacagcagccagggccagaaggccgagaacacccagaacagcagcagcagcgagccccagcccatccaggagaacaagggccacgtgaagagagagcacgagggcatcaccatcctggtgagaagaagcagcagccccgccgagctggacctgaaggacgacctgcagcagacccagggcaagtgcagagagagacagaagagcgagagcaccaacagcgacaccaccctgggctgcaccaacgaggccgagctgagcatgggcccctggcagacctgcgaggaggaccccgagctgaacacccccaccgacgtggtggccgacgccgacgccagacactggctgcagctgagccccaccgacgccagcaacctgaccgacagcagcgagtgcctgaccgacgactgcagcatcatcgccggcggcagcctgaccggctggcaccccgacagcgccgccgtgctgtggagaagagtgctgggcatcctgggcgacgtgaacaacatccagagccccaagatccacgccagagtgttctgctacctgtacgagctgtggtacaagctggccaagatcagagacaacctggccatcagcctggacaaccagagcagccccagcccccccgtgctgatcccccccctgagaatgttcgccagctggctgttcaaggccgccaccctgcccaacgagtacaaggagggcaagctgcaggcctacagactgatctgcgccatgatgaccagaagacaggacgtgctgcccaacagcgacttcctggtgcacttctacctggtgatgcacctgggcctgaccagcgaggaccaggacatcctgaacaccatcatcagacactgcccccccagattcttcagcctgggcttccccggcttcagcatgctggtgggcgacttcatcaccgccgccgccagagtgctgagcaccgacatcctgaccgcccccagaagcgaggccgtgaccgtgctgggcagcctggtgtgcttccccaacacctaccaggagatccccctgctgcagagcgtgcccgaggtgaacgaggccatcaccggcaccgaggacgtgaagcactacctgatcaacatcctgctgaagaacgccaccgaggagcccaacgagtacgccagatgcatcgccgtgtgcagcctgggcgtgtggatctgcgaggagctggcccagtgcaccagccacccccaggtgaaggaggccatcaacgtgatcggcgtgaccctgaagttccccaacaagatcgtggcccaggtggcctgcgacgtgctgcagctgctggtgagctactgggagaagctgcagatgttcgagaccagcctgcccagaaagatggccgagatcctggtggccaccgtggccttcctgctgcccagcgccgagtacagcagcgtggagaccgacaagaagttcatcgtgagcctgctgctgtgcctgctggactggtgcatggccctgcccgtgagcgtgctgctgcaccccgtgagcaccgccgtgctggaggagcagcacagcgccagagcccccctgctggactacatctacagagtgctgcactgctgcgtgtgcggcagcagcacctacacccagcagagccactacatcctgaccctggccgacctgagcagcaccgactacgaccccttcctgcccctggccaacgtgaagagcagcgagcccgtgcagtaccacagcagcgccgagctgggcaacctgctgaccgtggaggaggagaagaagagaagaagcctggagctgatccccctgaccgccagaatggtgatggcccacctggtgaaccacctgggccactaccccctgagcggcggccccgccatcctgcacagcctggtgagcgagaaccacgacaacgcccacgtggagggcagcgagctgagcttcgaggtgttcagaagccccaacctgcagctgttcgtgttcaacgacagcaccctgatcagctacctgcagacccccaccgagggccccgtgggcggcagccccgtgggcagcctgagcgacgtgagagtgatcgtgagagacatcagcggcaagtacagctgggacggcaaggtgctgtacggccccctggagggctgcctggcccccaacggcagaaaccccagcttcctgatcagcagctggcacagagacaccttcggcccccagaaggacagcagccaggtggaggagggcgacgacgtgctggacaagctgctggagaacatcggccacaccagccccgagtgcctgctgcccagccagctgaacctgaacgagcccagcctgaccccctgcggcatgaactacgaccaggagaaggagatcatcgaggtgatcctgagacagaacgcccaggaggacgagtacatccagagccacaacttcgacagcgccatgaaggtgaccagccagggccagcccagccccgtggagcccagaggccccttctacttctgcagactgctgctggacgacctgggcatgaacagctgggacagaagaaagaacttccacctgctgaagaagaacagcaagctgctgagagagctgaagaacctggacagcagacagtgcagagagacccacaagatcgccgtgttctacatcgccgagggccaggaggacaagtgcagcatcctgagcaacgagagaggcagccaggcctacgaggacttcgtggccggcctgggctgggaggtggacctgagcacccactgcggcttcatgggcggcctgcagagaaacggcagcaccggccagaccgccccctactacgccaccagcaccgtggaggtgatcttccacgtgagcaccagaatgcccagcgacagcgacgacagcctgaccaagaagctgagacacctgggcaacgacgaggtgcacatcgtgtggagcgagcacagcagagactacagaagaggcatcatccccaccgccttcggcgacgtgagcatcatcatctaccccatgaagaaccacatgttcttcatcgccatcaccaagaagcccgaggtgcccttcttcggccccctgttcgacggcgccatcgtgagcggcaagctgctgcccagcctggtgtgcgccacctgcatcaacgccagcagagccgtgaagtgcctgatccccctgtaccagagcttctacgaggagagagccctgtacctggaggccatcatccagaaccacagagaggtgatgaccttcgaggacttcgccgcccaggtgttcagccccagccccagctacagcctgagcggcaccggcgccctggccagcagcctgagcgccgacctggaggagcccctgagcgaggaggagaccgagcaccccctgctgcccctgcccagagccaccaagcccagaatcagcagaaagttcagatgctgcaccagcgccctgagcagaagcagccactag

SEQ ID NO: 276926 - DNA, 5223 bp, Artificial Sequence
  derived and/or modified sequence
taaaaaatttatccagaggagattactcccttactgcccgccatctccggcgaaaaaatagctgaagaccaaacatgtttttttctccagatactgctgaagtatatggttatccaagcggcctccctcgaatggaagaataaggaaaaccaagacacagggtttaagttcctgtttacgctcttcaggaagtactacctgcctcacttatttccctcctttactaagctaactaacatatacaagccagtgctcgacataccgcatttgagacccaagcctgtatacatcaccaccactcgcgataacgaaaacatatattctactaagattccctatatggctgcccgggtggtctttatcaagtggatcgtaacctttttcctggaaaagaagtatttgactgccactcagaatactaagaacggggtagatgtgcttcctaaaatcatccagaccgtcgggggcggtgccgttcaggagcgcgcccccgagcttgacggcggaggccccaccgagcaggacaaatctcacagtaatagctctactctctctgatcgacggctctctaactcttcactgtgctccatcgaagaagaacaccgcatggtttacgagatggtccagcgaatacttttgtccacacggggctacgtcaactttgttaacgaggtctttcaccaggcgtttttgctgccaagttgtgagattgcagtgacgcgtaaggtagtccaggtttaccggaaatggattctccaggataagcccgtgttcatggaggagcctgatcgtaaagacgtggcgcaggaggacgccgagaagcttggcttttctgagactgacagtaaagaagctagttcagaatcctctgggcataagaggtcctcatcttgggggcggacatattcctttacctccgcgatgtcccggggatgcgtaaccgaggaggagaatactaacgtcaaggctggcgttcaggccctgctccaagtctttctgactaattctgctaacatatttctgctcgaaccatgcgccgaagtaccggttctcctcaaggagcaggtggacgcctgtaaagccgttctgatcattttcaggaggatgatcatggaacttaccatgaacaaaaagacttgggagcagatgctgcaaatcctcctcagaatcaccgaggccgtcatgcagaaacctaaggacaagcagataaaagacctgttcgcccaaagcttagccgggctcctttttagaactttgatggttgcttggattagggctaacttatgtgtttacattagtcgggagctgtgggatgatttcctgggcgtcctgtcgagtctgaccgagtgggaggaactgattaatgagtgggcaaatatcatggactccctgacggctgttctcgcacgcacagtatacggcgtggagatgactaacctccctctggataagcttagcgagcagaaggagaaaaagcagagaggaaagggatgtgtgttagatcctcaaaaagggacaactgtgggtagatcgttcagcctcagctggaggtcccatcccgatgtgacagaacctatgagattcaggagcgccaccacaagcggcgcaccaggcgtggagaaggcgcgaaacatagttcgtcagaaggcaacagaggtcgaggaatgtcagcaatcagaaaacgctccggcggcgggatcgggccatttaaccgtagggcagcagcagcaggttcttcggagttcttcaacttctgatattcctgagcccttgtgttccgattcctcacagggccagaaggcagagaatacacaaaacagcagtagcagcgaacctcagccgatccaagagaacaagggccacgtgaagcgagaacatgagggtattacaattctggttaggcgcagcagctcccctgctgaactcgacttgaaggatgacctacagcagactcagggcaagtgccgagaaaggcagaagtccgagtccactaactccgatacaacactcggctgtacaaatgaggcagaactaagcatggggccatggcagacttgcgaggaggacccggagctcaacacgccgaccgatgtagtagcagatgcagacgcccgccattggctgcaactttcgcccaccgatgcgagcaacctgacagacagctcggaatgcctgacagacgactgttcaattatagcgggaggcagcctgaccgggtggcacccagacagtgccgctgtgctttggcggagggtgctgggcattttaggggatgtgaacaacatccagtcccctaagattcatgccagagttttctgctacctgtatgaactgtggtataaactggcaaaaattcgggacaacctcgccatttccttggataatcagtcaagccccagtcccccagttctgattcccccactgcgcatgttcgcatcctggctctttaaagctgctacgctcccaaatgaatataaagaaggaaaactacaggcataccgtctgatctgcgctatgatgaccaggcggcaggatgtactccccaattcagacttcctggtgcatttttacctcgttatgcatctgggactgaccagtgaagaccaggacattctgaacactatcataagacattgcccaccacgtttcttctctctgggtttcccgggctttagcatgttggtcggcgacttcatcacagccgccgcccgcgtgctgtctacagatattttgaccgctccacgcagcgaagcggtaactgtgctaggttcactcgtgtgctttcccaacacttatcaggagatacctctccttcagagtgtgccagaggtcaatgaagccattactgggaccgaagacgtgaagcactacctgattaacatcctgctgaagaatgctactgaagagcccaacgagtacgcgcgctgtattgcagtttgtagcctgggcgtttggatatgtgaggagctagcacagtgtactagccatccccaggttaaagaagccattaatgtaatcggtgtgacattgaagtttccgaacaaaattgtggctcaggttgcctgcgatgtccttcagctgcttgtgtcctattgggagaagctccagatgttcgagacctctctaccccgtaaaatggccgaaatcctggtcgccacagtggctttccttctgcccagcgccgagtacagcagcgtcgagactgacaagaaattcatagtgtctctcctgctgtgcctgctggattggtgtatggccctgcccgtctccgttctattacaccccgtgtcaaccgcagtcctagaggagcagcactccgcgagggcccctctacttgactacatctatcgtgtgctgcactgttgtgtgtgcggttctagcacctatacacaacagtcccactacatcctgaccctggctgatctgtcctctacggattatgatccctttctacctctcgccaacgtgaagtccagtgaacccgttcagtatcacagttcagcagagctgggaaacctgctcacagtggaggaggaaaagaaaagacggtctcttgagctgatcccccttaccgcaagaatggtgatggcacatctagtgaatcacctgggtcattatcccctgagcggcggcccggcaatactccacagcttagtctccgagaaccatgataatgcacacgttgagggatctgagctgagcttcgaggtgtttcggtcacccaatttgcaactctttgtgttcaacgatagcacccttatcagctaccttcagacgcccaccgaaggacctgttggagggtccccagtcggaagcttatccgacgttcgggtcattgtgagagacatctcgggtaagtactcgtgggacggtaaggtgttatacggaccgttagagggttgcctcgcacctaacggccgcaaccccagtttcctgatctcctcctggcaccgggacacttttggccctcagaaggactccagccaggtagaggagggagacgacgttctggataagctgttggagaatatcggtcatacttcgccagagtgtttattaccatcgcagttgaatctgaacgaaccgtctcttacaccctgtggcatgaactacgatcaggaaaaggagataatcgaggttatcctgcgccagaacgcacaagaagatgaatatatccagagtcataacttcgacagcgcaatgaaggtcacgtctcaggggcagccctcccctgtcgagccacggggccctttttatttctgtagattgcttctagacgacctcgggatgaattcctgggatcgtagaaagaacttccatcttctgaagaaaaactctaagctgctgcgtgaactgaaaaatctggattccaggcagtgtcgcgagactcataagatcgctgttttttacatcgcggaaggacaagaggataaatgctccatcctgtctaatgaaagggggtcccaggcttacgaggatttcgtagcaggcctggggtgggaggtcgacttgagtacccactgtgggtttatgggtggactgcagcggaatggaagtactgggcagaccgcaccctattacgccacaagcacagtggaggtgatcttccatgtcagcactcgcatgccttctgactccgatgattccttgacgaaaaagcttcgccacctggggaacgacgaggtccatattgtatggagcgagcactcccgggactatagacggggtataattccaacagcatttggtgatgtttccattattatatatcctatgaaaaaccatatgttcttcatcgctatcaccaagaagcccgaggtgccctttttcggccctcttttcgatggcgctattgtatcgggtaaactcctcccttctctagtgtgtgcgacatgcatcaatgcatcacgagcagtgaagtgtctaattcctttataccagtctttctacgaggagcgtgcactctacctggaagcgatcatccagaatcatcgcgaagtgatgacattcgaagattttgccgcacaggtctttagtccctctccttcctatagcttgagtggaaccggcgctcttgctagctccctgtcagctgatttggaagagcccttatcagaagaggaaacggaacatccactcctacccctcccacgtgccacaaagcctcgtataagtagaaagtttcggtgctgcacttccgcgctgtctagatcgtcacactag

SEQ ID NO: 276927 - DNA, 5223 bp, Artificial Sequence
  derived and/or modified sequence
tgaaaaatctacccagaggagatcacccccctgctgcctgccatcagcggggagaagattgctgaggaccagacctgcttcttcctgcagatcctgctgaagtacatggtgatccaggccgccagcctggagtggaagaacaaggagaaccaggacaccggcttcaagttcctgttcaccctcttcaggaagtactacctgccccacctgttccccagcttcaccaagctgaccaacatctacaagcctgtgctggacatcccccacctgcggcccaagcctgtgtacatcaccaccacccgggacaatgaaaacatctacagcaccaagatcccctacatggccgcccgggtggtgttcatcaagtggatcgtgaccttcttcctggagaagaagtacctgacagccacccagaacaccaagaatggagtggatgtgctgcccaagatcatccagacagtgggcggcggcgctgtgcaggagcgggcccctgagctggatggcggcggccccacagagcaggacaagagccacagcaacagcagcaccctgagtgaccggcggctgagcaacagcagcctgtgcagcattgaggaggagcacaggatggtgtatgagatggtgcagaggatcctgctgagcacccggggctacgtgaactttgtgaatgaggtgttccaccaggccttcctgctgcccagctgtgaaattgctgtgaccaggaaggtggtgcaggtgtacaggaagtggatcctgcaggacaagcctgtgttcatggaggagccagacaggaaggatgtggcccaggaggatgctgagaagctgggcttcagcgagacagacagcaaggaggccagcagcgagagcagcggccacaagaggagcagctcctggggccgcacctacagcttcaccagcgccatgagccggggctgtgtgacagaggaggagaacaccaacgtgaaggccggcgtgcaggccctgctgcaggtgttcctgaccaacagcgccaacatcttcctgctggagccctgtgccgaggtgcctgtgctgctgaaggagcaggtggatgcctgcaaggctgtgctgatcatcttccggaggatgatcatggagctgaccatgaacaagaagacctgggagcagatgctgcagatcctgctgcgcatcacagaagctgtgatgcagaagcccaaggacaagcagatcaaggacctgtttgcccagagcctggccggcctgctcttccgcaccctgatggtggcctggatccgggccaacctgtgtgtgtacatcagccgggagctgtgggatgacttcctgggcgtgctgagcagcctgacagagtgggaggagctgatcaatgagtgggccaacatcatggacagcctgacagctgtgctggccaggacagtgtatggagtggagatgaccaacctgcccctggacaagctgtctgagcagaaggagaagaagcagaggggcaagggctgtgtgctggacccccagaagggcaccaccgtgggccgctccttcagcctgtcctggaggagccacccagatgtgacagagcccatgaggttccgcagcgccaccaccagcggggcccctggggtggagaaggccagaaatattgtgcggcagaaggccacagaggtggaggagtgccagcagagtgaaaatgccccagctgctggcagcggccacctgactgtgggccagcagcagcaggtgctgcggagcagcagcaccagtgacatccctgagcccctgtgcagcgacagcagccagggccagaaggccgagaacacccagaacagcagcagcagcgagccccagcccatccaggagaacaagggccacgtgaagcgggagcacgagggcatcaccatcctggtgcggcgcagcagcagccctgctgagctggacctgaaggatgacctgcagcagacccagggcaagtgccgggagcggcagaagtctgagagcaccaacagcgacaccaccctgggctgcaccaatgaggccgagctgtccatgggcccctggcagacctgtgaggaggaccctgagctgaacacccccacagatgtggtggctgatgctgatgcccggcactggctgcagctgagccccacagatgccagcaacctgacagacagcagtgaatgtctgacagatgactgcagcatcatcgccggcggcagcctgaccggctggcacccagacagcgctgctgtgctgtggaggagagtgctgggcatcctgggagatgtgaacaacatccagagccccaagatccacgcccgggtcttctgctacctgtatgagctgtggtacaagctggccaagatccgggacaacctggccatcagcctggacaaccagagcagccccagcccccctgtgctgatcccccccctgaggatgtttgcctcctggctgttcaaggccgccaccctgcccaatgagtacaaggagggcaagctgcaggcctaccgcctcatctgtgccatgatgacccggcggcaggatgtgctgcccaacagcgacttcctggtgcacttctacctggtgatgcacctgggcctgaccagcgaggaccaggacatcctgaacaccatcatccgccactgccccccacgcttcttcagcctgggcttccctggcttctccatgctggtgggggacttcatcacagctgctgcccgggtgctgagcacagacatcctgacagcccccaggtctgaggccgtgacagtgctgggcagcctggtgtgcttccccaacacctaccaggagatccccctgctgcagagcgtgcctgaggtgaatgaggccatcactggaacagaagatgtgaagcactacctgatcaacatcctgctgaagaatgccacagaggagcccaatgaatatgcccgctgcatcgctgtgtgcagcctgggcgtgtggatctgtgaggagctggcccagtgcaccagccacccccaggtgaaggaggccatcaacgtcatcggcgtgaccctgaagttccccaacaagatcgtggcccaggtggcctgtgatgtgctgcagctgctggtgtcctactgggagaagctgcagatgtttgagaccagcctgcccaggaagatggccgagatcctggtggccaccgtggccttcctgctgcccagcgctgagtacagctctgtggagacagacaagaagttcatcgtgtccctgctgctgtgcctgctggactggtgcatggccctgcctgtgtctgtgctgctgcaccctgtgtccacagctgtgctggaggagcagcacagcgcccgggcccccctgctggactacatctacagagtgctgcactgctgcgtgtgtggcagcagcacctacacccagcagagccactacatcctgaccctggccgacctgagcagcacagattatgaccccttcctgcccctggccaacgtgaagagcagcgagcctgtgcagtaccacagcagcgctgagctgggcaacctgctgactgtggaggaggagaagaagaggaggagcctggagctgatccccctgacagccaggatggtgatggcccacctggtgaaccacctgggccactaccccctgagcggcggccctgccatcctgcacagcctggtgtctgaaaatcatgacaatgcccacgtggagggcagcgagctgagctttgaggtgttccgcagccccaacctgcagctgtttgtgttcaatgacagcaccctcatctcctacctgcagacccccacagagggccctgtgggcggcagccctgtgggcagcctgagtgatgtgcgggtgattgtgcgggacatcagcggcaagtacagctgggatggcaaggtgctgtatggccccctggagggctgcctggccccaaatggaagaaaccccagcttcctgatcagctcctggcaccgggacaccttcggcccccagaaggacagcagccaggtggaggagggagatgatgtgctggacaagctgctggagaacatcggccacaccagccctgagtgcctgctgcccagccagctgaacctgaatgagcccagcctgaccccctgtggcatgaactatgaccaggagaaggagatcatcgaggtgatcctgcggcagaatgcccaggaggatgagtacatccagagccacaactttgattctgccatgaaggtgaccagccagggccagcccagccctgtggagccccggggccccttctacttctgccgcctgctgctggatgacctgggcatgaacagctgggacaggaggaagaacttccacctgctgaagaagaacagcaagctgctgcgggagctgaagaacctggacagccggcagtgccgggagacccacaagattgctgtgttctacatcgccgagggccaggaggacaagtgcagcatcctgagcaatgaaagaggcagccaggcctatgaggactttgtggccggcctgggctgggaggtggacctgagcacccactgcggcttcatgggcggcctgcagagaaatggcagcacaggccagacagccccctactatgccaccagcacagtggaggtgatcttccacgtgtccaccaggatgcccagcgacagtgatgacagcctgaccaagaagctgcggcacctgggcaatgatgaggtgcacatcgtgtggagcgagcacagccgggactaccgccggggcatcatccccacagcctttggagatgtgtccatcatcatctaccccatgaagaaccacatgttcttcatcgccatcaccaagaagccagaggtgcccttcttcggccccctgtttgatggagccatcgtgtctgggaagctgctgcccagcctggtgtgtgccacctgcatcaatgccagcagagctgtgaagtgcctgatccccctgtaccagagcttctatgaggagcgggccctgtacctggaggccatcatccagaaccaccgggaggtgatgacctttgaagattttgctgcccaggtgttcagccccagccccagctacagcctgtctggaactggagccctggccagcagcctgtctgctgacctggaggagcccctgtctgaggaggagacagagcaccccctgctgcccctgccccgggccaccaagccccgcatcagcaggaagttccgctgctgcaccagcgccctgagccgcagcagccactag

SEQ ID NO: 276928 - DNA, 5223 bp, Artificial Sequence
  derived and/or modified sequence
tgaaagatctaccccgaggagatcacccccctgctgcccgccatcagcggggagaagattgctgaagaccaaacgtgtttcttcctgcaaatcctgctcaagtatatggtaattcaggcagcctccctcgagtggaagaataaagagaaccaggataccggtttcaagtttctcttcaccctgtttcgcaagtattatctaccccacctgttccctagtttcacaaaactgaccaacatctacaaaccagtgctggacatccctcatttgcgccccaagccggtatacattaccactacaagagacaatgagaatatttattcgacgaagatcccgtacatggctgccagggtcgtgtttatcaaatggattgtgacatttttcctcgaaaagaagtacttgacagccacccagaacacaaagaacggcgtggacgttcttccaaaaatcatacagaccgtgggcggcggggcagttcaggagagagcccccgagctggacgggggcggacccacagagcaggataaatcccacagcaattctagtaccctctccgaccggaggttgtctaattcctctttatgtagtatagaggaagagcaccgtatggtgtatgagatggttcagcgcatattgctctccacacgaggatacgttaattttgttaatgaggttttccaccaggcttttttgctgccgtcctgcgagatagcggtgacccgtaaagtggtgcaggtgtatcggaaatggatcctgcaggacaaaccagtcttcatggaggagccggatcgtaaggacgttgcccaagaggatgccgaaaagcttgggttttctgaaaccgatagcaaggaggcctcctctgagtcctcagggcacaaacggtcctcatcttgggggaggacgtattcatttacttccgccatgtcccgtggttgcgtcaccgaagaggaaaatactaatgttaaagctggtgtccaggcactcttgcaagtgtttctgacaaacagcgctaacatttttttactggagccgtgtgctgaagttccggtgctgttgaaggagcaggtcgatgcatgcaaggcggtgcttataattttccggcggatgattatggagctgaccatgaataaaaagacatgggaacagatgctgcagatactgcttagaattaccgaggctgtcatgcagaagccaaaagataaacagataaaagacttattcgcgcaatcactggccggcttgcttttcaggaccctgatggtggcctggatcagggccaacttgtgcgtttatattagtagagagctctgggacgactttttaggagttctcagcagcttgacagagtgggaagagctaattaatgagtgggccaatatcatggacagcctcactgcagtgctggccaggaccgtttatggggtggagatgacaaatttaccccttgataagttgagcgagcaaaaggaaaagaagcaaagaggcaaaggctgtgtgctggatcctcagaaaggaactactgtcggaagatcttttagtctgtcatggcgttcgcacccggatgttaccgaacctatgaggtttcgctccgcaacgaccagcggcgcccctggcgtagaaaaagctagaaatattgttaggcagaaagccacagaggtggaggaatgtcagcaatccgagaacgccccagccgccggttccgggcatcttacagtcggacagcaacagcaggtgcttcggtcctccagcacctctgatatccctgagccattatgcagtgacagcagccaggggcaaaaggccgagaatacccaaaacagtagctcctcggaacctcaaccaattcaggagaataagggccacgtcaaaagagagcacgaaggtattaccattctggttagacgctcctcatctcctgccgaactcgatctcaaagacgacctgcaacagacccagggcaaatgcagagaacggcagaaaagtgagtcaaccaattcagacactacattaggatgcaccaatgaggccgagctgtcaatggggccatggcaaacatgtgaagaggatcctgagctgaatacacctacagatgttgtggctgatgcagacgcgcgccattggttgcagctttctcccactgatgctagcaatctgacagatagtagtgaatgcctaaccgacgactgcagcatcatcgccgggggcagtttgacgggatggcaccctgacagcgccgccgtgttatggcggagagtcctgggcatcctaggggacgtcaataacatccagtctcccaagatccacgcgcgtgtgttttgctacctttatgaactgtggtataagctcgcaaaaatccgtgataaccttgctatctcacttgacaatcagtcctctccgagtcctcctgtgctgatcccaccccttcgtatgtttgcgtcttggctgttcaaggccgcaaccctcccaaacgagtacaaagagggaaaattgcaagcataccggctcatctgtgcaatgatgactcggcgccaagacgtgctacccaattccgactttctggttcacttctacctcgtcatgcacctaggcctgacgtccgaggatcaggatatccttaacactattattaggcactgtccgccacgctttttctcactcgggtttcctgggttttccatgctggtgggcgattttatcacagctgccgcccgggtcctgtcaactgatattctgacggcccccagatccgaggcagtgacagttctgggtagcctggtctgttttcccaatacctatcaagagatacctctgctgcagagcgtcccggaggtaaatgaagcaatcactggcacggaagatgtgaaacattacctcatcaacatcctgctaaagaacgccacagaagaaccaaacgaatatgcccggtgcatcgctgtctgcagccttggtgtgtggatttgtgaggaattggcacagtgtactagtcacccccaagtgaaggaagccatcaacgtcatcggagtcacactgaaattcccaaataaaattgtggcccaggtggcttgtgacgtcctgcaactgctggtatcatactgggagaaactgcaaatgttcgagacgagtcttcccagaaagatggcagagatcctggtggccactgttgccttcctattgccaagtgccgagtattctagcgtggagaccgataagaaattcatcgtcagcctgcttctgtgcttactagactggtgtatggccctgcctgtctccgtgctcctgcaccctgtgagtaccgctgttcttgaggagcagcactctgcaagggccccgctactagattatatctaccgggtactgcactgctgtgtctgcggaagttccacctatacccagcagagccactatatccttacacttgcagatctaagctccactgattatgatccgtttctcccacttgctaatgttaaatcctcagagccagtgcagtaccattcatccgccgagctcggcaacctgctgacagtagaagaagagaagaagcgaaggagcctggagctcatccccctcaccgcccgaatggtgatggctcatctggttaaccatcttggtcactacccgctgtcaggcgggcccgccatcttgcacagcctggttagcgagaatcacgataatgcacatgtggaaggaagcgagctaagctttgaagtcttccggtctcccaaccttcagctattcgtattcaacgatagtacgttaatctcttatttgcagaccccaactgaggggccagtgggtggctctccagtaggaagcttgtccgacgtacgggtaatagtgagggatataagtgggaagtattcatgggatggcaaagtgctttacggccctcttgagggctgcctggcacctaacgggcggaacccttcatttctcatttcgtcttggcatcgcgatacatttgggccgcagaaagatagctcccaagttgaggagggcgacgacgtgctggacaaattgttggagaacataggccacacgtccccagaatgcctgcttccatcacagctcaatttgaatgagccttcccttacgccttgcggtatgaattatgaccaggagaaagagatcatcgaggttattctacgccaaaatgcacaagaggacgagtatattcagtcccacaactttgatagcgctatgaaggtgacctcacagggacagcctagtcctgtcgagcctcggggcccattctacttttgcaggctgctcctcgacgatctggggatgaactcctgggaccggagaaagaatttccaccttttgaaaaaaaacagcaaactcctgcgagagctgaaaaatctcgactcacgacaatgcagagagacccacaaaatagccgtgttttacatcgccgaaggccaggaagacaagtgttcgatcctctctaacgaaagagggtcccaggcttatgaagattttgtcgccggcttggggtgggaagttgatctgtctacacattgcgggttcatgggtggtctgcagcggaatggctcaacaggacaaaccgccccgtactatgccacgtcaaccgtggaagtgatttttcacgtgtctacgcgcatgccttcagactctgatgattcattgactaaaaagttgagacacctaggaaatgatgaagttcacatagtctggtctgaacattccagagattataggcgaggaatcattcccacggccttcggggacgtgagcatcatcatataccccatgaagaaccatatgttcttcatcgccatcacaaaaaaacccgaagtccccttcttcggacctctgtttgacggagccatcgtcagcggcaaattgctgccgtccctggtgtgtgctacctgtatcaacgcaagccgggcagtcaaatgtttgatacccctttaccaaagcttttacgaggagagggctctgtacctggaagcgataatccaaaatcatcgggaagtcatgacatttgaagattttgctgcacaggtttttagtcccagtccgagctattcactcagtggcacgggggccctcgccagcagcctgagtgctgaccttgaggagcccctcagcgaggaggaaacagagcatcctctgcttccactcccccgagccactaaaccaaggatcagcagaaaattcaggtgctgtacttccgccctgagccggtccagccactag

SEQ ID NO: 276929 - DNA, 5222 bp, Artificial Sequence
  derived and/or modified sequence
tgaaaaatctaccctgaggagatcactccactccttccggcaatcagtggcgagaagattgctgaagatcagacctgcttttttctgcaaatcttgctgaagtatatggtgatccaggcagcttctctggaatggaagaataaggagaaccaggacactggattcaagtttctgttcaccctgttccgcaaatactatttgccacatctgtttccttcttttacgaaattgaccaatatttacaagccagtcctggatatcccacacctcaggcccaaaccggtttacatcaccaccaccagggacaacgagaacatttattccaccaagatcccgtacatggcggcaagggtggttttcatcaaatggatagttacttttttcctggagaagaagtacttaaccgctacacagaataccaagaatggcgtcgacgtgctgcccaaaatcattcagacggtgggagggggagctgtccaggagcgtgcgcctgagctcgacgggggtggccctacagaacaggataaaagccattctaatagttccaccttgagcgaccgtcgcctcagcaatagttcgctgtgctccatcgaggaagaacaccgaatggtgtacgagatggtccagcgaatactcctctccacccgtggatacgtaaactttgtgaatgaggtctttcaccaggctttcctcttgccaagttgcgagatcgcagttacccggaaagtggtgcaggtgtaccggaagtggatcctgcaggacaaacccgttttcatggaagaacctgataggaaagacgtcgcccaagaggacgctgaaaagcttggctttagtgagacagattccaaagaggcgagctcggaatcgagcggccacaagcgcagttcctcttggggccgtacgtattcctttacatcagcgatgagtagaggatgcgtgaccgaggaggagaacaccaatgttaaggccggagttcaggcattattacaagtcttcctgacaaactccgccaatatcttcttgctggaaccatgcgccgaagtgccggtgttactgaaagagcaagtggatgcctgcaaggcagtgctgattatctttagacgtatgatcatggaactgaccatgaataaaaagacatgggagcagatgctccagatcttactccggatcacagaggcggttatgcaaaagcccaaagataagcagattaaagacctgttcgcacaatcacttgcaggtcttttattcaggactctgatggttgcttggattcgcgctaacttatgtgtgtatatctcccgcgagttgtgggatgacttcctgggggtgctctcatcccttactgaatgggaggagctgattaacgagtgggctaacatcatggacagcctgactgctgtgttggccagaaccgtctacggagtggagatgaccaaccttcctctggacaaactttcagaacagaaggagaaaaagcagaggggaaaaggttgcgtgctcgatcctcaaaagggtactaccgtaggtaggagctttagcctatcatggcggagtcaccctgacgtgacagaaccgatgagattccggagtgctaccacctcaggcgctccaggggtggaaaaagcgagaaacatcgtgcggcagaaagccaccgaagtggaggagtgtcagcagtctgagaacgccccagcagccggttctgggcacctgacagttggtcaacagcaacaggttctgagaagtagtagcacctccgatatcccagagcccctgtgcagcgatagttcgcagggccagaaggcggagaatacgcagaacagctcatcgtccgagcctcagcctatccaagagaataagggccatgttaagcgcgagcatgaaggaataactattttagttagacgcagttcttccccggcagagctggatttaaaggatgacctgcagcaaacccaggggaagtgtcgagagaggcagaaaagcgaaagtactaactcggataccacgctaggctgtaccaatgaagccgagctgagcatgggtccttggcagacctgtgaagaagacccggaattaaatacccccaccgatgtggttgctgatgccgacgcacggcactggctgcagctgtctccgacagacgcgagcaacctgaccgactcctccgagtgtctgaccgatgattgcagcatcatagccggagggtcactgaccggctggcaccctgacagcgccgctgtcttgtggagacgggtcctcggaattctgggtgacgtaaacaacattcagtcccctaagatccacgctcgggtgttctgctatctctatgaactctggtacaagttagcaaaaattcgagacaacctggccatttccctcgacaaccaatcatccccctcaccccctgtgctgataccgccactgcgcatgtttgcctcatggctctttaaagcagcaaccctgccaaatgaatacaaggagggtaagctgcaggcttataggctgatttgtgccatgatgactcgtcgccaggatgtgctgcctaactcagatttcctcgttcatttttacttggttatgcatctggggttaaccagtgaggaccaagacatcttaaatactatcattcgacactgtccacccagattcttcagcctgggatttccgggttttagtatgctcgtcggggactttataacggctgccgctcgggtgctgtctacggatatcctgactgcgccacgaagtgaggccgtcactgtgttaggatctctagtgtgctttccaaatacataccaggagattcctctgctgcagtccgtgcctgaagtgaatgaagcaataactggtaccgaggacgtcaagcattatctgattaatattcttttgaagaatgccactgaggagcccaacgaatacgcgaggtgcatcgcagtctgctcacttggagtctggatatgcgaggagctggcgcagtgtacctcccatccacaggtcaaggaagccatcaacgtcatcggagttactctcaagttccccaacaagattgtagcccaggttgcctgtgatgtgctgcagttactggtgtcttattgggagaaactccagatgttcgagacctctctccccagaaagatggctgaaatcttggtggctaccgtggccttcctgctgccctcagccgagtattcatccgttgaaaccgacaagaagttcattgtttcgctactgctctgtcttctggactggtgcatggcattacccgtttctgtactgctgcacccagtatcaactgccgttctggaggaacagcattccgcacgcgctccccttctagactatatttaccgcgtgctccattgttgcgtttgcggcagtagcacatacacccagcaaagtcattacatcttaaccctggcagatctgtccagcactgattatgacccttttcttcccctcgctaatgtgaagagctctgagcccgtgcagtatcacagctccgccgaactgggcaacctgttgacagtcgaagaagaaaaaaaacgacgatctctagagctgattcccctgaccgcaagaatggtgatggcacatctggtgaatcacctcgggcattatccactgtccggcggtcctgccattctgcacagtttagtctctgagaatcacgataacgcccacgtcgagggttctgaactgtctttcgaggtattccggtcaccaaacctacagctgttcgtcttcaacgattcgaccctgattagttatttacaaaccccaacagaaggtccagttggcggaagtcccgtggggtcgctctccgatgtcagagtgattgtgcgcgatataagtgggaaatattcctgggatgggaaggtgttgtacgggcctctggaagggtgcttggcgccaaacggaagaaacccaagctttctcatctcgagctggcaccgagacactttcgggccacagaaagatagttcacaagtcgaggaaggagacgacgtgctcgacaaattgctcgaaaatattgggcacaccagtcccgagtgcctgcttccctcccagctcaacctgaacgaaccctcacttacaccgtgcggcatgaactacgatcaagagaaagagattatcgaagtcatcttacggcaaaacgcccaggaggatgaatatattcaatcacacaattttgatagtgccatgaaagtgacaagccaggggcaaccctccccagtggaaccaagaggtcctttttatttctgcaggctgctgctggacgacctcggcatgaactcgtgggaccggagaaagaacttccatctgctcaaaaagaactccaagctgttgcgagagctgaaaaatctggacagccgtcagtgtagagagactcacaagattgcagtcttctatatcgccgagggtcaggaggataagtgttctatattgtcaaacgagcgcggaagccaggcatatgaggatttcgtcgcaggactcggctgggaggtagacttgtctactcattgtggcttcatgggtgggctgcaacggaatgggtcaactggacagacagccccatactacgccactagtactgtggaggttatttttcacgtgtccacccgaatgccttctgactccgacgacagcctgacaaaaaagctgaggcacctgggaaacgacgaagtgcacatcgtatggagcgagcacagtagagactatcgacgcggtattatcccaaccgccttcggggatgtttccattataatctaccctatgaaaaaccatatgttcttcattgccattaccaagaaacccgaggtaccgtttttcgggcctctatttgacggcgcaatcgtcagcggtaagctgttgccctcacttgtgtgcgccacctgcatcaatgcctctcgggcagtcaagtgtctgatcccactgtaccagtctttttatgaggagcgggcactgtatttggaagccatcattcagaatcatcgagaggtcatgacctttgaagacttcgccgctcaggtcttctccccttccccatcttactcactgtccggaaccggggctctagctagcagcttgtccgccgatctggaagaaccgctgtctgaggaggaaacggaacacccactactaccgctgcccagagctactaaaccacgcataagtaggaaatttagatgttgcacgtcagccctttcccgatcctcccatta

SEQ ID NO: 276930 - DNA, 8769 bp, Artificial Sequence
  derived and/or modified sequence
taaagatatatccagaagaaatcactccactcctaccagccatatcaggggagaagattgctgaggaccaaacctgcttttttcttcaaatactgttgaagtatatggttattcaggctgcgagcttggagtggaagaataaggagaatcaagatactggttttaaatttctttttacattgtttcgaaagtattatcttcctcatttatttccatcatttactaagttaacaaacatctacaaacctgtacttgacatcccccatttgagaccaaagcctgtgtacattactaccactcgagacaatgagaacatttacagtacaaagattccatatatggcagctcgtgttgtttttattaagtggattgtaaccttctttttggaaaaaaagtatctaactgcaacacaaaacactaaaaatggagttgatgtattgcctaaaatcatccagactgttggtggtggtgctgtgcaggagagagcgcctgagctggatggtggtgggcccacggagcaggacaaaagccattctaacagcagcaccttgtcggaccgaagactcagcaactccagcctctgtagcattgaagaagagcaccgaatggtgtatgaaatggtacagcggattctcttgtcaacacgaggttatgtcaacttcgtgaatgaagtatttcaccaggcatttttgttgccttcctgtgagatagctgtaacaagaaaagtagttcaagtgtacagaaagtggattctccaggacaaacctgtgttcatggaggagccagatagaaaagatgttgcccaagaagatgctgaaaaattaggattttccgagactgatagcaaggaggcctcatctgaaagttctggtcataaacgatcttccagttggggacgcacatactccttcacaagtgcaatgagcagagggtgtgtgacagaggaggaaaatacaaatgtgaaagccggcgtccaggctttgttgcaggtatttttgacgaactctgcaaacatctttttgttggaaccatgtgctgaagttcctgtgctcttgaaagaacaagttgatgcttgtaaagctgttttgattatttttaggcgcatgataatggagcttacaatgaataaaaagacatgggaacagatgttgcaaatactactcaggataacagaagctgtcatgcagaagccaaaggataaacaaataaaggacttgtttgcccagagcttggcagggttactatttaggacgctcatggtagcttggatccgagcaaacctctgtgtgtacatttctcgagagctctgggatgactttcttggtgtgctgtcctccctcacggaatgggaggaacttataaacgagtgggccaacattatggactccttgacagcagtgcttgcaagaaccgtttatggagttgagatgacaaacctacctctggataaattaagtgaacaaaaggaaaagaagcaacgaggcaaaggctgtgttctagatcctcagaaaggaaccaccgtggggaggtccttttctctcagctggcggagccacccagatgtgaccgaaccgatgcgatttaggagtgccaccacgtctggagcaccgggagtggaaaaggcaagaaatattgttcgccaaaaagcaactgaagtggaggagtgtcaacagtcagaaaatgcacctgcagccggatctggccatctcacagtgggacagcagcagcaggtccttcggagcagcagcacctccgacatccccgagccgctgtgctcagattcttctcagggtcaaaaggcagaaaacacacagaattcgagttcttcagagcctcagcctattcaagagaataaaggacatgtgaagagagaacatgaaggaataacaatcttagttcgaagaagcagcagccctgctgaattggatttgaaagatgatttgcagcagacacaaggaaaatgtagggaaagacagaagagtgaaagtaccaacagtgacacaactctgggctgtaccaatgaggcagagctgtccatgggcccatggcagacctgtgaggaagacccagaactgaatactcccacagatgttgtggctgatgctgatgcccgtcattggttacaactgagtcccaccgatgcttcaaatttaacagatagcagcgagtgcctcacagatgactgtagtataatcgccggggggagcctcactggttggcacccagactctgctgctgtgttatggcgaagggtcttggggatcctcggagatgtgaataacatccagtcacccaagatccatgccagagttttctgctatctctatgaactctggtacaaactagcaaagatacgggataatctagcaataagcctggataaccagtcttctccatctcctccagttttgatcccaccactcagaatgtttgcatcatggctgtttaaggcggcgacactgccaaatgaatataaggaaggcaaactacaagcctacaggctgatctgtgccatgatgaccagacgccaggacgttctgccaaactcagatttcctggtgcatttttaccttgtgatgcacctgggattaaccagcgaggatcaggatatcttaaatacgatcataaggcactgtccaccccgctttttctccctgggttttcctggcttctcaatgctggtgggggacttcatcacggccgctgccagggtccttagcacagacattttgacggcgcctcgttcagaggctgtcactgtcctcggctctctggtctgctttccaaatacctaccaggagattcctttactgcagtcagtgccagaagtaaatgaggccattacaggaactgaagatgtcaagcattacctcataaatattttactgaagaatgccacagaagaaccaaatgaatatgcaagatgcattgctgtttgctcccttggggtctggatatgtgaagagcttgcacagtgtacaagccaccctcaggtgaaagaggccatcaatgtgataggagtaactctgaagtttcccaacaaaatcgtggcccaggtagcttgcgatgtccttcagttgctggtttcctactgggagaagcttcagatgtttgaaacctctctgcctcggaaaatggcagaaatcctcgtggccacagttgcttttcttttaccaagtgcagagtactcctcagtggaaacagacaagaagtttattgtgtccttgctactctgcctcttggactggtgcatggcattgcccgtgagtgtccttctccaccccgtgtccacagcagtcctagaggagcagcattcggccagagcccccttgctggattatatctacagggttttgcactgctgtgtgtgtggctcaagcacgtacacccaacagagtcactacatactgaccctggctgacttgtcatccacggattatgaccccttcctgccactggcaaatgtgaagagctctgagccagtccagtatcattcatcagcagaattgggtaacctgctgactgttgaagaggagaagaagagaagaagtttggagttgatccctttgactgctcgaatggtgatggcccacctggtgaaccacctggggcactaccccctcagtgggggccctgccatactgcacagccttgtcagcgagaaccatgacaatgcccatgtggaaggctccgagctgtcctttgaggtgttcagaagtccaaacctgcagctgtttgtatttaatgatagcaccctcatctcctaccttcagacacccacagaaggaccggtagggggatcaccagtgggctctctctctgatgtgagagtaattgtgagggatatctcagggaagtactcttgggatggtaaggttttatatggacctttggaaggctgcttagcacccaatggaagaaatccttcatttctgatttcgagctggcatcgtgacacatttggacctcagaaagactcttctcaagttgaggagggggatgatgttcttgacaaattacttgaaaacattggccatacaagtcctgaatgccttttaccgtcacagctaaatctaaatgaaccttccctaaccccatgtggcatgaactatgaccaagagaaggaaatcattgaggtcattttgcgccaaaatgctcaagaggatgagtatatccagagtcataacttcgattctgcaatgaaagtcaccagccaagggcagccctccccagtggagccccgaggacccttttatttctgcaggttattgcttgatgacttgggaatgaattcttgggacagaaggaagaattttcatctattgaagaaaaattcaaaattattgagagagctgaaaaatttggactcccgccagtgccgtgagacacacaaaatcgcagtgttttacattgctgaaggtcaagaagacaagtgttcaatcctctctaatgaaagaggaagccaagcatatgaagactttgttgctggacttggatgggaggtggatctctccacccactgtgggttcatgggtggccttcagcgcaatggcagcaccgggcagacggccccttactatgctacctcaactgtggaagtgattttccatgtttccactcgaatgccgtcagactcagatgattccctcaccaaaaagcttcgtcacttggggaatgacgaggtccatatcgtctggtctgaacactccagagactaccgcaggggtattatcccaactgcctttggagatgtttcaatcattatttacccaatgaagaatcacatgttcttcatcgcgataacgaagaaacctgaggttccattttttgggcctctgtttgatggagccatagtgagtgggaagctgctgccaagccttgtatgtgccacgtgcatcaacgccagcagggctgtgaagtgcctcatcccactctaccagagcttctatgaagagcgagctctgtatctcgaagcaataattcagaaccaccgcgaagtaatgacattcgaggatttcgcagcccaagtcttttctccctctcccagctactccctcagcggaacgggggccctggcctccagtctgagtgctgacctcgaagagcccctgagtgaggaggagacagaacaccctctcctgcctctgccccgagccactaaacccagaatctccaggaaatttcgttgctgtactagtgccctcagcaggtcttcccattagtggacttctgaagcccatggtgaatcccactaccgtgtctcagatgggactcaaactaggctgtatcatcttgtcctgaaacctcacaaaccttggacttccaaagaagaaaagaaaaagtcaccaaaaaccagagatgaacccactgacacgtgggcactggtgtggctgctctgggcagatgacagcaggaaaagattctgcgctttcagggagggggcagagggcagcttgcttctgcaccccaagttgtttcttctcatttatgaacccaagcatgattcacaaaggggctggcaaaacaattgtctaattgaggaatctgatctgcattgattttgctagttccttttatgttaggatttatggtttactcaaaaatttcatcatcatggaaattggctttccccggggtcttttgcccaggagaagttttacctcagttgtccagtgttttcccacatggtacctgacgcccgctaactaagcagaggctctcctcaccacgcagaggcgcttcaggtcatgacagtgatgcccctatcttagaacactcagaagattccagaaatacagggtcctgtccttgcataagttcctgcaggacaggaagtgtcccaaggctcaaaacaacacagaccacatccacacaaaaggcgcatgccggcttcaggcgctaggctgagacgggtaccccccgaatggccttgtgcctccaaaagcctcacgctgcaactttgctgctcctgtctgttgcccagagaggcctcacacaggcctcagaaatgtttcttgtcacacaaagcttttggtagccgattccaagcgagggatttaatccttacatttttgcccatttggctccaaggaaggcttattagacctgtttttttgttgttgttgtttttttttcttaaaaacaaaatgaatgaatgaatgaaaagagaagcaatggtgagccctctcctgctggggcgccctgggtgggccttgcccgtcctgcagcagagaaatcagtcagcagcgaagagctgctggcgcaggccccaggctgtgtcctggacccttgacctgcctcagagctagaggtttgctccaccccgcacttcacttgggaagtaaatccaagaagcttaccagagtccatcgccactgcgcaggctttgttctcacagcggccaggtacagagcaacgccctgcagtgggaagggacagcagcacgagagacgcagcccctaactcagggcttatgatgggtgggctggtcctgggaaaggcgggccctgtgcgggaggcctccccaccttcctgtgccctctgccctctgcccttgcacacacttgttaccttcaggctgcttggccacccaggcctgaagaagccttctgaggctctcaccccatcagaacggccattttcactgaggagccagttttttccatttgccatggagctggtttggctggaacctggcctttgtagggaaaacggggagactcaggagccagactcactcttgggacaaatgagaaagagctgagccagtcgttcctgtcggaagggcgggcctgctcatcctggcgagaatttgcttttctgctttataggggattgcaggccaggcccactgacaggagcaccttgagaaccacctgaacagaagagaatgagggtgccccaaagtggaaggaagcttctggcccctgggccgttttgggaagggcccaggatactcacgggggctgaagggcaatgtgaagagtgactgcaagtcctggcattttctgtggtgtcagcaaatgcccctttattttaaatgattccagacatctgggcagcatagcttggccaccatcactcaggcttgatcctgctgttgagctgctcctgtctcctgtttacctcactcctgttgggaaggccatcgcatgctcctaggctccagagtcccctgtaggtctctaccagcaggtcgcctctgggagaacgtttcatcttcaggctctagaaactcctgttgcggaattgctggctttagtagaaaagatatgtcaggatttagaaatcgtattgaactctcctggacttctgctccatgatttcattttgctttcacgaaccagcgatccctaccttggggtgggaaattcaattgtaggcagcaaataactcaaccctcctgtaacccctgaggattataacgaccccatgacccccgatgacagccagcagtttggtgactagagttttttgagcctgccattctcagtagcagctttggtctggagatggaacgtggagcagggaatctgacagccacgtttctcgtgatcacgtggactggagttgtttttgttatctggggtggaaaattgcaatgatcaagtttcttttttattttttttttacttagaaaagcaaatattgtgtttttgtaataaatccctttcagcaaaattgcggaggatcattcatccactagggccccacctgaggcacagcgctgactcatcacggtggtaccagtaggtcagccatctggaaacagaagtggccctaattgggccaaaatgtggtaagactcgctggcctcaggcagggccaggccagttccctcacttctctgcacacctattcccagattccatccagagcaaagctgatgtttatcgtctcattgtacttaggctttcgtactttaaaaaattatgactttttaaaaataagccttcagcagacagaagtgaagaaatttagcctgggttgcctcagcaacaaagtctgcggttcctaagagccacatgttggggaagtggggtgacccaaacttggtgacataggttgattgatcagaccctcagccttacaagcaagagctcatgcagatccacagagccatgcacatcctgtcttcctgaccttcctcaggtggcaccacctgcgccccatggacctgctgtatcggtgtcatgtggaggtctgatgaatcctttaaaacctaactgtgatgtcgtaaatgtaactgtgctacctttatatctactgaagggcagcgtctgcatccgagggaaattcaacatgaaacaaccatcgttttagttgcactcagtctgtccatatgacatacacatgaagtgaatgtttccttatgttttcaggtctacaatgtttagtacatgtaaataaggaaaaaatttgataaatatggtaaattaagttatagcgtgtcatttgattcttattttgctgtctcttgttatttaattttcctaatgctccacatctaggttccttcctaggtggtgggaacaccttgcagacgtgtgtgcaccaggacacaccgcggcccaggcagccacaccgagaaagcacacatctccactgatggcagccacccgactctccagttaacctcttttactctttaattctgatttactgtgatgatttaataaagtggaaacacagcacttcagtgctatatgtttctctcattctcattatagtttataagaaaataaagttcaccctggcatctaataaaaa

SEQ ID NO: 276931 - DNA, 555 bp, Artificial Sequence
  derived and/or modified sequence
cgcgggtctgttcaacaccctcccgttgttggcatcaacgcgttttcttctcctttggctattgccgttggcgatgccacccccggacctgaacccggatacgctcgaagctgttcgagtgcctccccacgcggattcgctccctcccccgggtctcagcagtccggatatgggggaggcctgggagctggtctggggggatatggcgcccctggggttgctggactgggcgttccaggcagtccaagcttcctgaacgggtctaccgccacctcaccctttgctatcatgccctcctctccacccttggcagctgcctcaagtatgagcctgcctgccgctgcacctacaacttcagttttctcattcagtcctgtgaatatgatcagcgccgttaagcaaagatctgcctttgctccggtgctgaggcctccttcttctccacctcaagcatgtccccgtgcccacggcgaggggctgccggatcagtcgtttgaagattcggacaagtttcactcccctgctaggggattgcagggcctcgcttacagctag

SEQ ID NO: 276932 - DNA, 555 bp, Artificial Sequence
  derived and/or modified sequence
cggggctctgtgcagcacccccctgtggtgggcatcaatgccttcagcagccccctggccatcgctgtgggagatgccaccccaggccctgagcccggctacgcccggagctgcagcagcgccagcccccggggctttgcccccagccctggcagccagcagagcggctatggaggcggcctgggcgccggcctgggcggctacggggcccctggggtggccggcctgggcgtgcccggcagccccagcttcctgaatggcagcacagccaccagcccctttgccatcatgcccagcagcccccccctggccgccgccagctccatgagcctgcctgctgctgcccccaccacctctgtgttctccttcagccctgtgaacatgatctctgctgtgaagcagaggtctgcctttgcccctgtgctgcggccccccagcagccccccccaggcctgcccccgggcccacggggagggcctgcctgaccagagctttgaggacagcgacaagttccacagccctgcccggggcctgcagggcctggcctacagctag

SEQ ID NO: 276933 - DNA, 555 bp, Artificial Sequence
  derived and/or modified sequence
cggggcagcgtgcagcacccccccgtggtgggcatcaacgccttctcttctcccctggccatagccgtgggcgatgctacaccaggccccgaacccgggtacgctcggtcctgctcgagtgccagtccccggggctttgctcccagtcccgggagtcagcagagcggatacggaggaggattgggcgcagggcttggggggtacggcgcccccggagttgcaggcctcggggtccctggcagcccatccttcctaaatggaagtaccgctacgagcccttttgcgattatgccatctagcccacccctcgccgctgcttcctccatgagcctgccagcagccgccccgactacatctgtcttttcattctccccagtgaacatgatcagtgcagtcaagcaacggtccgcgtttgcacccgtattacgcccaccatcaagcccaccacaagcctgcccaagggctcatggcgaaggtttgccggatcagtccttcgaggactctgataaattccactcccccgcccgtggcctgcaagggcttgcttactcatag

SEQ ID NO: 276934 - DNA, 555 bp, Artificial Sequence
  derived and/or modified sequence
agggggtcagtgcagcaccctccagttgtcggtattaatgctttttcttccccacttgcaatagctgttggcgacgcaactccgggtccagagcccggatacgcacggtcttgcagttccgcatctcccaggggctttgcaccttcaccaggatcccaacagtccggatatggcggaggccttggagctggcctggggggatacggtgcgcctggcgtggctgggttaggggtcccgggatccccctcatttctgaatggatcaacagccactagtccctttgccattatgccctcttcacccccactcgcagccgcttcatccatgtccctgcccgctgctgccccaaccacttctgtgttctctttcagcccggtgaacatgatctcagctgttaagcagcgcagtgcattcgccccagtcctgaggcccccttcctcccctcctcaggcctgtccccgtgctcatggagagggactgcccgaccaatcgttcgaagactccgataaatttcactctccagcaaggggtctccaggggttggcatattcgtag

SEQ ID NO: 276935 - DNA, 555 bp, Artificial Sequence
  derived and/or modified sequence
agaggcagcgtgcagcacccccccgtggtgggcatcaacgccttcagcagccccctggccatcgccgtgggcgacgccacccccggccccgagcccggctacgccagaagctgcagcagcgccagccccagaggcttcgcccccagccccggcagccagcagagcggctacggcggcggcctgggcgccggcctgggcggctacggcgcccccggcgtggccggcctgggcgtgcccggcagccccagcttcctgaacggcagcaccgccaccagccccttcgccatcatgcccagcagcccccccctggccgccgccagcagcatgagcctgcccgccgccgcccccaccaccagcgtgttcagcttcagccccgtgaacatgatcagcgccgtgaagcagagaagcgccttcgcccccgtgctgagaccccccagcagccccccccaggcctgccccagagcccacggcgagggcctgcccgaccagagcttcgaggacagcgacaagttccacagccccgccagaggcctgcagggcctggcctacagctag

SEQ ID NO: 276936 - DNA, 1400 bp, Artificial Sequence
  derived and/or modified sequence
cgaggctctgtacagcaccccccggtcgtgggcatcaacgccttcagcagcccgctggccatcgccgtcggggacgccaccccggggcccgagccgggctacgcgcgcagctgcagcagcgcgtccccccgcgggttcgcgcccagccccggctcgcagcagagcggctacggcggcggcctcggagctggcctgggcggctacggcgcgccgggcgtggccggcctcggcgtgcctgggtcccccagcttcctcaatggctccaccgccacctcgcccttcgccatcatgccctctagccccccgctggcggctgcctcctccatgtccctcccggccgctgcccccaccaccagcgtgttctccttctcgcctgtcaacatgatctccgccgtcaaacagaggagcgccttcgcccccgtgctgcgccccccaagctccccaccccaggcctgccccagagcccacggagaggggcttccagaccagtcttttgaggattctgacaagtttcactctccagcccgggggcttcagggcctggcatactcctaattacggtctgcagctgttcccatggagcccggactggaggtccctctgggattcacagccacaccccggatggtggcacagacagatgcagggccagggccatgggcggacctcaacccgtgagctgaacggggagaggccttcaccccatgctcaagcctccccgctagcagccccacaggcttctctcgcctccctgtcttggggtagtcagaagccccagcactgtgcagatgctcttggcaggacagcatcgcagggaggtgctgggattctgggcctcactgtctgggtcttggttcctctgaaagagatggatcttgtgcagaccagggttgttgagtgaggggagcgtgggatggggaccgtgggaaagaggacagctcagggagaagtgacctggaaaggtcctgtttgcatctgacccatctcaactggcccagcatcccaacttctctgcagcgaaagggtggcgccccgcagcctcgggaggcctgcccaggctcccgtggagcttccaacagctgcttggccccgcagctgcccccacttcctttgagacctgcactctcatgcttgccgcatcatgcctccctgtgggggctttgggcatggaggaggcagaagagggggtgccaggcctcctgtatttggggtcttcccccagtggatgtctcatggactctggccccacacactcacaatgactctggctggccccacgcagcgggcccagccgccccccaggtggcctcacattctgctctgctaagtttggagaaaacagaacaataaaccagatgcaggtggtgcccgcccggcctctcacctgcctccttggtgtg

SEQ ID NO: 276937 - protein, 48 aa, Artificial Sequence
  derived and/or modified sequence
MESGAVLLESKSSPFNLLHEMHELRLLGHLCDVTVSVEYQGVRKDFMA

SEQ ID NO: 276938 - DNA, 147 bp, Artificial Sequence
  derived and/or modified sequence
atggaatccggagccgtcctgctggagagtaagtccagcccctttaatctgctccacgaaatgcacgagttacggctgttggggcatctgtgtgatgttacagtgtcagtagagtaccagggagtgcgaaaggactttatggcctag

SEQ ID NO: 276939 - DNA, 795 bp, Artificial Sequence
  derived and/or modified sequence
ggacctgcgcgtctcggggatgcgggagcgggggcagggggcggcccgagggcctgatccacgcggccccggatgcccgcgtcgggaggcggcgcgtcgggccgaggaggggcttctctgtggctgcagtagtttgttctctgggtcgtctttggagtggccgagcggcgtccgggcgctggggcggccaagtggcgcgggaagggtgggaggtgccgtgagggcggcgaggacagcggcggatttaagccccactggaaaccccggcccttgtggccgtggactgggctgcgggtagcagcgtctcctggaagggctctggccccgtgagcctcggggattcaggggccgccgacgttggtgcagatgccgggcgcactgggaggcggccggaatgccaatgagattcggcggatacgcagctgtcaccggccgcagactgccctgtcgccacctccagtgcctgcactccagtagccaagcaacataggaaatcgcgctcagaacccactttgttgattgagaaatcagacacgttgaatccgaggtgacatctgtggtctggccgaaggaggctagaaggaaggcatgtgctttggatggatggaaacaggaatcaaagaggaagctgtttttggaaggaagaaagatggaaagcggtgcagttctgctggaatccaaatcctccccatttaacctactgcatgagatgcatgagcttcgcctcctgggtcacctgtgtgacgtgacagtcagcgtggagtatcagggtgtccgcaaagacttcatggccca

SEQ ID NO: 276940 - DNA, 147 bp, Artificial Sequence
  derived and/or modified sequence
atggagagcggggctgtgctgctggagagcaagagcagccccttcaacctgctgcacgagatgcatgagctgcggctgctgggccacctgtgtgatgtgacagtgtctgtggagtaccagggcgtgaggaaggacttcatggcctag

SEQ ID NO: 276941 - DNA, 147 bp, Artificial Sequence
  derived and/or modified sequence
atggagagcggcgccgtgctgctggagagcaagagcagccccttcaaccttctgcacgagatgcacgagcttagattgctgggccatctgtgcgatgtgactgtgagcgttgaataccagggggtcagaaaagacttcatggcttag

SEQ ID NO: 276942 - DNA, 147 bp, Artificial Sequence
  derived and/or modified sequence
atggagagcggggctgtgcttctggagagtaaaagcagcccattcaatctgctgcatgaaatgcatgaactacgcttactcggtcacttgtgcgacgtgacagtatctgtggaataccagggagtgcgtaaagacttcatggcgtag

SEQ ID NO: 276943 - DNA, 147 bp, Artificial Sequence
  derived and/or modified sequence
atggagagcggcgccgtgctgctggagagcaagagcagccccttcaacctgctgcacgagatgcacgagctgagactgctgggccacctgtgcgacgtgaccgtgagcgtggagtaccagggcgtgagaaaggacttcatggcctag

SEQ ID NO: 276944 - protein, 653 aa, Artificial Sequence
  derived and/or modified sequence
MAFRDVAVDFTQDEWRLLSPAQRTLYREVMLENYSNLVSLGISFSKPELITQLEQGKETWREEKKCSPATCPDPEPELYLDPFCPPGFSSQKFPMQHVLCNHPPWIFTCLCAEGNIQPGDPGPGDQEKQQQASEGRPWSDQAEGPEGEGAMPLFGRTKKRTLGAFSRPPQRQPVSSRNGLRGVELEASPAQSGNPEETDKLLKRIEVLGFGTVNCGECGLSFSKMTNLLSHQRIHSGEKPYVCGVCEKGFSLKKSLARHQKAHSGEKPIVCRECGRGFNRKSTLIIHERTHSGEKPYMCSECGRGFSQKSNLIIHQRTHSGEKPYVCRECGKGFSQKSAVVRHQRTHLEEKTIVCSDCGLGFSDRSNLISHQRTHSGEKPYACKECGRCFRQRTTLVNHQRTHSKEKPYVCGVCGHSFSQNSTLISHRRTHTGEKPYVCGVCGRGFSLKSHLNRHQNIHSGEKPIVCKDCGRGFSQQSNLIRHQRTHSGEKPMVCGECGRGFSQKSNLVAHQRTHSGERPYVCRECGRGFSHQAGLIRHKRKHSREKPYMCRQCGLGFGNKSALITHKRAHSEEKPCVCRECGQGFLQKSHLTLHQMTHTGEKPYVCKTCGRGFSLKSHLSRHRKTTSVHHRLPVQPDPEPCAGQPSDSLYSL

SEQ ID NO: 276945 - DNA, 2718 bp, Artificial Sequence
  derived and/or modified sequence
cgccgagcatcctgggaggtgtggtccgggcgctgtgccgaggattcggggtagtgtagtcctggcgccccgctggaggagctccccagctggtggctggagcgaccccttgttctttggtggcgctgatctaccttctgagatatcatccttcttcagggagataaggaaaaaaagccacagggtcccggagagccaggggaatgcttcaaaagttctgctgcctgagagtaacgtcacagtaatggaacgggaagattctggaatctgtgtccccacctagacaacgattatactggcaggatctatcaggtgtacctattttggaactctggagtctagttgaaggcctccagttcccagggggaaggaagcatggaggtgtgtcctccatttggaagtagtgctaagaaaattaaaagaataaaactgggcaggggcatgagaataggatgcaaagatgaatttttggactgagtggccaagaagctccatggtgagcactcacagtctaaggctggaagtttaatgaactgttttctacatttcacaggcacacatggcattcagggatgtggctgtggatttcacccaggatgagtggaggctgctgagccctgctcaaaggactctgtacagagaggtgatgctggagaactacagcaacctggtctcactgggaatttcattttctaaaccagaactcatcacccagctggagcaagggaaagagacctggagagaggaaaaaaaatgttcaccggcaacctgtccagatccagagccagagctctacctcgatcctttctgccctccgggtttctccagtcagaaattccccatgcagcatgtgctgtgtaatcatcccccctggatcttcacatgcttgtgtgcagaaggtaacatccagcctggggatccgggcccaggggaccaggagaagcagcaacaagcctctgaggggagaccctggagtgatcaagcagaaggtcctgagggagaaggtgccatgcctttgtttggaagaaccaagaaaaggactctgggagcgttctccaggccaccccagaggcagccagtcagctctcggaacggcctcagaggggtggagttagaagccagcccagctcagacagggaaccctgaggaaacagacaaattgttgaagaggatagaagtcttaggatttggaacagtcaactgtggagagtgtggactgagcttcagcaagatgacaaacctgctcagtcaccagcggatacactcaggggagaagccctacgtgtgtggggtatgtgagaagggcttcagcctaaagaagagcctcgccagacaccagaaggcacactcgggggagaagccaattgtgtgcagggagtgtggacgaggctttaaccggaagtcaacgctaatcatacacgaacggacacactccggtgagaaaccttacatgtgcagtgagtgtgggcgaggcttcagccagaagtcaaacctcatcatacaccagaggacacactcaggggaaaagccttacgtgtgccgggaatgtggcaaaggcttcagccagaagtcagctgtcgtgagacaccagaggacacacttggaggagaagaccatcgtgtgcagtgactgtggcctgggcttcagcgacaggtcaaacctcatctcccaccagaggacgcactctggggagaagccctacgcctgcaaggagtgtgggcgatgcttcaggcagaggaccacccttgtcaaccaccagaggacacactcaaaggagaagccctatgtgtgcggggtgtgtgggcacagcttcagccagaattcaaccctcatctctcacaggcggacacacactggggagaagccgtatgtttgtggggtgtgtgggcgaggctttagtctcaagtcacacctcaacagacaccagaacatacactcaggagagaagcccattgtgtgcaaggactgtggccggggcttcagccagcaatccaacctcatcagacaccagaggacgcactcaggcgagaagcccatggtgtgtggggagtgcgggcgaggcttcagccagaagtcaaaccttgttgcacaccagaggacgcactcaggggagaggccgtatgtgtgccgagagtgcgggcgaggctttagccaccaggccggtctcatcaggcacaagcggaagcactcgagggagaagccctacatgtgcaggcagtgtggactgggctttggcaataagtcagctctaattacacacaagcgggctcactcggaagagaagccttgtgtgtgcagagagtgtggccaaggctttctccaaaagtcacacctcaccttacatcaaatgacacatacgggggagaagccatatgtgtgcaagacgtgtgggcggggcttcagcctcaagtctcacctcagcagacacaggaagaccacgtctgtccaccacagactgccagtgcagcccgaccctgagccgtgtgcagggcaaccttcggattccttatactctctctgaaggcaaagatggggacaaggactaagagtcagaatgttgacactttgatgaaatggagtagagaaatgcattctgtaagtggtcaaaggacatttgactgtttactttctccacactaagtcttctccatgttttgtggccttcggttgtaataaacttggcttctttatacatctgtaaaaaaaaaaaaaaaaaaa

SEQ ID NO: 276946 - DNA, 1962 bp, Artificial Sequence
  derived and/or modified sequence
atggccttcagagacgtggccgtggacttcacccaggacgagtggagactgctgagccccgcccagagaaccctgtacagagaggtgatgctggagaactacagcaacctggtgagcctgggcatcagcttcagcaagcccgagctgatcacccagctggagcagggcaaggagacctggagagaggagaagaagtgcagccccgccacctgccccgaccccgagcccgagctgtacctggaccccttctgcccccccggcttcagcagccagaagttccccatgcagcacgtgctgtgcaaccaccccccctggatcttcacctgcctgtgcgccgagggcaacatccagcccggcgaccccggccccggcgaccaggagaagcagcagcaggccagcgagggcagaccctggagcgaccaggccgagggccccgagggcgagggcgccatgcccctgttcggcagaaccaagaagagaaccctgggcgccttcagcagacccccccagagacagcccgtgagcagcagaaacggcctgagaggcgtggagctggaggccagccccgcccagagcggcaaccccgaggagaccgacaagctgctgaagagaatcgaggtgctgggcttcggcaccgtgaactgcggcgagtgcggcctgagcttcagcaagatgaccaacctgctgagccaccagagaatccacagcggcgagaagccctacgtgtgcggcgtgtgcgagaagggcttcagcctgaagaagagcctggccagacaccagaaggcccacagcggcgagaagcccatcgtgtgcagagagtgcggcagaggcttcaacagaaagagcaccctgatcatccacgagagaacccacagcggcgagaagccctacatgtgcagcgagtgcggcagaggcttcagccagaagagcaacctgatcatccaccagagaacccacagcggcgagaagccctacgtgtgcagagagtgcggcaagggcttcagccagaagagcgccgtggtgagacaccagagaacccacctggaggagaagaccatcgtgtgcagcgactgcggcctgggcttcagcgacagaagcaacctgatcagccaccagagaacccacagcggcgagaagccctacgcctgcaaggagtgcggcagatgcttcagacagagaaccaccctggtgaaccaccagagaacccacagcaaggagaagccctacgtgtgcggcgtgtgcggccacagcttcagccagaacagcaccctgatcagccacagaagaacccacaccggcgagaagccctacgtgtgcggcgtgtgcggcagaggcttcagcctgaagagccacctgaacagacaccagaacatccacagcggcgagaagcccatcgtgtgcaaggactgcggcagaggcttcagccagcagagcaacctgatcagacaccagagaacccacagcggcgagaagcccatggtgtgcggcgagtgcggcagaggcttcagccagaagagcaacctggtggcccaccagagaacccacagcggcgagagaccctacgtgtgcagagagtgcggcagaggcttcagccaccaggccggcctgatcagacacaagagaaagcacagcagagagaagccctacatgtgcagacagtgcggcctgggcttcggcaacaagagcgccctgatcacccacaagagagcccacagcgaggagaagccctgcgtgtgcagagagtgcggccagggcttcctgcagaagagccacctgaccctgcaccagatgacccacaccggcgagaagccctacgtgtgcaagacctgcggcagaggcttcagcctgaagagccacctgagcagacacagaaagaccaccagcgtgcaccacagactgcccgtgcagcccgaccccgagccctgcgccggccagcccagcgacagcctgtacagcctgtag

SEQ ID NO: 276947 - DNA, 1962 bp, Artificial Sequence
  derived and/or modified sequence
atggctttcagggacgtggctgtcgatttcacacaggatgagtggcgattactctctccggcacagcgtactctgtacagggaagtcatgctggaaaattatagtaacctggttagcttaggaatcagcttcagcaagcctgaactcatcacacagctcgagcagggcaaggagacttggcgcgaagaaaagaagtgttcgcccgcaacctgcccagatcccgagccggaactgtacctggacccattttgcccacctggattcagctcccaaaagtttcctatgcagcacgttctgtgtaatcatcccccttggatcttcacgtgtctctgtgctgaagggaatattcaacccggagatccaggaccaggagaccaggaaaaacaacagcaggcgtccgaaggccgtccatggagcgaccaagctgaggggcctgagggcgagggtgcgatgcctctgttcggacggaccaagaaacgcaccttgggggctttctccaggccgccccagcggcagcccgtctcctccagaaacggactcagaggggtcgagctcgaagcaagtcccgctcagtccggaaacccggaggagaccgacaaactcctcaagcgtattgaggtgcttggatttggaactgtcaactgcggagagtgtggactgtcttttagtaagatgaccaatctcttgagccaccagaggatccactccggagagaagccttacgtgtgcggcgtgtgtgagaagggattcagcttgaagaaatcccttgcgagacatcagaaagctcattccggcgagaaacccatcgtgtgtagggagtgtgggcgggggtttaatcgcaagtccacgctgattatacacgaacgcacccactccggagagaaaccatatatgtgttcagagtgtgggcgcggcttttcacaaaaaagcaatctcattatacaccagagaacccactccggggaaaaaccttatgtatgccgagaatgcggtaaaggattttctcagaagtcagccgttgtgagacaccagcggacccacctggaggagaagactattgtctgtagtgattgtggcctgggcttctcagatagatcgaacctgatcagccatcaaaggacacatagcggggagaaaccctatgcctgtaaagagtgcggtcgctgctttaggcagcggactacactcgtcaatcatcagcgcactcattccaaggagaagccctatgtgtgtggggtttgcggccactcgttctcgcagaatagtacgctcatatcgcacagacgtacccacactggcgaaaaaccttatgtctgcggagtgtgtggacgaggcttcagtctgaaaagccacttaaaccgacatcaaaacatacactcaggtgaaaagccgatcgtttgcaaagattgcgggaggggtttttcccagcaatccaacctgatccggcaccagcgcactcactccggtgagaagcccatggtctgtggtgagtgtggtcggggtttcagccagaaaagcaatctcgtggctcatcagcgaacacatagcggagagcggccctatgtgtgccgggagtgcggacgaggattttcgcatcaggctggactcatcaggcacaaaaggaagcattcacgcgagaagccttacatgtgccggcaatgcgggttaggcttcggaaacaaatcagcactcattacacacaaacgagcccatagcgaggaaaagccttgtgtgtgtcgcgaatgcggccagggctttttgcaaaaatctcacctgacccttcaccagatgacccatacaggcgagaagccatatgtgtgtaaaacttgtggcaggggattctctttgaagtctcacctgtcaaggcatagaaagactacctccgtgcatcacaggctacccgtccaaccagaccccgaaccatgtgccggtcagccatccgatagcctgtatagtctgtag

SEQ ID NO: 276948 - DNA, 1962 bp, Artificial Sequence
  derived and/or modified sequence
atggccttcagagatgtggccgtggacttcacccaggatgagtggaggctgctgagccctgcccagaggaccctgtaccgggaggtgatgctggagaactacagcaacctggtgtccctgggcatctccttcagcaagccagagctgatcacccagctggagcagggcaaggagacctggagggaggagaagaagtgcagccctgccacctgcccagaccctgagcctgagctgtacctggaccccttctgccccccaggcttcagcagccagaagttccccatgcagcacgtgctgtgcaaccaccccccctggatcttcacctgcctgtgtgccgagggcaacatccagcccggggaccccggccctggggaccaggagaagcagcagcaggccagcgagggccggccctggagcgaccaggccgagggccctgagggggagggcgccatgcccctgtttggccgcaccaagaagaggaccctgggcgccttcagccggcccccccagaggcagcctgtgagcagcagaaatggcctgcggggcgtggagctggaggccagccctgcccagagcggcaaccctgaggagacagacaagctgctgaagagaattgaggtgctgggcttcggcaccgtgaactgtggagaatgtggcctgtccttcagcaagatgaccaacctgctgagccaccagaggatccacagcggggagaagccctacgtgtgtggggtgtgtgagaagggcttcagcctgaagaagagcctggcccggcaccagaaggcccacagcggggagaagcccatcgtgtgcagagaatgtggccggggcttcaacaggaagagcaccctcatcatccacgagaggacccacagcggggagaagccctacatgtgcagtgaatgtggccggggcttcagccagaagagcaacctgatcatccaccagaggacccacagcggggagaagccctacgtgtgcagagaatgtgggaagggcttcagccagaagtctgctgtggtgcgccaccagaggacccacctggaggagaagaccatcgtgtgcagcgactgtggcctgggcttcagtgacaggagcaacctgatcagccaccagaggacccacagcggggagaagccctatgcctgcaaggaatgtggccgctgcttccggcagaggaccaccctggtgaaccaccagaggacccacagcaaggagaagccctacgtgtgtggggtgtgtggccacagcttcagccagaacagcaccctcatcagccacaggaggacccacactggagagaagccctacgtgtgtggggtgtgtggccggggcttcagcctgaagagccacctgaacagacaccagaacatccacagcggggagaagcccatcgtgtgcaaggactgtggccggggcttcagccagcagagcaacctgatccgccaccagaggacccacagcggggagaagcccatggtgtgtggagaatgtggccggggcttcagccagaagagcaacctggtggcccaccagaggacccacagcggggagcggccctacgtgtgcagagaatgtggccggggcttcagccaccaggccggcctcatccgccacaagaggaagcacagccgggagaagccctacatgtgccggcagtgtggcctgggcttcggcaacaagagcgccctgatcacccacaagagggcccacagcgaggagaagccctgtgtgtgcagagaatgtggccagggcttcctgcagaagagccacctgaccctgcaccagatgacccacactggagagaagccctacgtgtgcaagacctgtggccggggcttcagcctgaagagccacctgagccgccacaggaagaccacctctgtgcaccaccggctgcctgtgcagcctgaccctgagccctgtgccggccagcccagcgacagcctgtacagcctgtag

SEQ ID NO: 276949 - DNA, 1962 bp, Artificial Sequence
  derived and/or modified sequence
atggccttccgggacgtggccgtggacttcacccaggacgagtggaggcttctgtccccagcacaacggaccctatatagggaagtcatgctggaaaattactctaatctggtaagcctggggattagtttttcgaaacccgagctaatcacccagttggagcagggcaaggagacatggagagaagaaaaaaaatgctccccggccacctgcccggaccccgaaccagagctgtatctcgaccccttttgtcctccggggttttcctcgcaaaaattccccatgcagcacgtactgtgtaatcacccaccttggatcttcacctgcttgtgtgccgaaggcaatatacagcccggcgatcccggcccaggcgaccaggaaaaacagcagcaggcctctgaaggtagaccatggtctgaccaagccgagggacccgagggagaaggggcaatgccactctttggacgaactaaaaaaaggacactgggagcatttagtagacccccacagagacagcccgtgagcagtcggaacggcttgcgcggcgtcgaattagaggctagccccgcacagtccggtaaccctgaggagacggataagctcttgaagcggatcgaagtcctggggttcggcaccgtgaactgtggagaatgcggcctgtcctttagtaagatgacaaatctgctttctcaccagagaatacattcaggagagaagccatacgtctgcggggtgtgtgaaaaaggattctccctgaaaaaaagcctggcaagacatcaaaaagcccacagcggggaaaagcctattgtatgcagagagtgtggacgtgggttcaacaggaaatcaacactgatcatccacgaaaggacgcactccggtgagaaaccttatatgtgctctgaatgcgggaggggtttctctcagaaaagtaaccttataatacaccagagaacacattctggcgagaaaccatatgtgtgcagagagtgtggaaagggcttctcccaaaagtccgcagtggttcgtcaccagcgaacacatctggaggaaaaaactatcgtttgctccgattgtggcctgggcttcagcgaccgatcaaacctgatctcccaccagaggacacactcgggtgagaagccctacgcctgtaaagaatgcggtaggtgttttagacaaagaaccactctcgttaaccatcagaggactcatagtaaggagaagccttatgtctgcggtgtttgcggtcattcattctcacagaactcaactctaatctcacatcgtcgcacacacaccggtgagaaaccctacgtttgcggtgtgtgcgggagaggattttctctcaagagccacctgaaccgccaccagaacattcactctggcgaaaaaccaattgtctgcaaggactgcggcaggggattttcccaacagtcgaacctcatccgccatcaacgtactcattctggcgagaagcccatggtctgtggggaatgcgggagaggattcagccaaaaaagcaacctcgtcgcacaccagagaacccacagcggggagcggccctatgtttgcagggaatgcggtcgagggttttcccatcaggccggactgattaggcacaaacgtaaacattctcgggagaaaccctatatgtgtcggcagtgcgggttaggttttggtaacaagtcggccctgattacccacaaacgcgcacattccgaggaaaagccttgtgtatgtagggaatgtggtcaggggttcctgcagaagtcccacctcaccctccaccaaatgactcacacaggtgaaaagccatacgtatgtaaaacttgcggccgaggcttttctcttaagagccatctttcccggcaccggaaaacaacatccgtgcaccatcgcctgcctgtgcagcccgatcctgaaccttgcgcaggccaaccttctgattcgctgtactcactgtag

SEQ ID NO: 276950 - DNA, 1962 bp, Artificial Sequence
  derived and/or modified sequence
atggcttttagagacgtcgcagtggatttcactcaggacgaatggagactcttgtctcctgctcaaagaacactgtatagggaggtgatgttggagaactattcaaatctggtttctttgggtatcagtttctcaaagcctgaactaatcactcagctggaacagggtaaagagacctggagggaggaaaaaaagtgtagcccagccacttgccctgaccctgagcccgaactctatctagacccattttgccctccaggctttagctctcaaaagtttcccatgcaacacgttctgtgcaatcatcctccatggattttcacttgtctgtgtgccgaaggtaatatacagcctggtgaccccggacccggagaccaggagaagcagcaacaggcctcggaaggccgaccttggagcgatcaagctgagggccctgagggcgagggagcaatgcccttgtttggtcgtactaaaaaaagaaccctgggggctttctcaagacccccacagaggcagccggttagcagccggaacggtttaaggggagttgagttggaagcatcacccgcacagtctggaaatccagaggaaaccgacaagcttctgaagagaattgaggttctcggattcggcacagtgaattgcggcgagtgcgggcttagcttcagcaagatgacgaacttactgtcccaccaacgaattcacagcggggagaaaccttacgtctgcggagtatgtgagaagggattttcattgaagaagtccttagctaggcaccagaaggctcactccggcgaaaaaccaatagtgtgcagggaatgtggaagggggttcaacagaaaatcaaccctcataattcatgagcggacccatagtggagaaaaaccatacatgtgctcagaatgtgggaggggcttcagtcagaaatccaacctgatcatccatcaaaggactcacagtggggaaaagccttatgtctgtcgtgaatgcggtaaggggttctctcagaaaagcgctgtggtgagacatcagaggacacacctggaggaaaaaaccatcgtgtgcagcgactgcgggttaggcttttcagatcggtctaaccttatctcacatcaacggacccattctggtgaaaagccctatgcgtgcaaggagtgcggcaggtgttttaggcagcgaacgactctcgtcaaccaccagaggacacactccaaagagaaaccctatgtctgcggagtgtgtgggcacagcttcagccagaattcaactcttataagccaccgcagaacccacacaggcgagaagccatatgtctgtggagtgtgtggacgtggattctctctcaagtcccatcttaatcgccaccagaacatccactctggtgagaagcccatcgtttgtaaagactgcgggaggggattctcacagcagtcaaatctcatccgccatcagcgtacccactctggagaaaagccaatggtgtgcggggaatgcggcagagggttttcccagaagtcaaatctggtggctcaccaacgcacacattccggagaacggccttacgtttgtcgggagtgcgggagagggtttagccatcaggcaggcctgatcagacataagcggaagcacagccgcgaaaaaccttatatgtgtaggcagtgcggcctgggcttcggcaacaagtccgctctgattacccataaacgcgcacacagcgaagaaaagccctgcgtctgtagagaatgtggccaggggttcctgcagaaaagccacctgaccttgcatcagatgactcacacaggcgagaaaccttacgtctgcaagacctgcggccgtgggttctcactcaagtcccacctctctagacatagaaagacaacttccgtacatcacagattgcctgttcaaccggaccctgagccatgcgccggtcaaccttcggactctctctactctctatag

SEQ ID NO: 276951 - DNA, 2701 bp, Artificial Sequence
  derived and/or modified sequence
cgccgagcatcctgggaggtgtggtccgggcgctgtgccgaggattcggggtagtgtagtcctggcgccccgctggaggagctccccagctggtggctggagcgaccccttgttctttggtggcgctgatctaccttctgagatatcatccttcttcagggagataaggaaaaaaagccacagggtcccggagagccaggggaatgcttcaaaagttctgctgcctgagagtaacgtcacagtaatggaacgggaagattctggaatctgtgtccccacctagacaacgattatactggcaggatctatcaggtgtacctattttggaactctggagtctagttgaaggcctccagttcccagggggaaggaagcatggaggtgtgtcctccatttggaagtagtgctaagaaaattaaaagaataaaactgggcaggggcatgagaataggatgcaaagatgaatttttggactgagtggccaagaagctccatggtgagcactcacagtctaaggctggaagtttaatgaactgttttctacatttcacaggcacacatggcattcagggatgtggctgtggatttcacccaggatgagtggaggctgctgagccctgctcaaaggactctgtacagagaggtgatgctggagaactacagcaacctggtctcactgggaatttcattttctaaaccagaactcatcacccagctggagcaagggaaagagacctggagagaggaaaaaaaatgttcaccggcaacctgtccagatccagagccagagctctacctcgatcctttctgccctccgggtttctccagtcagaaattccccatgcagcatgtgctgtgtaatcatcccccctggatcttcacatgcttgtgtgcagaaggtaacatccagcctggggatccgggcccaggggaccaggagaagcagcaacaagcctctgaggggagaccctggagtgatcaagcagaaggtcctgagggagaaggtgccatgcctttgtttggaagaaccaagaaaaggactctgggagcgttctccaggccaccccagaggcagccagtcagctctcggaacggcctcagaggggtggagttagaagccagcccagctcagtcagggaaccctgaggaaacagacaaattgttgaagaggatagaagtcttaggatttggaacagtcaactgtggagagtgtggactgagcttcagcaagatgacaaacctgctcagtcaccagcggatacactcaggggagaagccctacgtgtgtggggtatgtgagaagggcttcagcctaaagaagagcctcgccagacaccagaaggcacactcgggggagaagccaattgtgtgcagggagtgtggacgaggctttaaccggaagtcaacgctaatcatacacgaacggacacactccggtgagaaaccttacatgtgcagtgagtgtgggcgaggcttcagccagaagtcaaacctcatcatacaccagaggacacactcaggggaaaagccttacgtgtgccgggaatgtggcaaaggcttcagccagaagtcagctgtcgtgagacaccagaggacacacttggaggagaagaccatcgtgtgcagtgactgtggcctgggcttcagcgacaggtcaaacctcatctcccaccagaggacgcactctggggagaagccctacgcctgcaaggagtgtgggcgatgcttcaggcagaggaccacccttgtcaaccaccagaggacacactcaaaggagaagccctatgtgtgcggggtgtgtgggcacagcttcagccagaattcaaccctcatctctcacaggcggacacacactggggagaagccgtatgtttgtggggtgtgtgggcgaggctttagtctcaagtcacacctcaacagacaccagaacatacactcaggagagaagcccattgtgtgcaaggactgtggccggggcttcagccagcaatccaacctcatcagacaccagaggacgcactcaggcgagaagcccatggtgtgtggggagtgcgggcgaggcttcagccagaagtcaaaccttgttgcacaccagaggacgcactcaggggagaggccgtatgtgtgccgagagtgcgggcgaggctttagccaccaggccggtctcatcaggcacaagcggaagcactcgagggagaagccctacatgtgcaggcagtgtggactgggctttggcaataagtcagctctaattacacacaagcgggctcactcggaagagaagccttgtgtgtgcagagagtgtggccaaggctttctccaaaagtcacacctcaccttacatcaaatgacacatacgggggagaagccatatgtgtgcaagacgtgtgggcggggcttcagcctcaagtctcacctcagcagacacaggaagaccacgtctgtccaccacagactgccagtgcagcccgaccctgagccgtgtgcagggcaaccttcggattccttatactctctctgaaggcaaagatggggacaaggactaagagtcagaatgttgacactttgatgaaatggagtagagaaatgcattctgtaagtggtcaaaggacatttgactgtttactttctccacactaagtcttctccatgttttgtggccttcggttgtaataaacttggcttctttatacatctgtaa

SEQ ID NO: 276952 - DNA, 1965 bp, Artificial Sequence
  derived and/or modified sequence
atggccttcagagacgtggccgtggacttcacccaggacgagtggagactgctgagccccgcccagagaaccctgtacagagaggtgatgctggagaactacagcaacctggtgagcctgggcatcagcttcagcaagcccgagctgatcacccagctggagcagggcaaggagacctggagagaggagaagaagtgcagccccgccacctgccccgccgaccccgagcccgagctgtacctggaccccttctgcccccccggcttcagcagccagaagttccccatgcagcacgtgctgtgcaaccaccccccctggatcttcacctgcctgtgcgccgagggcaacatccagcccggcgaccccggccccggcgaccaggagaagcagcagcaggccagcgagggcagaccctggagcgaccaggccgagggccccgagggcgagggcgccatgcccctgttcggcagaaccaagaagagaaccctgggcgccttcagcagacccccccagagacagcccgtgagcagcagaaacggcctgagaggcgtggagctggaggccagccccgcccagagcggcaaccccgaggagaccgacaagctgctgaagagaatcgaggtgctgggcttcggcaccgtgaactgcggcgagtgcggcctgagcttcagcaagatgaccaacctgctgagccaccagagaatccacagcggcgagaagccctacgtgtgcggcgtgtgcgagaagggcttcagcctgaagaagagcctggccagacaccagaaggcccacagcggcgagaagcccatcgtgtgcagagagtgcggcagaggcttcaacagaaagagcaccctgatcatccacgagagaacccacagcggcgagaagccctacatgtgcagcgagtgcggcagaggcttcagccagaagagcaacctgatcatccaccagagaacccacagcggcgagaagccctacgtgtgcagagagtgcggcaagggcttcagccagaagagcgccgtggtgagacaccagagaacccacctggaggagaagaccatcgtgtgcagcgactgcggcctgggcttcagcgacagaagcaacctgatcagccaccagagaacccacagcggcgagaagccctacgcctgcaaggagtgcggcagatgcttcagacagagaaccaccctggtgaaccaccagagaacccacagcaaggagaagccctacgtgtgcggcgtgtgcggccacagcttcagccagaacagcaccctgatcagccacagaagaacccacaccggcgagaagccctacgtgtgcggcgtgtgcggcagaggcttcagcctgaagagccacctgaacagacaccagaacatccacagcggcgagaagcccatcgtgtgcaaggactgcggcagaggcttcagccagcagagcaacctgatcagacaccagagaacccacagcggcgagaagcccatggtgtgcggcgagtgcggcagaggcttcagccagaagagcaacctggtggcccaccagagaacccacagcggcgagagaccctacgtgtgcagagagtgcggcagaggcttcagccaccaggccggcctgatcagacacaagagaaagcacagcagagagaagccctacatgtgcagacagtgcggcctgggcttcggcaacaagagcgccctgatcacccacaagagagcccacagcgaggagaagccctgcgtgtgcagagagtgcggccagggcttcctgcagaagagccacctgaccctgcaccagatgacccacaccggcgagaagccctacgtgtgcaagacctgcggcagaggcttcagcctgaagagccacctgagcagacacagaaagaccaccagcgtgcaccacagactgcccgtgcagcccgaccccgagccctgcgccggccagcccagcgacagcctgtacagcctgtag

SEQ ID NO: 276953 - DNA, 1965 bp, Artificial Sequence
  derived and/or modified sequence
atggcgttcagagatgtggcggtggacttcacacaagacgagtggcggcttctcagccctgctcagaggaccctgtacagagaggtgatgttagagaactactctaacctagtcagtctgggcatctctttcagcaagccagaattaatcacccaactagagcagggcaaggaaacatggcgggaggagaagaagtgtagcccagctacttgtcccgccgaccctgagcccgagctttatctggacccattttgccccccgggtttctcctcacagaaattcccgatgcagcatgtgttgtgcaatcacccaccctggatatttacctgcttgtgtgctgaggggaacatccagccaggcgaccctggcccaggcgatcaggaaaagcaacagcaggcttccgaaggacggccctggagcgaccaggctgagggccccgagggcgagggtgcgatgcccttatttggtcgcaccaaaaaacgaacgttgggcgctttcagccgtccgcctcagcgccaacccgtgtccagtcggaacggcctcaggggagtggagctagaggcctcacctgcacaaagcgggaatccagaagagaccgataagctcctgaaacggatcgaggtgctggggttcggaacggtaaattgtggggagtgtgggctgtctttctctaagatgacaaacctcctttcacatcagcgaatacacagcggagaaaagccatatgtctgtggcgtgtgcgaaaaaggtttctccttaaagaagtcgctcgctcgccaccagaaagcccactcgggcgagaaacccatagtgtgccgggagtgcggaagggggtttaaccgcaaatctactctgatcattcacgagcgtacccactcaggagaaaagccctacatgtgtagcgaatgcggcaggggtttcagtcagaagagcaatctgatcattcaccagaggacccattcaggggaaaagccctacgtctgcagggagtgcggcaaggggttttcccagaaaagtgccgttgtcagacatcaacgcacccaccttgaggaaaaaacgatcgtttgctcagactgtgggctcggcttttccgatagatcaaacctcatatctcatcagcgtacccattcaggagagaaaccttatgcatgtaaggaatgtggcagatgtttcaggcagcgcacaaccctggtaaatcaccagagaacgcactcaaaggagaaaccatatgtctgtggggtgtgcggacactccttcagtcagaattccacattaatcagtcaccgtcgcactcacaccggagagaagccttatgtttgcggagtttgcggacgcggatttagccttaaatctcatctgaataggcatcagaatatccacagcggcgaaaagccgattgtgtgtaaagactgcggcaggggcttttctcaacagtctaaccttattcgtcaccaacgcacacacagtggtgagaagcccatggtgtgcggagaatgcggaaggggcttctctcagaagtctaacttagtcgcacaccagagaacgcattccggagaaaggccgtacgtctgtagagagtgcggtcgcgggtttagccatcaggccggattgatcagacacaaacggaagcactcaagggagaaaccttacatgtgcaggcagtgtggactcggattcggaaataaatcagccctgattacgcataagcgcgctcattccgaggagaagccgtgcgtgtgccgagagtgcggccagggtttcctccaaaaatctcacttgaccctccaccagatgacccacactggtgagaaaccttatgtgtgcaagacctgcggtcggggattctcattgaagtcgcatttatcccgccatcgaaagactactagcgtgcatcaccggctcccagtgcagcctgaccctgagccctgtgctgggcagccctcagactcactgtatagtctgtag

SEQ ID NO: 276954 - DNA, 1965 bp, Artificial Sequence
  derived and/or modified sequence
atggcgttccgcgacgttgccgtggatttcacacaggacgagtggagactgctgtcccctgctcagagaacgctctacagagaggtaatgctcgagaattacagtaacctggtgtctctggggatatctttttctaagccagaactgattacccaattggagcaagggaaggagacgtggagagaagaaaagaagtgttctcctgccacatgtcctgccgacccagagccagagctgtatttagacccattctgtcctcctggattttctagccagaagttccccatgcaacacgtgctttgcaatcatcctccatggatttttacatgcctgtgcgccgagggcaatatacagccgggcgatcctggcccaggggaccaagaaaagcaacagcaggcatcagagggacgtccttggagtgatcaggctgagggtcctgagggtgaaggcgccatgccactgtttggccggactaagaagcggacgttgggcgctttttcaagacctcctcaacgccaacccgttagctccagaaatggtctgcgcggtgtggaactcgaagcttccccagcccagtctggtaatcccgaggaaactgacaagcttctaaaaaggattgaggtgctcggatttggtacagtcaattgtggcgaatgtggtctttcgtttagcaagatgacaaacctcctgagccaccagcgaattcatagtggagaaaaaccctatgtctgcggtgtgtgtgagaaaggtttctccctgaaaaagagtcttgctcgacatcagaaggctcactctggagaaaagccgatagtgtgcagagaatgtggaagagggttcaacagaaaatctactcttatcatccacgagcgaacccactcaggggaaaagccctacatgtgcagcgaatgtggcagggggttttcgcaaaagagcaatttgatcatacaccagcggacccatagtggagagaagccgtatgtctgccgggagtgtggaaaggggttctcccagaagtcggccgtcgtgcggcatcaacggacccatcttgaggaaaagactatcgtgtgctctgattgtggcttagggttcagcgacagatctaatctaatttctcatcagcgtacccacagtggagaaaaaccatacgcatgcaaagaatgcggccgttgctttcgccagcgaaccactcttgtcaatcaccagcgtactcactcgaaagaaaaaccctatgtctgtggagtgtgcggccacagcttctcccagaattccaccctgatttctcacaggcggacgcacaccggagagaaaccatatgtgtgcggagtctgtggtcggggctttagcctgaaatctcacctgaacagacaccaaaacatccatagtggcgagaaaccaatcgtatgcaaggattgcggaagggggttctcccagcagtcaaatttgatcagacaccagagaacccatagcggcgagaagcccatggtgtgtggagagtgtgggagagggtttagccaaaagtcaaaccttgttgctcatcagcggactcatagcggagagcgcccgtatgtgtgcagagaatgcgggcgggggttttctcaccaggccggattgatccgccacaaacggaaacattcccgcgaaaaaccttatatgtgtagacagtgtggcttgggctttggcaacaagtccgcacttataacacataagcgcgcccattccgaggagaagccttgcgtttgtagagagtgcggacaagggtttctgcaaaagtcccacctaacgctccaccagatgacgcacacaggcgaaaagccatacgtgtgcaagacctgcggcagggggttcagccttaaatcgcatctctctcggcatcgcaagactacatctgtgcaccatcgtctgcccgtgcaaccggacccagagccatgtgctggacagccaagcgactcgctgtatagcttgtag

SEQ ID NO: 276955 - DNA, 1965 bp, Artificial Sequence
  derived and/or modified sequence
atggccttcagagatgtggccgtggacttcacccaggatgagtggaggctgctgagccctgcccagaggaccctgtaccgggaggtgatgctggagaactacagcaacctggtgtccctgggcatctccttcagcaagccagagctgatcacccagctggagcagggcaaggagacctggagggaggagaagaagtgcagccctgccacctgcccagctgaccctgagcctgagctgtacctggaccccttctgccccccaggcttcagcagccagaagttccccatgcagcacgtgctgtgcaaccaccccccctggatcttcacctgcctgtgtgccgagggcaacatccagcccggggaccccggccctggggaccaggagaagcagcagcaggccagcgagggccggccctggagcgaccaggccgagggccctgagggggagggcgccatgcccctgtttggaagaaccaagaagaggaccctgggcgccttcagcaggcctccccagaggcagcctgtgagcagcagaaatggcctgcggggcgtggagctggaggccagccctgcccagagcggcaaccctgaggagacagacaagctgctgaagagaattgaggtgctgggctttggaacagtgaactgtggggagtgtggcctgtccttcagcaagatgaccaacctgctgagccaccagaggatccacagcggggagaagccctacgtgtgtggggtgtgtgagaagggcttcagcctgaagaagagcctggcccggcaccagaaggcccacagcggggagaagcccatcgtgtgccgggagtgtggccggggcttcaacaggaagagcaccctcatcatccacgagaggacccacagcggggagaagccctacatgtgcagtgaatgtggccggggcttcagccagaagagcaacctgatcatccaccagaggacccacagcggggagaagccctacgtgtgccgggagtgtgggaagggcttcagccagaagtctgctgtggtgcgccaccagaggacccacctggaggagaagaccatcgtgtgcagcgactgtggcctgggcttcagtgacaggagcaacctgatcagccaccagaggacccacagcggggagaagccctatgcctgcaaggaatgtggccgctgcttccggcagaggaccaccctggtgaaccaccagaggacccacagcaaggagaagccctacgtgtgtggggtgtgtggccacagcttcagccagaacagcaccctcatcagccacaggaggacccacactggagagaagccctacgtgtgtggggtgtgtggccggggcttcagcctgaagagccacctgaacagacaccagaacatccacagcggggagaagcccatcgtgtgcaaggactgtggccggggcttcagccagcagagcaacctgatccgccaccagaggacccacagcggggagaagcccatggtgtgtggggagtgtggccggggcttcagccagaagagcaacctggtggcccaccagaggacccacagcggggagcggccctacgtgtgccgggagtgtggccggggcttcagccaccaggccggcctcatccgccacaagaggaagcacagccgggagaagccctacatgtgccggcagtgtggcctgggctttggaaacaagagcgccctgatcacccacaagagggcccacagcgaggagaagccctgtgtgtgccgggagtgtggccagggcttcctgcagaagagccacctgaccctgcaccagatgacccacactggagagaagccctacgtgtgcaagacctgtggccggggcttcagcctgaagagccacctgagccgccacaggaagaccacctctgtgcaccaccggctgcctgtgcagcctgaccctgagccctgtgccggccagcccagcgacagcctgtacagcctgtag

SEQ ID NO: 276956 - DNA, 1965 bp, Artificial Sequence
  derived and/or modified sequence
atggccttccgggacgtggccgtggacttcacccaggacgagtggcgtctgctcagtcctgcccaacggacactttatagagaggtcatgctggagaactattccaatcttgtgtctttggggattagtttttctaaacctgagctgataactcagctggaacagggaaaggaaacctggagggaagagaaaaagtgcagtcctgccacgtgtcccgccgaccctgagccggaactgtacctagatcccttttgtcctccgggtttcagcagtcagaaattcccaatgcagcatgtgctctgcaaccatcctccttggatcttcacctgcctgtgcgccgaggggaatatacaacctggggaccctggtcctggggaccaagagaagcaacaacaggcctcagaaggacgcccatggtcagaccaagctgaaggtccagaaggcgagggtgccatgcctttgtttggcagaaccaagaaaaggaccctcggcgctttctcccggcccccacaaagacaacctgtgagcagccgtaatgggctgcgtggagttgaactggaggccagccccgctcaaagtggtaaccccgaagaaaccgataagttactaaagcggatagaggtgttggggttcggtactgtaaattgcggggagtgcggcctgtctttctccaagatgacgaacttactgagccaccagagaatccattccggggagaagccgtacgtttgcggtgtgtgcgagaaaggttttagtctgaaaaagtcactagctagacatcagaaggcccattcaggggagaagccaatagtgtgccgagaatgtggtagggggtttaaccggaagtctactctcataattcacgaacgcacacactccggggaaaagccctatatgtgttccgagtgcgggcgcgggtttagccagaaaagcaatctcatcatccaccagaggacccatagtggcgagaagccgtacgtttgcagggagtgcggaaaaggattttcccagaaatctgccgtggtgcggcaccagcgcacccacctggaagaaaaaacaatcgtgtgctcagattgcggtctggggttcagcgacaggtcaaacctgatttcacaccagcggacccactcgggcgaaaagccttatgcctgtaaagaatgcgggcgctgtttcagacagcgcactacactagttaatcaccagagaacgcactcaaaagagaaaccatacgtctgtggggtttgtgggcattccttctcacaaaacagcacactgatctcccatcgacgtacacacaccggtgagaagccatacgtgtgcggcgtctgtgggcgcggattttcactaaaatcccaccttaataggcatcaaaatattcattccggtgaaaaacccattgtttgcaaggactgcgggcggggcttctcccagcagtcgaatctcatccgccaccagcggacgcattctggggagaagcctatggtttgtggagagtgcggcaggggattcagccagaaatcaaacctcgtcgctcaccagaggacacattccggtgagagaccctacgtgtgtagggaatgcgggaggggattctcccaccaggccggcctaatccggcataagaggaaacactcaagggaaaagccttatatgtgtaggcagtgcggcttggggtttggaaataagagcgctctgatcacccataagcgtgctcatagcgaagagaaaccgtgtgtgtgtcgtgaatgcggtcaaggcttccttcagaaatcacacctcaccctgcaccagatgacacatacaggcgaaaaaccctatgtgtgcaagacctgcggccgagggttcagccttaagtcccacctttcccggcacaggaagaccacctctgtgcaccatagattacctgtgcagcccgacccagagccctgcgccgggcaaccctctgattcgctctactctctatag

SEQ ID NO: 276957 - DNA, 1965 bp, Artificial Sequence
  derived and/or modified sequence
atggccttccgggacgtggccgtggacttcacccaggacgagtggcgactcctcagcccagcgcagaggacactttatcgagaagtgatgctggagaattattcgaatttggtctcactggggataagtttttccaagcccgagctaatcactcaactcgagcagggaaaagagacatggcgggaagaaaagaagtgttccccagccacttgtcccgccgaccccgaacctgaattgtacctcgatcccttctgtcccccagggttttccagccaaaagttccctatgcaacacgtcctgtgtaaccacccaccatggatattcacatgcctgtgtgcggagggcaatatccagcctggcgaccctggcccgggggaccaagaaaaacagcagcaggcttccgagggacgcccgtggtctgatcaggcagagggccctgaaggggagggggctatgccactgttcgggcgcactaagaagagaaccttgggtgcttttagtcgccctccccagaggcaacccgtttcatcccggaatgggctgcgcggggtcgagctggaagcatctccagctcagagtgggaaccccgaagagacagataagcttcttaaaagaatagaggtcctgggctttgggacagttaactgcggggaatgcggcctgtcattttctaagatgactaatctactctcccatcaaagaatccactcaggagaaaagccatacgtgtgtggcgtgtgcgaaaagggcttcagccttaaaaaaagtttagcccggcaccaaaaagcccactccggcgaaaagcctatcgtttgccgcgagtgcggtaggggtttcaatcgcaagtccacgctgattatacacgagaggacccacagcggggagaagccctacatgtgttcagagtgtggccgaggctttagtcaaaaaagtaatttgattatccatcagagaacccactcgggcgagaagccatacgtttgtagggagtgtggcaaaggattcagccagaagagcgccgtcgtaaggcaccagcgaacccatttggaggagaaaaccattgtctgtagcgattgtggtcttggatttagcgacagaagcaacttgatctcccatcagcgcacgcacagtggagaaaaaccctatgcttgcaaggagtgcggtagatgctttcggcagcgcactactctggtaaatcaccagcgcacacactccaaggagaaaccctacgtttgtggcgtgtgcggccacagcttttcccagaacagcactttgatctcacatagaagaacgcacactggggagaagccttacgtgtgcggcgtctgcggcagaggattcagcctaaaatctcaccttaaccgccatcagaatattcacagcggagaaaaacccattgtctgcaaggactgtggaaggggcttctctcaacaatcgaatctcatccgacatcagcggactcacagtggcgagaaaccaatggtctgcggggagtgcggaagggggttctcacaaaaaagcaaccttgttgcacaccagcgcacacattcaggagaacggccttacgtgtgtcgcgagtgcgggcgcggcttcagccaccaggcagggttgatccggcataaaagaaaacattctagagagaagccttatatgtgccgtcaatgtggactggggttcggcaataaatctgctctgatcacccacaaacgggcccacagcgaggagaaaccctgtgtgtgccgcgagtgtggccagggcttcttgcagaagtctcatttgaccctccaccagatgactcacaccggggagaagccatatgtgtgcaagacctgcgggagaggctttagcctgaagagtcatctgtcccgacaccgcaaaacgacctctgttcaccaccggctgcctgtccagccagatcccgagccttgcgccggtcaaccatccgatagcctctattccctttag

SEQ ID NO: 276958 - DNA, 1965 bp, Artificial Sequence
  derived and/or modified sequence
atggcttttcgagatgtggccgtggatttcacccaagacgagtggcggttgctttcacccgctcagcggaccctttacagagaggtgatgctcgagaactatagtaacctcgtctccctcggaatttctttttccaaacccgagttgattacacagttagagcagggcaaggaaacttggcgggaagaaaagaagtgttcccccgctacatgtcctgcagatcccgaaccagaactctacctggatcctttctgtcccccagggttctcatctcagaagttccctatgcagcacgtcctatgtaatcacccaccatggatctttacctgtctctgtgccgagggcaacattcagccaggagaccctgggccaggtgaccaggagaagcaacaacaagcctctgaagggagaccttggagcgatcaggcagaggggcctgaaggtgagggagcaatgccgttgttcggacggacgaaaaagaggacgctgggggctttttctcgaccaccacagaggcagccagtttcatcccgaaacggactacggggtgtggaacttgaagcttctcctgctcagtccggaaatcctgaagaaaccgataagctcctgaagaggatcgaagttttggggtttggaaccgtcaactgtggcgaatgcggacttagcttctccaagatgacaaatttgcttagtcatcagagaatccatagcggagaaaagccctatgtttgcggtgtttgtgagaaggggttttccctgaaaaagtcattggcacggcatcagaaggcccacagtggcgagaaaccaattgtgtgtagggagtgtggaaggggatttaacaggaagagcaccctaatcatccacgagaggacccacagcggagagaagccctacatgtgctccgagtgcggtagggggttcagtcagaagtcaaacctgattattcaccagcgaactcattccggcgagaaaccgtacgtgtgtcgcgaatgcggcaagggattctcacagaaatccgccgtggtccggcaccaacgcactcacctggaggaaaagacgatcgtctgttcagattgcgggctcggattctctgataggagcaatctgatcagccaccagcggacacacagtggtgaaaaaccttatgcctgcaaggaatgcggcaggtgcttccgacagagaaccacactcgttaatcatcagcgcactcatagcaaggaaaaaccttatgtctgcggcgtctgtggccattctttctctcagaatagtactctgatatctcaccggagaacgcacacaggagagaaaccttatgtgtgcggagtgtgtgggaggggtttcagtttaaaatcccacttaaacaggcatcagaatatccacagtggcgaaaaaccaattgtgtgcaaagattgtggcagaggcttctcccagcagtcaaatctgatcagacaccaacggacccacagtggcgaaaagccaatggtgtgtggggagtgcgggagggggtttagtcaaaaaagcaatctcgtggcccaccaaagaactcattccggcgagaggccctatgtttgtcgcgaatgcggtcgtggctttagtcaccaggccggtctgattagacacaaaagaaaacactctagagagaagccatacatgtgccgccagtgcggactgggatttggtaataagagcgctctaataacacacaaaagagcccattccgaagagaagccctgtgtgtgtagggaatgcggtcagggcttcctgcagaagtcccaccttaccctgcatcagatgacccacactggcgaaaagccttatgtatgcaagacttgcggcaggggttttagcttaaaaagtcatctgtccaggcacaggaagactaccagcgtacaccatcggctgcccgtccagcccgatccagagccctgcgcaggccagccatcagatagtctttatagtctctag

SEQ ID NO: 276959 - DNA, 1965 bp, Artificial Sequence
  derived and/or modified sequence
atggctttccgcgatgtcgctgtggatttcacacaggacgagtggcgtctgctttctccggctcaacggacactgtacagggaagtgatgcttgaaaactacagcaatctggtctccctcggaatttcatttagcaagcccgagctcattacacaactggaacagggaaaggaaacatggagagaggagaagaagtgcagtcccgctacatgtcctgctgatcctgaaccagagttatatctcgacccgttttgtcccccagggttttcctcacaaaagttcccgatgcagcatgtcctctgtaatcaccctccatggatcttcacatgtctctgcgcagagggtaatatacagcctggagatcctggtccaggggaccaggaaaaacagcaacaggcttccgaagggcgaccctggagcgaccaagcggaaggccctgagggagagggagctatgccattattcggacgcactaagaaaagaactttgggcgcattttcccgacccccacagagacaacctgtgagttctcggaatggcctgagaggagtcgagctggaggcatcccctgcccagtcaggcaaccccgaggaaaccgataagctgttgaagcgcatagaagtgctcggatttggaacagttaattgtggtgaatgcggcctctccttcagtaagatgactaatttacttagccaccaacgcatccacagcggggaaaaaccgtatgtatgtggcgtgtgcgagaagggattttctctaaaaaagtccctggccagacaccagaaggctcacagcggtgagaagcccattgtttgtagggaatgtggtcgcggatttaatcgcaaatcaactctgattattcacgagaggactcacagcggcgagaaaccctacatgtgcagcgaatgcggtcggggttttagccagaaaagcaatctaataattcaccagaggacccattcaggtgagaaaccgtatgtttgcagagaatgcggcaaaggattctcccagaagtccgcagtagtgcgccatcaacggactcacttggaggagaaaacaatcgtgtgctccgactgtgggctcggattctctgaccgatcaaacctgatcagtcaccagcgcacccactcgggagaaaaaccatatgcttgcaaggaatgtggcagatgcttccgccagcggactacactcgttaaccaccagagaacacatagcaaggagaagccatatgtgtgtggagtgtgcggccacagcttttcacagaattccactctgatttctcaccgacgtacccatacaggggagaaaccttatgtctgcggcgtgtgtggaagggggttctctttgaagagccacctgaatcggcaccaaaacatacactctggcgaaaagcctattgtctgcaaggactgcggcaggggcttttcacagcaaagcaatctcattcgtcatcagaggacccacagtggcgagaagcctatggtgtgcggggagtgcggcagagggtttagccagaagagtaacctcgtggctcatcaaagaacgcacagcggtgagaggccttatgtatgccgcgagtgcgggagaggattctctcatcaagccggattaattagacacaagaggaagcactcaagggagaaaccctatatgtgccggcagtgtgggctgggatttggaaacaagagcgccctgattacccataagagggcacattctgaggaaaaaccctgcgtctgccgcgaatgcggccaggggttcctgcaaaaatctcacctcaccctgcatcagatgactcacaccggtgagaagccttacgtttgtaaaacctgcggcaggggattctccttgaagtcccacctgtcacgccatagaaagacaacttcggtgcaccatagacttcccgtgcagcccgatcctgagccctgcgcaggacagccgtcagattctttatactctctgtag

SEQ ID NO: 276960 - DNA, 1161 bp, Artificial Sequence
  derived and/or modified sequence
tctggaagagtcaatccagctggggggctcgggtgttctgaatccgggaccttcggtgggccgcctgcgcccatagtatttccatggttcggtctagacataggcggtacccttgttaagctggtatactttgaacccaaggacatcacagccgaagaagaggaagaagaggtcgaaagtctgaagtcaatccgtaaatacttaacttctaacgtggcctacggttcaaccgggattagagacgtgcacctggagcttaaagatctcacattatgtggaaggaaaggaaatctccactttattcgctttcccactcacgacatgccagcctttatccagatgggacgcgacaaaaatttcagcagcttgcatacagtcttctgtgctactggcgggggtgcatataagtttgagcaggactttcttactatcggtgatctccaactgtgcaaactcgacgagctagactgtttgatcaaggggattctttatatcgattccgtgggctttaatggacgctcccagtgctattattttgaaaatccagcagacagtgaaaagtgccagaaactgccctttgacttgaagaatccctatcccctgttactcgtgaacatcggatcaggagtctctatcctcgccgtgtactctaaagacaattacaagcgggttactgggacaagcttgggcggcgggacattctttgggctgtgctgcttactcacgggatgtactacgtttgaggaggccctggaaatggcttctcgcggtgacagcacaaaagtggacaagctggtgcgcgatatctacggtggcgattatgagcgtttcgggcttcctggttgggctgttgcatccagctttggcaatatgatgagtaaagagaaacgggaggcggtgtcaaaagaggatttggcacgcgcgaccctgatcacaataacaaacaacattggaagcatcgcacggatgtgcgcgctgaatgagaatatcaaccaggtcgtctttgtgggcaacttcctccggatcaataccatcgcaatgcggttattggcatatgctctggattactggtccaaaggccagctgaaagccttattttcagaacacgaaggatacttcggcgcggtgggcgcactactggagctattgaagattccatag

SEQ ID NO: 276961 - DNA, 1161 bp, Artificial Sequence
  derived and/or modified sequence
tctggccgggtgaacccagctgggggcctgggctgcagcgagagcggcaccttcggcggccccccagcccccatcgtgttcccctggtttggcctggacatcggcggcaccctggtgaagctggtgtactttgagcccaaggacatcacagctgaggaggaggaggaggaggtggagagcctgaagagcatcaggaagtacctgaccagcaatgtggcctacggcagcacaggcatcagagatgtgcacctggagctgaaggacctgaccctgtgtggcaggaaaggaaacctgcacttcatccgcttccccacccatgacatgcctgccttcatccagatgggccgggacaagaacttcagcagcctgcacacagtgttctgtgccaccggcggcggggcctacaagtttgagcaggacttcctgaccatcggggacctgcagctgtgcaagctggatgagctggactgcctgatcaagggcatcctgtacattgattctgtgggcttcaacggccgcagccagtgctactactttgagaacccagctgacagcgagaagtgccagaagctgccctttgacctgaagaacccctaccccctgctgctggtgaacatcggcagcggcgtgtccatcctggccgtgtacagcaaggacaactacaagagggtgacaggcaccagcctgggcggcggcaccttcttcggcctgtgctgcctgctgaccggctgcaccacctttgaggaggccctggagatggccagcagaggagacagcaccaaggtggacaagctggtgcgggacatctacggcggggactatgaaagatttggcctgcccggctgggccgtggccagcagctttggaaacatgatgagcaaggagaagcgggaggccgtgtccaaagaagacctggcccgggccaccctcatcaccatcaccaacaacatcggcagcatcgccaggatgtgtgccctgaatgaaaacatcaaccaggtggtgtttgtgggcaacttcctgcgcatcaacaccatcgccatgaggctgctggcctatgccctggactactggagcaagggccagctgaaggccctcttcagcgagcacgagggctactttggagctgtgggcgccctgctggagctgctgaagatcccctag

SEQ ID NO: 276962 - DNA, 1161 bp, Artificial Sequence
  derived and/or modified sequence
agcggccgggtgaaccccgccggcggcctgggctgcagcgagagcgggacttttggcggacctcccgctccaattgtcttcccctggttcggcctggatatcggaggcacccttgtcaagctggtgtatttcgaaccgaaagatataaccgcagaggaagaagaggaggaggtcgaatccctcaagagtatccggaaatacctcacctcgaatgtagcctatggctcaacaggcattagggacgttcatctcgagctcaaagacttaacactctgtggacgcaaaggcaatctgcactttattcgcttcccaacgcatgatatgcctgcattcatccagatggggcgggacaagaacttttctagcctgcataccgtgttttgtgcaaccggcgggggagcctataagtttgagcaagactttctgacgattggggatctacagttgtgcaaactagatgaattggattgcctgatcaagggaattctctatattgactctgtcgggttcaatggccgctcacagtgttactactttgagaaccccgccgattcagagaagtgccagaagctcccgtttgacctgaaaaatccttacccactcctgctggtcaacattggtagcggtgtgagcatcctcgccgtctactccaaggataattataaaagagtgacgggcacttcattaggaggagggacctttttcggtctgtgttgccttctgaccgggtgcacgacatttgaagaggctctagagatggcaagcaggggagattctacaaaggtagacaagcttgtgcgcgacatatatgggggcgattacgagcgcttcggactcccaggctgggccgtggcttcttcattcggtaacatgatgagcaaagaaaagcgggaggctgtttcgaaggaggacttggcgagagctaccctgattactataactaacaatatcggatccattgcgcgaatgtgtgcactaaacgaaaacattaaccaagtggtgtttgtgggtaactttctacggattaatacaattgctatgcgcctgctggcgtacgccctggactattggagcaagggacagctcaaagcattgttctccgagcatgaggggtattttggcgccgtgggggctcttcttgaattgttgaagatcccatag

SEQ ID NO: 276963 - DNA, 1567 bp, Artificial Sequence
  derived and/or modified sequence
agcggccgcgtaaatccggctggaggcctcgggtgctccgaaagcggtaccttcgggggcccccccgcacccattgtttttccatggtttggactggatatcggtggaactctggtcaagctggtatattttgaacccaaagacatcactgctgaagaagaagaggaagaagtggaaagtcttaaaagcattcggaagtacctgacctccaatgtggcttatgggtctacaggcattcgggacgtgcacctcgagctgaaggacctgactctgtgtggacgcaaaggcaatctgcactttatacgctttcccactcatgacatgcctgcttttattcaaatgggcagagataaaaacttctcgagtctccacactgtcttttgtgccactggaggtggagcgtacaaatttgagcaggattttctcacaataggtgatcttcagctttgcaaactggatgaactagattgcttgatcaaaggaattttatacattgactcagtcggattcaatggacggtcacagtgctattactttgaaaaccctgctgattctgaaaagtgtcagaagttaccatttgatttgaaaaatccgtatcctctgcttctggtgaacattggctcaggggttagcatcttagcagtatattccaaagataattacaaacgggtcacaggtactagtcttggaggaggaactttttttggtctctgctgtcttcttactggctgtaccacttttgaagaagctcttgaaatggcatctcgtggagatagcaccaaagtggataaactagtacgagatatttatggaggggactatgagaggtttggactgccaggctgggctgtggcttcaagctttggaaacatgatgagcaaggagaagcgagaggctgtcagtaaagaggacctggccagagcgactttgatcaccatcaccaacaacattggctcaatagcaagaatgtgtgcccttaatgaaaacattaaccaggtggtatttgttggaaatttcttgagaattaatacgatcgccatgcggcttttggcatatgctttggattattggtccaaggggcagttgaaagcacttttttcggaacacgagggttattttggagctgttggagcactccttgagctgttgaagatcccgtgatcattacctggggaggggttcctgaaaccttccacaatgggatctgtggactttcatttttttaagagacttactcaatttcatgactgtactacctgaaacaaagtgagaaaggacaggtgtatttttctaagtcatcaagataaatccttaagaattcagtctaaattagcaaccaggaaggaaaaatatattaaaaacaacaaaaaagtggcacatgtccaggcagtgtgaggatttgctgtatataagttgcctgctttgtatttttgaaatctctgcatcactcattggaagtgcttctgaagagagctgctctgtgttcagttgactggttttgtgtcctgtttgaacttgctgaatgtaaggcaggctactatgcgttataatctaatcacaatttgtc

SEQ ID NO: 276964 - DNA, 4815 bp, Artificial Sequence
  derived and/or modified sequence
atgctgggggaggggctggcggcctcgacggcagctgcggaactaggccgagggacaaaggctaagtttttccatggtttggactggatatcggtggaactctggtcaagctggtatattttgaacccaaagacatcactgctgaagaagaagaggaagaagtggaaagtcttaaaagcattcggaagtacctgacctccaatgtggcttatgggtctacaggcattcgggacgtgcacctcgagctgaaggacctgactctgtgtggacgcaaaggcaatctgcactttatacgctttcccactcatgacatgcctgcttttattcaaatgggcagagataaaaacttctcgagtctccacactgtcttttgtgccactggaggtggagcgtacaaatttgagcaggattttctcacaataggtgatcttcagctttgcaaactggatgaactagattgcttgatcaaaggaattttatacattgactcagtcggattcaatggacggtcacagtgctattactttgaaaaccctgctgattctgaaaagtgtcagaagttaccatttgatttgaaaaatccgtatcctctgcttctggtgaacattggctcaggggttagcatcttagcagtatattccaaagataattacaaacgggtcacaggtactagtcttggaggaggaactttttttggtctctgctgtcttcttactggctgtaccacttttgaagaagctcttgaaatggcatctcgtggagatagcaccaaagtggataaactagtacgagatatttatggaggggactatgagaggtttggactgccaggctgggctgtggcttcaagctttggaaacatgatgagcaaggagaagcgagaggctgtcagtaaagaggacctggccagagcgactttgatcaccatcaccaacaacattggctcaatagcaagaatgtgtgcccttaatgaaaacattaaccaggtggtatttgttggaaatttcttgagaattaatacgatcgccatgcggcttttggcatatgctttggattattggtccaaggggcagttgaaagcacttttttcggaacacgagggttattttggagctgttggagcactccttgagctgttgaagatcccgtgatcattacctggggaggggttcctgaaaccttccacaatgggatctgtggactttcatttttttaagagacttactcaatttcatgactgtactacctgaaacaaagtgagaaaggacaggtgtatttttctaagtcatcaagataaatccttaagaattcagtctaaattagcaaccaggaaggaaaaatatattaaaaacaacaaaaaagtggcacatgtccaggcagtgtgaggatttgctgtatataagttgcctgctttgtatttttgaaatctctgcatcactcattggaagtgcttctgaagagagctgctctgtgttcagttgactggttttgtgtcctgtttgaacttgctgaatgtaaggcaggctactatgcgttataatctaatcacaatttgtcaatatggtcttggcaatcatctgtgcattactctggtttgcattaagcctgtgtgtgaacttactgtaaaacatgttttatttcaaggttctgcaaaattaattgggcaggttaattgtgtacctgaaacttaacaagcagtttttggaagggcagttccacgttactttacactaaatcctgggaatgaatgtctggagagacagggcttcttttcttggcagaatttccttgggtagtgggcggactgttctgatgcaagtgggtacactggcagaagcagcacaatctggaggactaacatgagtcagcagggccactagaattgacaccccctcaggggatcagggagaatctggtttttctttcaggctaagtagaaaaggaagaactgaagtgtctgtcaaagaactcatggggagtggggggtccttcagggcactgtggcacttgggaggtgagtctcagaagactgcctgaggagagtgccaggctgcaggtgctcttggtaggggctgaagcttttctttctgctttgcagaataatttcaaaagcctttcccaaggagagaatgcaccttttatatctgaggtcttaagtggtgcccatattgctgttgaaggcaaggatgggcctgtacaaagcagccttggaccaggagggaaaaccccaaggctctgcagcctccctgctcccctccgtttaaggctgtggtcagggagggatgggcagggtgccagccgcatggaggcagcagagacacccgtgttccagctggggcaaggggaactgatatgtgggctgtgggctgttccactaggcgtggccacctctgcacatgggccttggcacttaggaaatatgggtgctgctgcattgggaccttgtgtgggtgcagagcaggatggctgctgcgtggagggtaattttgtcccctggagagtgattggtgaccctcttccctgctgctgctgtttgcaggctcctggcctatactacctctgacgccctgatcctgagttcctctgccctcctctgctgccagcagcgctgttggtggcctcaccctcctccagtacccaggcaccaaagatggcaccaccatcctcctgcttgtaccacagggtgctgctccctgggccaactcctgtgaacttgctcacttcccatggagaccgaggccagggcctgcccctctgaggcccctgttttgtggtcctgctgcctctgctgtgctgcgttcaggaggttgtccactgctcgacgtgggtcaccatgcagcccttgctgttcccacaatttaacagaaaaggaaactgaacggatgagtaaggctgcccagggtcactcagctggaaaagagtagagctggactcaaacccgggactgtctgtctctggtgcctgagttgggaagacgctgttgatgtccccttctgcctcgctttgagcttcctcctccgtgggccctccccctactctagagaaactagtccattccctcatgttccaccttgtgctcagtaaaccctgtcactccacagcagggtttttgagacagtctcgctgtgtcacccaggtggagtgcagtggggcgatctcagctcactgcaacctctgccttccaggctcaagcaattctcctgccttagcctcctgcgtagctgagactacaggcatgtgccaccatggctggctaatttttatatttttagtagagatggggtttcaccatgatggccaggctggtctcgaactccagaccccaggtgatccgcctgccttggcctcccaaagtgctgggaatacaggtgtgagcccctgcgcccggctcacagcagggttcttgataggccaccagtgaatcccatgccaccgaatctggcattcatttcacagcctcatctcagttctcactcagcagagccctcttgcctgtcctgccacccaggctactaatgttctggttcattctctgctgacagttagctgtggctgtcctcagcctcagtcctgggtctccccaagcagtcattagcatcaccttgactgatttccagggaacacttcaaccaccccttacctctgagctccagccccgagacactgccttctctctgcatttgttgatctctgtgcagcagtgcccacatcctcatcccagcttactgccgtctcaccaccttcaggttgtgaggtgcccataaactctgctgttaccattgccacttccctgtcttagcagctgtccctttcagtctgccctccactagtggccatgaagggggctgtgaccgtggtccaggtgagaaaggaaggcctgaactaagatgggaggtgggtggccagaatggagaggggagaagtggatggccagaatggagagatgcttagagggctgtgttgggaagtggtgactggatacaggggagggaggagagatacaagagggcacctgggctcatttgtggactacgtgattttgagactccaaataagcactgggtatttgggttggagatacagagctgagaatgatatgcatgtaggtgggcaaagcaagggggatttcatgagttctaaggtagggtgagaaaaataaccgagagttgagcagtgacggaggaagctgcaaagaaaacgactgctcagggagaggctggccaggggcctgtggctcaggggactgagaagaggagctctctaggcatctgaattgaggttgcccacaattggttgcaagatcgtggctggccttgatggaagctgggaagccactcggtcctagtgaggggtggtgaggagagcagcaacggccacacaggaaggctttggacgttttttctcctgacactagttatttccaggcctgggatatagctaggggcttggggtgggggcaactctttgcagggtggtgtggcctgtggaggaaacaggctcagttccactactttggccaggtgcaatggctcatgcctgtaatcccagcactttggaaggccaaggcgggtggatcacctgaggtcaggagttcaagaccagcctggacaacatggtgaaaccccgtctctactgaaaatacaaaaataattagccgggaatggtggtgcgtgcctgtaatcccaggtactcgagaggctgaggcagacagttgcttgaacctgggaggcagaggttgctgcagtgagccgagattgctgcactgcactccagcctgggtgacagcaagactgtctcaaaaaaaaaaaaaaaaaa

SEQ ID NO: 276965 - DNA, 1161 bp, Artificial Sequence
  derived and/or modified sequence
tccggccgtgttaatccggctggagggcttggatgttccgagtcaggaacatttggaggaccacccgcacccatcgtgtttccgtggttcgggctcgatataggcggaacgttagtcaaactcgtctatttcgaacctaaagatatcactgctgaggaagaggaagaggaagtcgagtcacttaaaagtattcggaaatatctgacatctaacgtagcatatggatctaccggtatcagggacgtgcacttggaactgaaagatctgacattgtgcggcaggaagggtaatctgcacttcattcgcttccctacccatgatatgccagccttcatccagatggggagagataagaatttcagctcacttcacacagtgttttgcgccactgggggaggagcctacaagtttgagcaggattttctcacaatcggggatctgcagctgtgcaaactagatgaactcgattgcctcattaagggcattctctacatagattctgtgggctttaacggaaggtcccagtgttattatttcgagaaccccgcagactccgagaagtgtcaaaaactgccttttgaccttaaaaacccttacccactgctgttggtgaacattggcagtggtgtatccatcctagctgtctacagtaaggacaactataagcgcgttactggaacctcactgggaggcggaaccttttttggactgtgctgtctgctcactgggtgcactacatttgaggaagcccttgagatggcctcccgaggggacagtaccaaagtagacaagctcgtcagggatatttatggcggagactacgagaggttcggtttgccaggttgggctgtggctagctcttttggaaatatgatgtctaaggagaagagggaggcagtgtccaaagaggacctagctcgggcaacgcttatcacgattactaataatatcgggagcatagcccgtatgtgcgctttgaatgaaaacatcaatcaagtcgttttcgtgggaaattttctgagaattaatacgatcgccatgcgactgttggcttacgctctggactactggtccaaggggcagcttaaggcgcttttcagtgagcacgaaggatatttcggcgctgtgggggcattgctggagttacttaaaataccctag

SEQ ID NO: 276966 - DNA, 1161 bp, Artificial Sequence
  derived and/or modified sequence
agcggcagagtgaaccccgccggcggcctgggctgcagcgagagcggcaccttcggcggcccccccgcccccatcgtgttcccctggttcggcctggacatcggcggcaccctggtgaagctggtgtacttcgagcccaaggacatcaccgccgaggaggaggaggaggaggtggagagcctgaagagcatcagaaagtacctgaccagcaacgtggcctacggcagcaccggcatcagagacgtgcacctggagctgaaggacctgaccctgtgcggcagaaagggcaacctgcacttcatcagattccccacccacgacatgcccgccttcatccagatgggcagagacaagaacttcagcagcctgcacaccgtgttctgcgccaccggcggcggcgcctacaagttcgagcaggacttcctgaccatcggcgacctgcagctgtgcaagctggacgagctggactgcctgatcaagggcatcctgtacatcgacagcgtgggcttcaacggcagaagccagtgctactacttcgagaaccccgccgacagcgagaagtgccagaagctgcccttcgacctgaagaacccctaccccctgctgctggtgaacatcggcagcggcgtgagcatcctggccgtgtacagcaaggacaactacaagagagtgaccggcaccagcctgggcggcggcaccttcttcggcctgtgctgcctgctgaccggctgcaccaccttcgaggaggccctggagatggccagcagaggcgacagcaccaaggtggacaagctggtgagagacatctacggcggcgactacgagagattcggcctgcccggctgggccgtggccagcagcttcggcaacatgatgagcaaggagaagagagaggccgtgagcaaggaggacctggccagagccaccctgatcaccatcaccaacaacatcggcagcatcgccagaatgtgcgccctgaacgagaacatcaaccaggtggtgttcgtgggcaacttcctgagaatcaacaccatcgccatgagactgctggcctacgccctggactactggagcaagggccagctgaaggccctgttcagcgagcacgagggctacttcggcgccgtgggcgccctgctggagctgctgaagatcccctag

SEQ ID NO: 276967 - DNA, 3582 bp, Artificial Sequence
  derived and/or modified sequence
atggtggccgccgccgccgccaccgaggccagactgagaagaagaaccgccgccaccgccgccctggccggcagaagcggcggcccccactgcgtgaacggcggcagatgcaaccccggcaccggccagtgcgtgtgccccgccggctgggtgggcgagcagtgccagcactgcggcggcagattcagactgaccggcagcagcggcttcgtgaccgacggccccggcaactacaagtacaagaccaagtgcacctggctgatcgagggccagcccaacagaatcatgagactgagattcaaccacttcgccaccgagtgcagctgggaccacctgtacgtgtacgacggcgacagcatctacgcccccctggtggccgccttcagcggcctgatcgtgcccgagagagacggcaacgagaccgtgcccgaggtggtggccaccagcggctacgccctgctgcacttcttcagcgacgccgcctacaacctgaccggcttcaacatcacctacagcttcgacatgtgccccaacaactgcagcggcagaggcgagtgcaagatcagcaacagcagcgacaccgtggagtgcgagtgcagcgagaactggaagggcgaggcctgcgacatcccccactgcaccgacaactgcggcttcccccacagaggcatctgcaacagcagcgacgtgagaggctgcagctgcttcagcgactggcagggccccggctgcagcgtgcccgtgcccgccaaccagagcttctggaccagagaggagtacagcaacctgaagctgcccagagccagccacaaggccgtggtgaacggcaacatcatgtgggtggtgggcggctacatgttcaaccacagcgactacaacatggtgctggcctacgacctggccagcagagagtggctgcccctgaacagaagcgtgaacaacgtggtggtgagatacggccacagcctggccctgtacaaggacaagatctacatgtacggcggcaagatcgacagcaccggcaacgtgaccaacgagctgagagtgttccacatccacaacgagagctgggtgctgctgacccccaaggccaaggagcagtacgccgtggtgggccacagcgcccacatcgtgaccctgaagaacggcagagtggtgatgctggtgatcttcggccactgccccctgtacggctacatcagcaacgtgcaggagtacgacctggacaagaacacctggagcatcctgcacacccagggcgccctggtgcagggcggctacggccacagcagcgtgtacgaccacagaaccagagccctgtacgtgcacggcggctacaaggccttcagcgccaacaagtacagactggccgacgacctgtacagatacgacgtggacacccagatgtggaccatcctgaaggacagcagattcttcagatacctgcacaccgccgtgatcgtgagcggcaccatgctggtgttcggcggcaacacccacaacgacaccagcatgagccacggcgccaagtgcttcagcagcgacttcatggcctacgacatcgcctgcgacagatggagcgtgctgcccagacccgacctgcaccacgacgtgaacagattcggccacagcgccgtgctgcacaacagcaccatgtacgtgttcggcggcttcaacagcctgctgctgagcgacatcctggtgttcaccagcgagcagtgcgacgcccacagaagcgaggccgcctgcctggccgccggccccggcatcagatgcgtgtggaacaccggcagcagccagtgcatcagctgggccctggccaccgacgagcaggaggagaagctgaagagcgagtgcttcagcaagagaaccctggaccacgacagatgcgaccagcacaccgactgctacagctgcaccgccaacaccaacgactgccactggtgcaacgaccactgcgtgcccagaaaccacagctgcagcgagggccagatcagcatcttcagatacgagaactgccccaaggacaaccccatgtactactgcaacaagaagaccagctgcagaagctgcgccctggaccagaactgccagtgggagcccagaaaccaggagtgcatcgccctgcccgagaacatctgcggcatcggctggcacctggtgggcaacagctgcctgaagatcaccaccgccaaggagaactacgacaacgccaagctgttctgcagaaaccacaacgccctgctggccagcctgaccacccagaagaaggtggagttcgtgctgaagcagctgagaatcatgcagagcagccagagcatgagcaagctgaccctgaccccctgggtgggcctgagaaagatcaacgtgagctactggtgctgggaggacatgagccccttcaccaacagcctgctgcagtggatgcccagcgagcccagcgacgccggcttctgcggcatcctgagcgagcccagcaccagaggcctgaaggccgccacctgcatcaaccccctgaacggcagcgtgtgcgagagacccgccaaccacagcgccaagcagtgcagaaccccctgcgccctgagaaccgcctgcggcgactgcaccagcggcagcagcgagtgcatgtggtgcagcaacatgaagcagtgcgtggacagcaacgcctacgtggccagcttccccttcggccagtgcatggagtggtacaccatgagcacctgcccccccgagaactgcagcggctactgcacctgcagccactgcctggagcagcccggctgcggctggtgcaccgaccccagcaacaccggcaagggcaagtgcatcgagggcagctacaagggccccgtgaagatgcccagccaggcccccaccggcaacttctacccccagcccctgctgaacagcagcatgtgcctggaggacagcagatacaactggagcttcatccactgccccgcctgccagtgcaacggccacagcaagtgcatcaaccagagcatctgcgagaagtgcgagaacctgaccaccggcaagcactgcgagacctgcatcagcggcttctacggcgaccccaccaacggcggcaagtgccagccctgcaagtgcaacggccacgccagcctgtgcaacaccaacaccggcaagtgcttctgcaccaccaagggcgtgaagggcgacgagtgccagctgtgcgaggtggagaacagataccagggcaaccccctgagaggcacctgctactacaccctgctgatcgactaccagttcaccttcagcctgagccaggaggacgacagatactacaccgccatcaacttcgtggccacccccgacgagcagaacagagacctggacatgttcatcaacgccagcaagaacttcaacctgaacatcacctgggccgccagcttcagcgccggcacccaggccggcgaggagatgcccgtggtgagcaagaccaacatcaaggagtacaaggacagcttcagcaacgagaagttcgacttcagaaaccaccccaacatcaccttcttcgtgtacgtgagcaacttcacctggcccatcaagatccagtag

SEQ ID NO: 276968 - DNA, 3582 bp, Artificial Sequence
  derived and/or modified sequence
atggtagctgctgcggccgcaacagaagctaggttgcgtaggcgcaccgctgcaaccgcagctttagcaggcagatccgggggaccgcactgcgttaatggcggaagatgcaaccctggaacagggcagtgtgtatgcccggccggatgggttggcgaacagtgtcagcattgcggaggcaggttccggcttacaggatcctctggatttgtgacggatggtccaggaaactataagtataaaacaaaatgtacttggctcattgagggccagccgaatcgcattatgagactgagatttaatcattttgcaaccgaatgtagttgggaccacctttatgtatacgacggcgacagcatctacgcccctcttgtggcagccttttctggtctcatcgtcccagaacgtgacggtaacgagaccgttcctgaagtcgtggccacatccggatatgccctgctgcacttttttagtgatgcggcttataacctgacaggattcaacattacttactcatttgatatgtgtcctaacaattgcagcggacggggagaatgcaaaatctctaatagttctgacacagtggaatgcgaatgttccgaaaattggaagggggaggcttgtgacatcccacattgcacggataactgcggtttcccccacagaggaatttgtaactcttccgatgttaggggatgctcgtgtttctcagactggcagggacccggatgttccgttcctgtacccgctaatcaatccttttggacacgggaagaatactcaaatctgaagcttccaagggcatcccacaaggccgtggtcaatggaaacattatgtgggttgtaggagggtacatgtttaaccacagtgattataacatggttttggcttacgacctggcaagtcgcgagtggctcccgcttaacaggagtgttaataatgtggtggtgcgatacggtcattctctggcactgtacaaggacaagatctatatgtacggtggcaaaatcgacagcactggcaacgtgaccaatgagctgagggttttccatattcataatgaatcttgggtgttgctgacgccgaaggccaaggagcaatatgcagtggttggtcattcagcccacatcgtaacgttaaagaacggcagagttgtgatgctcgttatattcggccactgccccctgtacggctatatatctaacgtacaggaatatgatttggataagaatacgtggtcaattctgcatacacagggtgccctggtacaggggggatacggacatagtagcgtatacgatcatcgcacaagagctttatacgtgcacggcggctacaaggcatttagcgctaataaatacaggcttgctgatgacttgtatcggtacgacgtagatacacaaatgtggacaatcctcaaagatagccggttcttccggtacctgcatacagctgtaatcgtcagtggcacaatgctcgtctttggagggaacacccacaacgacacatctatgagccacggggccaagtgtttctcaagtgattttatggcgtatgacatcgcatgcgaccgctggtctgtactgccaaggcccgatttgcaccatgacgtcaaccggtttggacatagtgcagtgctacataactccactatgtatgtatttggaggttttaatagcttgctcctatccgatatcttggttttcacaagtgagcaatgcgatgcacatcgtagtgaagcggcctgtctggcagctggccctgggattcgctgtgtctggaatactggtagctcccagtgcatctcctgggcactggctaccgatgaacaggaggaaaaactcaaaagcgagtgtttttcaaagcgcaccctcgaccatgacagatgtgatcagcacactgattgttactcttgcactgctaatactaatgattgccactggtgcaatgatcactgcgtaccaaggaaccacagttgcagcgaaggtcagatttccatatttcggtatgagaattgtccaaaagataaccctatgtactattgtaataagaagacatcttgcagatcttgtgctctggatcagaattgccagtgggaacctcggaaccaggaatgcatcgccctaccagaaaacatatgtggtatcggctggcacttggttggcaattcttgtctgaagattaccacagccaaagagaattatgacaacgctaagttgttctgccgcaaccataacgctctgctcgccagcctgactacacaaaagaaagtagaatttgttctaaagcagctccgcatcatgcagtcgtctcaaagcatgagtaaattgaccttgactccttgggtcggtcttcgaaaaatcaacgtgtcgtattggtgttgggaagacatgtctccgttcactaattctctgctgcagtggatgcccagcgaaccatctgatgcaggcttctgtggtatcctgtctgaaccaagcacgagaggcctgaaagcagctacttgtatcaaccccctgaatggtagtgtgtgtgaaaggcccgctaaccactcagcaaaacagtgtaggacaccctgtgcactgcgtactgcttgcggggattgcacaagtgggtcatccgagtgtatgtggtgttccaatatgaagcaatgtgtggacagcaatgcctacgtcgccagttttccctttgggcagtgtatggagtggtataccatgtctacatgccctcctgaaaactgtagtggttactgtacatgttcccattgcctcgagcagccaggatgtgggtggtgtacagacccttccaatactggtaaagggaagtgcattgagggctcatataaaggtcccgtcaagatgcctagccaggctcccactggtaatttctacccccagcccttgctgaacagctctatgtgtctggaggactccaggtataattggtcttttatccactgccccgcgtgtcagtgcaacggacacagtaagtgcatcaaccagtccatctgtgaaaaatgcgaaaacctcacaactggaaagcattgcgaaacctgcatctcgggattttacggcgacccgaccaacggcggcaaatgtcagccctgcaagtgcaatggtcatgcatccctctgcaataccaacaccgggaaatgtttttgtacgaccaagggtgtgaagggagatgagtgtcaattgtgcgaggtcgagaatcgctaccaggggaacccactcagaggcacatgctactacacactcctaattgattaccagtttaccttttcactgtctcaggaagacgatcgctattatacggccattaattttgtcgccactcctgatgagcagaatagggatctggacatgtttataaacgctagtaagaattttaacctgaatataacttgggcagccagcttcagcgctggcacacaggccggtgaggaaatgccagtggtgtcgaaaaccaacattaaagagtacaaggatagctttagtaatgaaaaatttgacttcagaaaccatcccaatattacttttttcgtctacgtgagcaattttacctggcccatcaagatacagtag

SEQ ID NO: 276969 - DNA, 3582 bp, Artificial Sequence
  derived and/or modified sequence
atggtggccgctgctgctgccacagaggcccggctgcggcggaggacagctgccacagctgccctggccggccgcagcggcggcccccactgtgtgaatggaggccgctgcaaccctggcaccggccagtgtgtgtgcccagctggctgggtgggggagcagtgccagcactgcggcggccgcttccggctgaccggcagcagcggctttgtgacagatggccctggcaactacaagtacaagaccaagtgcacctggctgattgagggccagcccaaccgcatcatgaggctgcgcttcaaccactttgccacagagtgctcctgggaccacctgtatgtgtatgatggagacagcatctatgcccccctggtggccgccttcagcggcctcatcgtgcctgagagagatggaaatgaaacagtgcctgaggtggtggccaccagcggctacgccctgctgcacttcttcagtgatgctgcctacaacctgaccggcttcaacatcacctacagctttgacatgtgccccaacaactgcagcggcagaggagagtgcaagatcagcaacagcagtgacacagtggagtgtgagtgcagcgagaactggaagggggaggcctgtgacatcccccactgcacagacaactgtggcttcccccaccggggcatctgcaacagcagtgatgtgcggggctgcagctgcttcagtgactggcagggccctggctgcagcgtgcctgtgcctgccaaccagagcttctggacccgggaggagtacagcaacctgaagctgccccgggccagccacaaggctgtggtgaatggaaacatcatgtgggtggtgggcggctacatgttcaaccacagcgactacaacatggtgctggcctatgacctggccagccgggagtggctgcccctgaacagatctgtgaacaacgtggtggtgcgctatggccacagcctggccctgtacaaggacaagatctacatgtatggaggcaagattgacagcactggaaatgtgaccaatgagctgcgggtcttccacatccacaatgaatcctgggtgctgctgacccccaaggccaaggagcagtatgctgtggtgggccacagcgcccacatcgtgaccctgaagaatggccgggtggtgatgctggtgatcttcggccactgccccctgtatggctacatcagcaatgtgcaggagtatgacctggacaagaacacctggagcatcctgcacacccagggcgccctggtgcagggcggctacggccacagctctgtgtatgaccacaggacccgggccctgtatgtgcatggaggctacaaggccttcagcgccaacaagtaccgcctggctgatgacctgtaccgctatgatgtggacacccagatgtggaccatcctgaaggacagccgcttcttccgctacctgcacacagctgtgattgtgtctggcaccatgctggtgtttggaggcaacacccacaatgacacctccatgagccatggagccaagtgcttcagcagtgacttcatggcctatgacatcgcctgtgaccgctggagcgtgctgcccaggccagacctgcaccatgatgtgaacagatttggccacagcgctgtgctgcacaacagcaccatgtatgtgtttggaggcttcaacagcctgctgctgagtgacatcctggtgttcaccagcgagcagtgtgatgcccacaggtctgaggccgcctgcctggccgccggccctggcatccgctgtgtgtggaacacaggcagcagccagtgcatctcctgggccctggccacagatgagcaggaggagaagctgaagtctgagtgcttcagcaagaggaccctggaccatgacagatgtgaccagcacacagactgctacagctgcacagccaacaccaatgactgccactggtgcaatgaccactgtgtgcccaggaaccacagctgcagcgagggccagatcagcatcttccgctatgagaactgccccaaggacaaccccatgtactactgcaacaagaagaccagctgccgcagctgtgccctggaccagaactgccagtgggagcccaggaaccaggagtgcatcgccctgcctgagaacatctgtggcatcggctggcacctggtgggcaacagctgcctgaagatcaccacagccaaggaaaattatgacaatgccaagctgttctgcaggaaccacaatgccctgctggccagcctgaccacccagaagaaggtggagtttgtgctgaagcagctgcgcatcatgcagagcagccagagcatgagcaagctgaccctgaccccctgggtgggcctgaggaagatcaacgtgtcctactggtgctgggaggacatgagccccttcaccaacagcctgctgcagtggatgcccagcgagcccagtgatgctggcttctgtggcatcctgtctgagcccagcacccggggcctgaaggccgccacctgcatcaaccccctgaatggatctgtgtgtgagaggcctgccaaccacagcgccaagcagtgcaggaccccctgtgccctgaggacagcctgtggggactgcaccagcggcagcagcgagtgcatgtggtgcagcaacatgaagcagtgtgtggacagcaatgcctacgtggccagcttccccttcggccagtgcatggagtggtacaccatgagcacctgccccccagagaactgcagcggctactgcacctgcagccactgcctggagcagcccggctgcggctggtgcacagaccccagcaacacaggaaaaggaaaatgtattgagggcagctacaagggccctgtgaagatgcccagccaggcccccactggaaacttctacccccagcccctgctgaacagctccatgtgcctggaggacagccgctacaactggagcttcatccactgcccagcctgccagtgcaatggccacagcaagtgcatcaaccagagcatctgtgagaagtgtgagaacctgaccaccgggaagcactgtgagacctgcatcagcggcttctatggagaccccaccaacggcggcaagtgccagccctgcaagtgcaatggccacgccagcctgtgcaacaccaacacaggcaagtgcttctgcaccaccaagggcgtgaagggagatgagtgccagctgtgtgaggtggagaaccgctaccagggcaaccccctgcggggcacctgctactacaccctgctgattgactaccagttcaccttcagcctgagccaggaggatgaccgctactacacagccatcaactttgtggccaccccagatgagcagaacagagacctggacatgttcatcaatgccagcaagaacttcaacctgaacatcacctgggccgccagcttctctgctggcacccaggccggggaggagatgcctgtggtgtccaagaccaacatcaaggagtacaaggacagcttcagcaatgagaagtttgacttcaggaaccaccccaacatcaccttctttgtgtatgtgagcaacttcacctggcccatcaagatccagtag

SEQ ID NO: 276970 - DNA, 3582 bp, Artificial Sequence
  derived and/or modified sequence
atggtggccgccgccgccgccaccgaggcccggctgcggcggcggaccgccgcaacggcggccctcgccggcagatctggcggcccacactgcgtcaacggcgggagatgcaatccaggcacagggcagtgtgtctgtcccgccggttgggtcggggagcagtgccagcactgcggaggtaggttccgcttaaccggcagctcagggttcgtgactgacggccccggcaattataagtacaagacgaagtgtacttggcttatcgaaggccaacccaacaggattatgaggctgcgctttaatcatttcgctactgagtgcagttgggaccatctctacgtatatgatggcgatagtatttacgcgcctctggtggcagcgttctctggcctgatcgtaccagagcgcgacggcaatgaaaccgtacctgaagtggtagcaacatctggctacgcgcttttgcatttcttcagcgacgctgcttacaatctgactggcttcaatatcacctattctttcgatatgtgcccaaataactgtagtgggagaggggagtgtaagatttccaattccagcgacaccgtcgaatgtgaatgttcagaaaactggaaaggggaggcatgcgacatcccacactgtaccgataactgtggcttcccgcaccgcggaatctgtaacagcagcgatgtgcggggttgctcttgcttctccgactggcagggtccaggctgtagcgtgccggtgccggcgaaccagagtttctggacccgagaggagtatagtaatctcaaactccctcgggccagtcataaggctgtggtgaacggcaacattatgtgggtggttggcggatacatgtttaatcacagtgactataatatggtgttagcctacgacctggcgagcagggaatggctgccattaaatcgttcagtgaacaacgtggtcgtacgctatggacacagcctggccctgtataaggacaaaatctacatgtacgggggtaaaattgactctaccggaaacgtaacaaatgagctgcgggtgttccatattcacaacgagtcttgggtattgttgacgcctaaggctaaagagcagtatgcagtcgtcggtcactcagcacacatcgttacgctgaagaatggtcgggttgtgatgcttgttatcttcggccattgtcctctgtatggatatatctctaatgtccaggagtacgacttagacaaaaacacctggtccatcctgcatacccaaggggctctcgtccaaggtggctatggacactccagtgtttacgaccaccgcacaagggcgctctacgttcacggcgggtacaaagcttttagcgcgaacaagtatcgactagcggacgatttataccgatatgacgtcgatacgcaaatgtggaccatcttgaaggattccagatttttccgctatctgcacactgccgtgatcgtgtccggaacaatgctggtgttcggcggtaacactcacaacgacacttcaatgtcccacggggctaaatgttttagttcggactttatggcctacgatattgcctgtgatcggtggtccgtgctgcctagaccagatcttcaccatgatgtgaaccgatttgggcactcagccgtgctccataattcgacgatgtatgtgttcgggggctttaactctctcctgctctctgacatcctggtattcacgtccgagcaatgtgacgcacataggagtgaggccgcctgccttgctgccggacctggcataaggtgcgtttggaacaccggcagttcacagtgcattagttgggcccttgcaacagatgaacaggaggagaagcttaaatccgaatgcttctcaaaacggaccctcgaccatgatcgctgcgatcagcacaccgactgctactcttgcaccgcaaataccaacgattgccattggtgtaatgaccattgcgtgcctcgtaatcattcgtgtagcgaaggacagatctcaatttttaggtatgaaaactgtccaaaggacaatcctatgtactactgtaataagaagacatcgtgtcgatcgtgtgctcttgatcaaaactgccagtgggaacctaggaatcaggaatgtattgccctcccagaaaacatctgtggaatcggatggcatctggtcggcaattcttgtctgaaaatcactactgccaaggagaactacgacaatgccaaactgttctgccgcaaccacaacgctctcctcgcaagtctgactacacagaagaaggtggagttcgtcctcaagcagttgagaataatgcaaagtagtcagtcaatgagcaaactgacactgactccctgggtgggactgaggaagatcaacgtaagctactggtgttgggaagatatgagccccttcaccaattccctcttgcaatggatgccatccgaacctagtgatgcaggcttttgtggcatcttgagcgagccaagcacaagaggcctaaaggctgccacttgcatcaatccactaaatggatcggtctgtgagcggccagctaaccacagcgcaaaacaatgtagaacaccctgtgctctgagaactgcatgcggagactgtacctcagggagttccgagtgcatgtggtgctctaatatgaaacaatgcgtggactcgaacgcttatgtggcaagctttcccttcgggcaatgtatggagtggtataccatgagcacatgcccacccgaaaactgctctggctattgtacttgcagtcattgtctggaacaacctgggtgtggttggtgcactgatccctctaacacaggaaaaggaaaatgtattgaaggatcctacaagggacccgtgaaaatgccaagccaagcgccaacaggaaacttttatccccagcctttgctgaacagctccatgtgcctggaggattcaagatataattggtcctttattcattgcccagcatgccagtgcaacgggcattccaagtgcattaaccaaagcatatgcgaaaaatgcgagaatctcacaacaggcaagcattgtgagacctgtatcagcggcttctatggggacccaacaaatggaggcaagtgccagccgtgcaagtgcaacggccacgccagcctatgtaacaccaacacaggaaaatgcttctgcacaaccaaaggtgtgaagggagacgaatgccaactgtgcgaagttgaaaataggtatcagggaaaccccctccggggtacatgttattataccctgctcattgattaccaatttacattttccctcagccaggaggatgatcgctactacaccgccatcaatttcgttgctacacccgacgagcaaaacagagacctcgatatgttcataaacgcatctaaaaatttcaatctcaacattacatgggccgccagcttttccgctggcactcaggctggggaggagatgcccgtggtctcaaaaacaaacataaaggagtacaaggactcattctccaacgagaagttcgacttccgaaatcatccgaacatcacgttcttcgtctacgtgtctaattttacctggcccataaagatccagtag

SEQ ID NO: 276971 - DNA, 3582 bp, Artificial Sequence
  derived and/or modified sequence
atggtagcagccgcagctgcaactgaggccagactccggaggcggactgccgctactgcggcactagcaggcaggtcgggtggaccgcactgtgttaacggtggccgatgtaacccagggacaggacagtgtgtgtgtcctgccggttgggttggagaacagtgccagcactgcggcggacggtttcggctcaccgggagttccggattcgtgacagatggacccggtaactacaagtacaaaactaaatgtacatggttgatagaaggccagccaaatcgtataatgcgactgagattcaatcacttcgcaacagaatgctcgtgggatcatttgtatgtttatgatggggacagtatctacgcccctttggtggctgctttcagcggcctcattgttccagagcgggatggaaacgaaactgtcccagaagtcgtggccaccagtgggtatgccctattgcacttcttctctgacgctgcttataacctaacaggattcaatatcacatattctttcgatatgtgtccaaacaattgttcaggcaggggcgaatgtaagatttccaattcctcagacaccgtagagtgtgaatgtagcgagaattggaaaggcgaggcctgcgacattcctcactgtacagacaactgtggcttcccccacagaggcatctgtaacagtagtgacgtcagggggtgcagttgtttctctgactggcaggggcctggctgcagtgtccctgtgcctgccaatcaatctttctggaccagagaagaatacagcaacctaaaactccctcgagcgtcccacaaggcggtggtcaacggcaacatcatgtgggtggttggcggttacatgtttaaccacagtgactacaacatggttttagcctacgatctcgcttctcgcgagtggctcccgctgaacagatccgtaaacaacgtggtggtcaggtacgggcactctctcgcactgtataaggataagatctacatgtatggcggaaaaatcgactccaccgggaacgtaactaacgagctgcgcgttttccatatacataatgagagctgggtccttctgactccaaaggccaaagagcagtacgcagtcgtggggcactccgctcacatcgtcactctgaaaaatgggagggtggtcatgttggttatctttgggcactgccctctctacggctacatatcaaatgttcaggaatatgatctggataagaacacatggtcaattctgcatacccaaggcgctctggtccagggtgggtacggccattccagtgtgtatgatcatcggaccagggcactgtatgtgcatggaggctataaggcgttctccgcaaacaaataccgactcgcagacgatctctatagatatgatgtggacacacagatgtggacaatcctcaaggactcacgcttcttcaggtacttgcacaccgccgtgattgtgtccgggactatgctcgtgtttggtggcaacacccataatgacacttctatgtcacacggagccaagtgcttctctagtgacttcatggcctacgacattgcttgtgatcgctggagcgtcctgcccagaccggacttgcatcacgacgtgaatcggttcggccattccgccgtgctccacaatagtaccatgtacgtgtttggtggatttaattcactgctgttgtccgacatacttgtcttcacaagcgagcaatgcgacgcccatcggtcagaagctgcctgcctcgccgcaggacccggtattcggtgcgtatggaacaccggatcatctcagtgtatttcatgggccctcgccaccgacgagcaggaggaaaaattgaaatctgagtgcttcagcaagcgtactcttgatcacgatagatgcgaccagcacactgactgttattcatgcaccgccaataccaacgactgtcactggtgtaacgaccactgtgtccccagaaaccattcgtgctcagagggacaaatttcgatttttcggtatgagaattgtccaaaggataatcccatgtactattgcaacaaaaaaacatcatgtaggtcatgcgcattggatcagaattgtcagtgggaaccacgtaaccaggagtgcattgcactcccagaaaacatatgtgggattggatggcaccttgttggcaattcgtgcctgaaaattactaccgctaaagaaaattacgataacgccaagctcttctgcaggaaccacaacgctctgttagcttcattgacaacccagaaaaaggtcgaatttgtcttgaaacagctccgcatcatgcagagcagccagtcaatgagtaaacttacccttacaccatgggtgggcctgagaaaaatcaacgtgtcttactggtgctgggaggacatgagcccctttacaaatagccttctgcaatggatgccttccgagcctagcgatgctggcttctgcggtatacttagcgaacctagtaccaggggcctgaaggcagctacctgtattaacccattaaatggatcagtgtgtgagcggcctgccaaccactcggccaagcagtgtcgcacaccctgcgcactcaggacggcctgcggcgattgcacgtcgggatcctcagaatgtatgtggtgttctaacatgaaacagtgtgttgattctaacgcatacgtcgcctcatttccttttggccagtgcatggagtggtatacgatgtccacatgtccccctgagaactgtagcggttactgtacctgctcacactgtctggaacaacccggatgcggctggtgcactgaccctagcaacaccggcaaaggaaaatgcatcgaaggaagctacaagggacccgtgaagatgccctctcaggccccaaccgggaacttttatcctcaaccactgctgaatagcagcatgtgcttggaagattcgcggtataattggagcttcatccattgtcctgcgtgccagtgtaacgggcatagtaaatgtatcaaccagtccatatgtgagaaatgcgagaatcttacaacaggtaagcactgcgagacatgcattagtgggttctatggtgaccctaccaatggtggtaagtgtcagccctgtaaatgtaatggccatgccagcctctgcaatacaaatacagggaagtgcttctgtacaactaaaggcgtcaaaggagacgagtgtcagctttgcgaggtcgagaaccgataccaggggaaccctctccggggaacctgttattacaccctgcttattgactaccagtttacattctcactgagtcaggaggacgaccgctattacactgctataaattttgtggctactcccgacgaacagaatagagacctggacatgtttatcaatgcaagcaagaacttcaatctcaacattacctgggcagcaagcttttcagcgggaacacaggcaggggaggaaatgccagtcgttagcaagacgaacattaaggagtacaaagattcctttagcaatgagaagtttgatttcaggaatcaccctaatattacttttttcgtctatgtcagcaatttcacctggccaattaagattcaatag

SEQ ID NO: 276972 - protein, 225 aa, Artificial Sequence
  derived and/or modified sequence
MTSEFFSAQLRAQISDDTTHPISYYKPEFYMPDDGGTAHLSVVAEDGSAVSATSTINLYFGSKVRSPVSGILLNNEMDDFSSTSITNEFGVPPSPANFIQPGKQPLSSMCPTIMVGQDGQVRMVVGAAGGTQITMATALAIIYNLWFGYDVKWAVEEPRLHNQLLPNVTTVERNIDQEVTAALETRHHHTQITSTFIAVVQAIVRMAGGWAAASDSRKGGEPAGY

SEQ ID NO: 276973 - DNA, 678 bp, Artificial Sequence
  derived and/or modified sequence
atgacaagcgagttcttttctgctcagctcagggcccagatttctgacgatactacccacccgataagttactacaaaccagaattttacatgcctgatgacggaggaacggctcacctgtcagtcgtggccgaggacggctcggctgtgagcgccacctccacaatcaatttatacttcggatctaaggttaggagccccgtgtcagggattctcttaaataacgaaatggacgattttagctctacaagtatcacaaatgaattcggagtgcctccctcccccgccaactttatacagccagggaagcagccactttcgagcatgtgtcccaccattatggtcgggcaagacggccaggtgaggatggtggtcggtgcagccggcggtacacaaatcacaatggccacagcactggccattatctataacctgtggtttgggtacgatgtgaaatgggctgtcgaggagccgcggctgcataatcagttgcttcctaacgtgaccaccgtcgaacggaacattgaccaggaggtcacagccgcattggaaacgcgccatcatcacactcagatcacatcgacgtttatcgccgtcgtacaggcgatcgttcgcatggctggggggtgggcagctgcatccgactccaggaaagggggcgagcccgccggatactag

SEQ ID NO: 276974 - DNA, 678 bp, Artificial Sequence
  derived and/or modified sequence
atgacttccgaattcttctcggcacagctgagagctcagatctccgatgacacaactcacccaatctcctactacaaacccgagttttacatgcctgacgacgggggcacagctcatctatctgtggtcgctgaagatgggtccgctgtatctgctacatcaacaatcaacttatatttcggatctaaagtgcgatcacctgtgtccgggattctcctgaacaatgagatggacgatttttcaagtacgtccattactaatgaattcggcgtgccaccatcccccgctaattttattcaacccgggaaacagcctctgtccagtatgtgtccaaccataatggtggggcaggatggccaggtgcgaatggtggtcggcgccgcgggcggaacccagatcaccatggcaacagccctggctattatttataacctctggttcggctacgatgtgaagtgggctgtggaagaaccaagactccacaatcagctcctcccaaacgtgacgactgttgaacggaacatcgaccaggaagtcacagcagccctcgaaactagacaccatcacacgcagatcacgagcacttttattgccgtggtccaagctattgtgaggatggcgggcggatgggctgccgcaagcgactctagaaagggcggtgagccggccggatactag

SEQ ID NO: 276975 - DNA, 678 bp, Artificial Sequence
  derived and/or modified sequence
atgacttcagagttctttagcgcccagctgagggcacaaatttcggacgacacgacacacccaatcagctactataaacccgagttctatatgccagatgatggaggcaccgcacacctgagtgtagttgcggaggacggcagtgcggtgagcgccacgtcaacgattaacctgtacttcgggtccaaggttcggtctcccgtgtcagggattctactcaacaacgagatggacgacttctctagcacatcaatcactaatgagttcggggtccccccttcgccagccaacttcatccaacctggaaaacagccactgagttctatgtgccctacgattatggtcggccaagacgggcaggtgagaatggttgtgggtgctgcgggggggactcaaattaccatggctacggcattggccattatctacaacctctggtttgggtacgatgtcaagtgggctgtggaggagcctaggctacataaccagttactccccaatgtcactacagtggagcggaatattgaccaggaggttaccgcggcgctggagacccggcaccatcacacccagattactagcaccttcatcgctgtggtgcaggccattgtgcgaatggcaggtgggtgggccgccgcttccgactcccgcaaggggggggagccagcaggttattag

SEQ ID NO: 276976 - DNA, 678 bp, Artificial Sequence
  derived and/or modified sequence
atgaccagcgagttcttcagcgcccagctgcgggcccagatcagtgatgacaccacccaccccatctcctactacaagccagagttctacatgccagatgatggcggcacagcccacctgtctgtggtggctgaagatggcagcgctgtgtctgccaccagcaccatcaacctgtacttcggcagcaaggtgcgcagccctgtgtctggcatcctgctgaacaatgagatggatgacttcagcagcaccagcatcaccaatgaatttggagtgccccccagccctgccaacttcatccagcccgggaagcagcccctgagctccatgtgccccaccatcatggtgggccaggacggccaggtgaggatggtggtgggcgccgccggcggcacccagatcaccatggccacagccctggccatcatctacaacctgtggtttggctatgatgtgaagtgggccgtggaggagccccggctgcacaaccagctgctgcccaacgtgaccaccgtggagagaaatattgaccaggaggtgacagctgccctggagaccaggcaccaccacacccagatcaccagcaccttcatcgctgtggtgcaggccatcgtgaggatggccggcggctgggccgccgccagtgacagcaggaagggcggggagcctgctggctactag

SEQ ID NO: 276977 - DNA, 678 bp, Artificial Sequence
  derived and/or modified sequence
atgaccagcgagttcttcagcgcccagctgcgggcccagatcagcgatgatactacccatccaataagttattataaaccagaattttacatgcccgatgacggaggtaccgctcacctgtccgtcgtcgcggaggacgggtccgccgtttccgctacatccacaattaacctttacttcggtagcaaggtcaggagccctgttagtgggatacttctgaataatgagatggatgatttttccagcacttccatcaccaacgaattcggtgtacctccatcaccggccaacttcatccaaccagggaagcaaccactgagcagtatgtgccctactattatggtcggccaggacggccaggtgcgaatggtggtcggagcagctgggggaacacagattactatggcaacagcgctcgcaattatatataacctgtggttcgggtatgacgtaaaatgggccgtcgaggagccacggcttcataatcagctgctgcccaacgttacgacggttgagagaaatatcgatcaagaggttaccgccgccttagagaccaggcaccatcatacacaaataacttccacattcattgccgttgtacaggctattgtccgtatggccggcgggtgggcggcggctagcgattccagaaagggtggggaaccggctggctactag

SEQ ID NO: 276978 - DNA, 678 bp, Artificial Sequence
  derived and/or modified sequence
atgaccagcgagttcttcagcgcccagctgcgggcccagatcagcgacgataccacccatccaatttcctattacaaacccgagttctatatgccagatgacggcggaacagctcatctttctgtcgttgccgaggatggaagtgccgtcagcgcaaccagcaccatcaatctatacttcggctccaaggtgaggtctcctgtgtcggggatccttctcaacaacgaaatggatgattttagcagcacatcaattaccaacgaattcggcgtcccgccaagccccgctaatttcattcagcctggcaaacagcctctgtcgagcatgtgcccaaccataatggtggggcaagacggccaggtcagaatggtcgtgggggctgctggtggaacccagattacgatggccacagctttagcgataatctacaatctgtggttcggctatgacgtcaaatgggcggtcgaagaaccacggctgcataaccagttgctgccaaatgtcacaactgtggaaaggaacatcgatcaggaagtcacggccgccctggagactaggcatcaccacacacaaatcacgagcacctttattgcagttgtccaggctatcgtacgtatggccggaggctgggcagctgcctctgactcccggaaaggcggggaaccagccggatattag

SEQ ID NO: 276979 - DNA, 678 bp, Artificial Sequence
  derived and/or modified sequence
atgaccagcgagttcttcagcgcccagctgcgggcccagatcagcgatgatacgacgcaccctatctcgtactataaacctgagttctatatgcccgacgacggcggcactgcacacctaagcgtggttgctgaagacggttcggcagtgagtgccaccagtacaatcaacctctactttggctcgaaggtccggagcccagtttccggcatactacttaataacgagatggatgatttcagctcaacgagtatcacaaatgagtttggcgtgcctccatcaccagcaaacttcattcagcccggaaaacaaccactgagcagcatgtgtccaaccatcatggtcgggcaggacgggcaggtgcggatggtcgtgggcgctgccggcggcacacagatcaccatggccactgcactggcaatcatctacaacctatggttcggatatgatgttaagtgggctgtggaggagccccgcctccacaaccaactcttacccaacgtaacaacggttgaacgaaacatcgaccaggaggttaccgctgcactcgagacacgtcaccaccacactcagattacctcgacctttatcgccgtcgtgcaagcaatcgtgcgtatggctgggggctgggccgcagcaagcgatagcaggaagggaggggaacctgctggttactag

SEQ ID NO: 276980 - DNA, 678 bp, Artificial Sequence
  derived and/or modified sequence
atgacctctgagttctttagcgctcagctgcgggcacaaatctccgatgataccactcacccaatatcatactacaaaccagaattctatatgccggatgacggcggaaccgcccacctctctgtggtcgccgaagatggctcagctgtgagtgccacgagcactataaacctatatttcggaagtaaggtgcgcagccctgtttccggcattctcctcaataacgaaatggacgatttctcttccacctcgatcactaatgaattcggagtgcccccatcccccgcaaatttcattcagcccggaaagcagccactgtcgtcgatgtgtcccacgatcatggtcgggcaggatggacaagtgcgcatggtcgtgggtgccgcaggcggtacgcaaattacgatggcaaccgctctcgcaatcatttataatctttggttcggttatgacgtcaaatgggccgtggaagagccccgattgcacaaccaactcttacccaacgtgactactgtggagcgaaatatcgatcaggaggtgacagccgcactggaaacacggcatcaccatactcagataacctctacattcattgccgtggtccaagcaatcgtcaggatggccggagggtgggccgctgcatccgactccagaaagggaggggaaccagcagggtattag

SEQ ID NO: 276981 - DNA, 678 bp, Artificial Sequence
  derived and/or modified sequence
atgactagcgagttcttttccgcccagttaagagctcagataagcgacgatactacacacccaataagctattacaagcccgagttttacatgcctgacgacggtggtacggctcacctgtctgtagtggccgaagatggcagtgcagtgtctgccacctcaacgataaatctgtatttcggttctaaagtgagatccccagtttccggaatattgctgaacaatgagatggacgacttttcaagcacctctatcaccaatgaattcggggtgccccctagccctgcaaatttcatccaacccggtaaacaaccgctctcatccatgtgccctaccatcatggtgggtcaggacggtcaggtgcggatggtggtgggcgctgcaggcggaactcagattacaatggccacggcactcgctattatatataatctgtggtttggatatgatgtgaaatgggcagtagaggaacctagactgcataaccaactgctgccgaatgtcaccactgtggagagaaacatcgatcaggaggtgacagccgctttagagactaggcaccatcacacacagataaccagcacattcatcgcagtggtgcaggccatcgtgcgaatggcaggcggatgggctgccgcaagcgacagcagaaaggggggagagccagccggatactag

SEQ ID NO: 276982 - DNA, 678 bp, Artificial Sequence
  derived and/or modified sequence
atgacttccgagttcttttcagcacagctacgtgcgcagatctcagatgacacgactcacccaattagctattataaaccggaattttacatgccagatgatggcggaaccgcccacctgtctgtcgtagccgaggacggcagcgcagtgagcgctacatctaccatcaatctgtattttggctccaaagtccgcagtccagtctcagggatactgttaaacaatgagatggatgacttctcgtcaacatcaattaccaatgaattcggcgtgccaccctcccctgctaactttattcaacctgggaagcagccactttcctcaatgtgtccgacgatcatggtcgggcaggacggccaagttaggatggtggtcggtgctgcgggtggcacccaaattaccatggccacagccctagcaatcatctacaatctgtggtttggctacgatgtcaagtgggcagtcgaagagccaagactacacaatcaactgctgccgaacgtgaccactgtggagcgtaacatagatcaggaggtaaccgcagccctcgaaacgcgtcatcatcacacacaaattacctccacatttatagctgtagttcaagccatcgtgagaatggccggaggctgggcagccgcaagcgactcccggaaggggggagagcccgctggctactag

SEQ ID NO: 276983 - DNA, 678 bp, Artificial Sequence
  derived and/or modified sequence
atgaccagcgagttcttcagcgcccagctgagagcccagatcagcgacgacaccacccaccccatcagctactacaagcccgagttctacatgcccgacgacggcggcaccgcccacctgagcgtggtggccgaggacggcagcgccgtgagcgccaccagcaccatcaacctgtacttcggcagcaaggtgagaagccccgtgagcggcatcctgctgaacaacgagatggacgacttcagcagcaccagcatcaccaacgagttcggcgtgccccccagccccgccaacttcatccagcccggcaagcagcccctgagcagcatgtgccccaccatcatggtgggccaggacggccaggtgagaatggtggtgggcgccgccggcggcacccagatcaccatggccaccgccctggccatcatctacaacctgtggttcggctacgacgtgaagtgggccgtggaggagcccagactgcacaaccagctgctgcccaacgtgaccaccgtggagagaaacatcgaccaggaggtgaccgccgccctggagaccagacaccaccacacccagatcaccagcaccttcatcgccgtggtgcaggccatcgtgagaatggccggcggctgggccgccgccagcgacagcagaaagggcggcgagcccgccggctactag

SEQ ID NO: 276984 - protein, 263 aa, Artificial Sequence
  derived and/or modified sequence
MAGLEVLFASAAPAITCRQDALVCFLHWEVVTHGYFGLGVGDQPGPNDKKSELLPAGWNNNKDLYVLRYEYKDGSRKLLVKAITVESSMILNVLEYGSQQVADLTLNLDDYIDAEHLGDFHRTYKNSEELRSRIVSGIITPIHEQWEKANVSSPHREFPPATAREVDPLRIPPHHPHTSRQPPWCDPLGPFVVGGEDLDPFGPRRGGMIVDPLRSGFPRALIDPSSGLPNRLPPGAVPPGARFDPFGPIGTSPPGPRPDRRGQ

SEQ ID NO: 276985 - protein, 175 aa, Artificial Sequence
  derived and/or modified sequence
MILNVLEYGSQQVADLTLNLDDYIDAEHLGDFHRTYKNSEELRSRIVSGIITPIHEQWEKANVSSPHREFPPATAREVDPLRIPPHHPHTSRQPPWCDPLGPFVVGGEDLDPFGPRRGGMIVDPLRSGFPRALIDPSSGLPNRLPPGAVPPGARFDPFGPIGTSPPGPRPDRRGQ

SEQ ID NO: 276986 - protein, 183 aa, Artificial Sequence
  derived and/or modified sequence
MAGLEVLFASAAPAITCRQDALVCFLHWEVVTHGYFGLGVGDQPGPNDKKSELLPAGWNNNKDLYVLRYEYKDGSRKLLVKAITVESSMILNVLEYGSQQVADLTLNLDDYIDAEHLGDFHRTYKNSEELRSRIVSGIITPIHEQWEKANVSSPHREFPPATAREVDPLRIPPHHPHTSRQPP

SEQ ID NO: 276987 - protein, 201 aa, Artificial Sequence
  derived and/or modified sequence
MAGLEVLFASAAPAITCRQDALVCFLHWEVVTHGYFGLGVGDQPGPNDKKSELLPAGWNNNKDLYVLRYEYKDGSRKLLVKAITVESSMILNVLEYGSQQVADLTLNLDDYIDAEHLGDFHRCDPLGPFVVGGEDLDPFGPRRGGMIVDPLRSGFPRALIDPSSGLPNRLPPGAVPPGARFDPFGPIGTSPPGPRPDRRGQ

SEQ ID NO: 276988 - protein, 367 aa, Artificial Sequence
  derived and/or modified sequence
MFDAGSTGTRVHVFQFTRPPRETPTLTHETFKALKPGLSAYADDVEKSAQGIRELLDVAKQDIPFDFWKATPLVLKATAGLRLLPGEKAQKLLQKVKKVFKASPFLVGDDCVSIMNGTDEGVSAWITINFLTGSLKTPGGSSVGMLDLGGGSTQIAFLPRVEGTLQASPPGYLTALRMFNRTYKLYSYSYLGLGLMSARLAILGGVEGQPAKDGKELVSPCLSPSFKGEWEHAEVTYRVSGQKAAASLHELCAARVSEVLQNRVHRTEEVKHVDFYAFSYYYDLAAGVGLIDAEKGGSLVVGDFEIAAKYGGSHLEREGTCLIPSVSDPGDTAAEQPLLMHGPHLRQPATPGVRLSQEQSAEAHSEN

SEQ ID NO: 276989 - protein, 295 aa, Artificial Sequence
  derived and/or modified sequence
  misc_feature (1)..(1): Xaa can be any naturally occurring amino acid
XVLKATAGLRLLPGEKAQKLLQKVKKVFKASPFLVGDDCVSIMNGTDEGVSAWITINFLTGSLKTPGGSSVGMLDLGGGSTQIAFLPRVEGTLQASPPGYLTALRMFNRTYKLYSYSYLGLGLMSARLAILGGVEGQPAKDGKELVSPCLSPSFKGEWEHAEVTYRVSGQKAAASLHELCAARVSEVLQNRVHRTEEVKHVDFYAFSYYYDLAAGVGLIDAEKGGSLVVGDFEIAAKYGGSHLEREGTCLIPSVSDPGDTAAEQPLLMHGPHLRQPATPGVRLSQEQSAEAHSEN

SEQ ID NO: 276990 - DNA, 2805 bp, Artificial Sequence
  derived and/or modified sequence
gtgcatggggcggagcccaggccctagggaatcgtggggtcgtatcccgcgggtggaggccggggtggcgccggccggggcgggggagcccaaaagaccggctgccgcctgctccccggaaaagggcactcgtctccgtgggtgtggcggagcgcgcggtgcatggaatgggctatgtgaatgaaaaaaggtatccgttatgaaacttccagaaaaacgagctacatttttcagcagccgcagcacggtccttggcaaacaaggatgagaaaaatatccaaccacgggagcctgcgggtggcgaaggtggcataccccctggggctgtgtgtgggcgtgttcatctatgttgcctacatcaagtggcaccgggccaccgccacccaggccttcttcagcatcaccagggcagccccgggggcccggtggggtcagcaggcccacagccccctggggacagctgcagacgggcacgaggtcttctacgggatcatgtttgatgcaggaagcactggcacccgagtacacgtcttccagttcacccggccccccagagaaactcccacgttaacccacgaaaccttcaaagcactgaagccaggtctttctgcctatgctgatgatgttgaaaagagcgctcagggaatccgggaactactggatgttgctaaacaggacattccgttcgacttctggaaggccacccctctggtcctcaaggccacagctggcttacgcctgttacctggagaaaaggcccagaagttactgcagaaggtgaaaaaagtatttaaagcatcgcctttccttgtaggggatgactgtgtttccatcatgaacggaacagatgaaggcgtttcggcgtggatcaccatcaacttcctgacaggcagcttgaaaactccaggagggagcagcgtgggcatgctggacttgggcggaggatccactcagatcgccttcctgccacgcgtggagggcaccctgcaggcctccccacccggctacctgacggcactgcggatgtttaacaggacctacaagctctattcctacagctacctcgggctcgggctgatgtcggcacgcctggcgatcctgggcggcgtggaggggcagcctgctaaggatggaaaggagttggtcagcccttgcttgtctcccagtttcaaaggagagtgggaacacgcagaagtcacgtacagggtttcagggcagaaagcagcggcaagcctgcacgagctgtgtgctgccagagtgtcagaggtccttcaaaacagagtgcacaggacggaggaagtgaagcatgtggacttctatgctttctcctactattacgaccttgcagctggtgtgggcctcatagatgcggagaagggaggcagcctggtggtgggggacttcgagatcgcagccaagtacggtgggagtcacctggagcgtgaagggacgtgtctcatccccagtgtgtcggaccctggagacacagccgcagagcagccccttctcatgcatggacctcacctacgtcagcctgctactccaggagttcggctttcccaggagcaaagtgctgaagctcactcggaaaattgacaatgttgagaccagctgggctctgggggccatttttcattacatcgactccctgaacagacagaagagtccagcctcatagtggccgagccatccctgtccccgtcagcagtgtctgtgtgtctgcataaaccctcctgtcctggacgtgacttcatcctgaggagccacagcacaggccgtgctggcactttctgcacactggctctgggacttgcagaaggcctggtgctgccctggcatcagcctcttccagtcacatctggccagagggctgtctggacctgggccctgctcaatgccacctgtctgcctgggctccaagtgggcaggaccaggacagaaccacaggcacacactgagggggcagtgtggctccctgcctgtcccatccccatgccccgtccgcggggctgtggctgctgctgtgcatgtccctgcgatgggagtcttgtctcccagcctgtcagtttcctccccagggcagagctccccttcctgcaagagtctgggaggcggtgcaggctgtcctggctgctctggggaagccgagggacagccataacacccccgggacagtaggtctgggcggcaccactgggaactctggacttgagtgtgtttgcctcttccttgggtatgaatgtgtgagttcacccagaggcctgctctcctcacacattgtgtggtttggggttaatgatggagggagacacctcctcatagacggcaggtgcccacctttcagggagtctcccagcatgggcggatgccgggcatgagctgctgtaaactatttgtggctgtgctgcttgagtgacgtctctgtcgtgtgggtgccaagtgcttgtgtagaaactgtgttctgagcccccttttctggacaccaactgtgtcctgtgaatgtatcgctactgtgagctgttcccgcctagccagggccatgtcttaggtgcagctgtgccacgggtcagctgagccacagtcccagaaccaagctctcggtgtctcgggccaccatccgcccacctcgggctgaccccacctcctccatggacagtgtgagccccgggccgtgcatcctgctcagtgtggcgtcagtgtcggggctgagccccttgagctgcttcagtgaatgtacagtgcccggcacgagctgaacctcatgtgttccactcccaataaaaggttgacaggggcttctccttc

SEQ ID NO: 276991 - protein, 296 aa, Artificial Sequence
  derived and/or modified sequence
MPQHGPWQTRMRKISNHGSLRVAKVAYPLGLCVGVFIYVAYIKWHRATATQAFFSITRAAPGARWGQQAHSPLGTAADGHEVFYGIMFDAGSTGTRVHVFQFTRPPRETPTLTHETFKALKPGLSAYADDVEKSAQGIRELLDVAKQDIPFDFWKATPLVLKATAGLRLLPGEKAQKLLQKVKKVFKASPFLVGDDCVSIMNGTDEGVSAWITINFLTGSLKTPGGSSVGMLDLGGGSTQIAFLPRVEGTLQASPPGYLTALRMFNRTYKLYSYSYLGLGLMSARLAILGGVEGQP

SEQ ID NO: 276992 - DNA, 2371 bp, Artificial Sequence
  derived and/or modified sequence
gtgcatggggcggagcccaggccctagggaatcgtggggtcgtatcccgcgggtggaggccggggtggcgccggccggggcgggggagcccaaaagaccggctgccgcctgctccccggaaaagggcactcgtctccgtgggtgtggcggagcgcgcggtgcatgaaactcccacgttaacccacgaaaccttcaaagcactgaagccaggtctttctgcctatgctgatgatgttgaaaagagcgctcagggaatccgggaactactggatgttgctaaacaggacattccgttcgacttctggaaggccacccctctggtcctcaaggccacagctggcttacgcctgttacctggagaaaaggcccagaagttactgcagaaggtgaaaaaagtatttaaagcatcgcctttccttgtaggggatgactgtgtttccatcatgaacggaacagatgaaggcgtttcggcgtggatcaccatcaacttcctgacaggcagcttgaaaactccaggagggagcagcgtgggcatgctggacttgggcggaggatccactcagatcgccttcctgccacgcgtggagggcaccctgcaggcctccccacccggctacctgacggcactgcggatgtttaacaggacctacaagctctattcctacagctacctcgggctcgggctgatgtcggcacgcctggcgatcctgggcggcgtggaggggcagcctgctaaggatggaaaggagttggtcagcccttgcttgtctcccagtttcaaaggagagtgggaacacgcagaagtcacgtacagggtttcagggcagaaagcagcggcaagcctgcacgagctgtgtgctgccagagtgtcagaggtccttcaaaacagagtgcacaggacggaggaagtgaagcatgtggacttctatgctttctcctactattacgaccttgcagctggtgtgggcctcatagatgcggagaagggaggcagcctggtggtgggggacttcgagatcgcagccaagtacgtgtgtcggaccctggagacacagccgcagagcagccccttctcatgcatggacctcacctacgtcagcctgctactccaggagttcggctttcccaggagcaaagtgctgaagctcactcggaaaattgacaatgttgagaccagctgggctctgggggccatttttcattacatcgactccctgaacagacagaagagtccagcctcatagtggccgagccatccctgtccccgtcagcagtgtctgtgtgtctgcataaaccctcctgtcctggacgtgacttcatcctgaggagccacagcacaggccgtgctggcactttctgcacactggctctgggacttgcagaaggcctggtgctgccctggcatcagcctcttccagtcacatctggccagagggctgtctggacctgggccctgctcaatgccacctgtctgcctgggctccaagtgggcaggaccaggacagaaccacaggcacacactgagggggcagtgtggctccctgcctgtcccatccccatgccccgtccgcggggctgtggctgctgctgtgcatgtccctgcgatgggagtcttgtctcccagcctgtcagtttcctccccagggcagagctccccttcctgcaagagtctgggaggcggtgcaggctgtcctggctgctctggggaagccgagggacagccataacacccccgggacagtaggtctgggcggcaccactgggaactctggacttgagtgtgtttgcctcttccttgggtatgaatgtgtgagttcacccagaggcctgctctcctcacacattgtgtggtttggggttaatgatggagggagacacctcctcatagacggcaggtgcccacctttcagggagtctcccagcatgggcggatgccgggcatgagctgctgtaaactatttgtggctgtgctgcttgagtgacgtctctgtcgtgtgggtgccaagtgcttgtgtagaaactgtgttctgagcccccttttctggacaccaactgtgtcctgtgaatgtatcgctactgtgagctgttcccgcctagccagggccatgtcttaggtgcagctgtgccacgggtcagctgagccacagtcccagaaccaagctctcggtgtctcgggccaccatccgcccacctcgggctgaccccacctcctccatggacagtgtgagccccgggccgtgcatcctgctcagtgtggcgtcagtgtcggggctgagccccttgagctgcttcagtgaatgtacagtgcccggcacgagctgaacctcatgtgttccactcccaataaaaggttgacaggggcttctccttc

SEQ ID NO: 276993 - DNA, 1104 bp, Artificial Sequence
  derived and/or modified sequence
atgttcgatgcaggctccacaggcacccgggtgcatgtgtttcagttcacccgcccccctcgcgagacacccactctcacacatgagacttttaaggctctaaaaccaggcctctcggcttacgcggacgacgttgaaaaatccgcacagggtataagagagctccttgatgtggccaagcaggacattccttttgacttctggaaggctacgcccttggttctgaaggccaccgcgggcctgagactgctcccaggcgagaaagcccaaaagttattacagaaagtcaagaaagtgttcaaagcatcaccttttctcgtgggagatgactgcgtctcgattatgaatggaaccgacgaaggagtctccgcctggataaccataaacttccttactggaagcctaaagacccctggtggcagctccgttggcatgctggatctgggtggaggaagtacccagattgcttttcttcctagagtagaggggacacttcaggcctcccccccgggatacctgacggccctccgcatgtttaataggacctataaactttactcctacagctacctggggctggggctgatgtctgctcgcttggccatcctgggcggagtggaaggacaaccagccaaggacggcaaagagttagtgtcaccctgtcttagcccatctttcaagggcgaatgggagcatgcagaggttacttatcgggtttcaggccagaaagctgctgcttccctgcacgagttatgtgccgcgcgcgtcagtgaggtactgcagaacagggttcatcggactgaggaagtgaaacacgttgatttctatgccttctcgtactattatgacttggccgccggggtgggcctcattgatgccgaaaaaggcggctctctagtcgtgggtgactttgaaattgctgcaaagtatggaggtagccacctcgagagggaggggacctgtcttataccttctgtgagcgacccaggggataccgctgcagaacagccactgctgatgcacggaccacaccttaggcaaccagccacccctggagtgagactctctcaggagcagagcgctgaagctcactccgagaactag

SEQ ID NO: 276994 - DNA, 888 bp, Artificial Sequence
  derived and/or modified sequence
tgagtcctgaaggcaacggccggcctgcgactcctacctggggaaaaggcccagaagctattgcaaaaggtaaagaaggtgttcaaggccagtccattcctggttggtgatgactgtgtgagtatcatgaatggaactgatgaaggagtctctgcttggatcaccatcaactttctaactggttctttgaagacgccaggaggaagtagcgtgggcatgttggatctgggcggaggatccacccagatcgcatttctgccacgcgtcgaaggcacgttacaggcctcccctcccggctatctgacggctctccggatgttcaatagaacctataaactgtacagttattcatacttgggcctaggcttgatgtcagcccgcttggccattctggggggggtcgagggtcaaccagccaaggacggaaaagagctggtgagcccttgcttaagtccctccttcaagggggagtgggaacacgcagaggtcacctatagggtgagcggccagaaagcagcagccagcttgcatgaactctgtgccgctcgggtaagtgaagttctgcagaatagagtacatagaacggaagaggtcaaacacgtggacttctatgccttctcctactactatgatctggccgccggcgttggactgatcgatgccgagaagggtggctccctcgtcgtgggcgatttcgaaatcgctgcaaaatacgggggttcccatctcgagagggaaggaacatgcttgattccctccgtgtcggaccccggcgacaccgccgcggagcagcctctattaatgcatgggccccatctcagacagcccgctacgcccggggtccgcctgagtcaggagcagagcgctgaagcacatagcgaaaattag

SEQ ID NO: 276995 - DNA, 1104 bp, Artificial Sequence
  derived and/or modified sequence
atgtttgatgctggcagcacaggcaccagggtgcacgtgttccagttcaccaggcctccccgggagacccccaccctgacccatgagaccttcaaggccctgaagccaggcctgagcgcctatgcagatgatgtggagaagagcgcccagggcatccgggagctgctggatgtggccaagcaggacatcccctttgacttctggaaggccacccccctggtgctgaaggccacagctggcctgcggctgctgcctggagagaaggcccagaagctgctgcagaaggtgaagaaggtgttcaaggccagccccttcctggtgggagatgactgtgtgtccatcatgaatggaacagatgaaggagtgtctgcctggatcaccatcaacttcctgaccggcagcctgaagacccctgggggcagctctgtgggcatgctggacctgggcggcggcagcacccagatcgccttcctgccccgggtggagggcaccctgcaggccagccccccaggctacctgacagccctgaggatgttcaacagaacctacaagctgtacagctacagctacctgggcctgggcctgatgtctgcccggctggccatcctgggcggcgtggagggccagcctgccaaggatggcaaggagctggtgagcccctgcctgagccccagcttcaagggggagtgggagcacgccgaggtgacctacagagtgtctggccagaaggctgctgccagcctgcacgagctgtgtgccgcccgggtgtctgaggtgctgcagaacagagtgcacaggacagaggaggtgaagcacgtggacttctacgccttctcctactactatgacctggccgccggcgtgggcctgattgatgctgagaagggcggcagcctggtggtgggggactttgaaattgctgccaagtatggaggcagccacctggagcgggagggcacctgcctgatccccagcgtgtctgaccccggggacacagctgctgagcagcccctgctgatgcacggcccccacctgcggcagcctgccaccccaggagtgcggctgagccaggagcagagcgctgaggcccacagcgagaactag

SEQ ID NO: 276996 - DNA, 888 bp, Artificial Sequence
  derived and/or modified sequence
tgagtgctgaaggccacagctggcctgcggctgctgcctggagagaaggcccagaagctgctgcagaaggtgaagaaggtgttcaaggccagccccttcctggtgggagatgactgtgtgtccatcatgaatggaacagatgaaggagtgtctgcctggatcaccatcaacttcctgaccggcagcctgaagacccctgggggcagctctgtgggcatgctggacctgggcggcggcagcacccagatcgccttcctgccccgggtggagggcaccctgcaggccagccccccaggctacctgacagccctgaggatgttcaacagaacctacaagctgtacagctacagctacctgggcctgggcctgatgtctgcccggctggccatcctgggcggcgtggagggccagcctgccaaggatggcaaggagctggtgagcccctgcctgagccccagcttcaagggggagtgggagcacgccgaggtgacctacagagtgtctggccagaaggctgctgccagcctgcacgagctgtgtgccgcccgggtgtctgaggtgctgcagaacagagtgcacaggacagaggaggtgaagcacgtggacttctacgccttctcctactactatgacctggccgccggcgtgggcctgattgatgctgagaagggcggcagcctggtggtgggggactttgaaattgctgccaagtatggaggcagccacctggagcgggagggcacctgcctgatccccagcgtgtctgaccccggggacacagctgctgagcagcccctgctgatgcacggcccccacctgcggcagcctgccaccccaggagtgcggctgagccaggagcagagcgctgaggcccacagcgagaactag

SEQ ID NO: 276997 - DNA, 1104 bp, Artificial Sequence
  derived and/or modified sequence
atgttcgacgccggcagcaccggcacccgggtgcacgtgttccagtttacacgaccacccagagaaactcctacattaacgcatgagacttttaaggcgctaaagcccggcctatctgcctacgccgacgatgtcgagaagtcggctcaggggatacgggagctgctggatgtcgcaaaacaggatatacccttcgatttttggaaagcaactcctctggtactcaaggccaccgccggcttgcgcctgttgcccggcgagaaggcgcagaaactgctccagaaggtgaagaaggtattcaaggcctctccgttcctcgtgggtgacgattgcgtttcaatcatgaatggcaccgatgaaggagtatccgcatggataacaattaatttcctgactggcagtctcaagaccccaggaggctcttccgtcggcatgctggatctggggggcggatctacccaaatcgcatttctcccacgcgtcgaagggactctgcaggcaagcccccctggctacctcaccgccttacggatgttcaatagaacctataagctctattcctatagctaccttggattgggcctgatgtcagcacgcctcgcaattttagggggggtggaggggcagccagctaaagatggcaaggagttggtctcgccgtgtctttccccctcgttcaagggcgagtgggagcacgcggaagttacgtatagagtgtccgggcaaaaagcagcagcgtccctccacgagctatgtgccgcccgagtatcagaagtccttcagaatcgagttcataggacggaggaagttaagcacgttgacttttacgccttttcttactattatgacttagctgcgggcgtcgggctgatcgacgcggagaagggcggctctcttgtggtgggggacttcgaaattgccgcaaaatacggcggatctcacctggagcgagagggcacttgtctgatcccctccgtatctgaccctggcgacactgcggctgaacagccgctcctgatgcatggtccccacctgaggcaaccagccacgccaggcgtgagactttctcaggaacagagcgccgaggcgcactccgagaactag

SEQ ID NO: 276998 - DNA, 888 bp, Artificial Sequence
  derived and/or modified sequence
tgagtgctgaaggccaccgccggcctgcggctgctgcccggcgagaaagcccagaagttgctgcagaaggtgaaaaaggttttcaaagcttccccttttctggtaggcgatgactgtgttagcatcatgaacgggacggacgagggagtctcagcatggataaccataaatttcctgacagggtccttaaaaacccccgggggatcaagtgtcggaatgctggacctgggaggtggttccacccagatcgccttcctgccacgggtagagggcacactccaggcatcgccacctggatacctgaccgccttacgcatgttcaaccgcacatacaagctatactcatatagttacctgggactggggctcatgagcgcgcgactcgctattctgggaggcgtcgagggtcagccggctaaggacgggaaggaattagtctctccttgcctcagcccctcttttaaaggagaatgggagcacgccgaagtcacttaccgggtgtctggccagaaagccgccgccagtcttcacgaactctgtgctgccagggtgtccgaagtacttcagaaccgtgtgcaccggacagaagaggtaaaacacgtggatttttatgctttcagctactattatgatctggcggctggcgtcggtcttatcgatgccgagaaaggaggctcactggtcgttggcgatttcgaaatcgcagctaagtacggagggtcccacctggaaagggaagggacctgccttattccctcggtgagtgaccccggagacacagcagccgagcaacccttgctcatgcatggaccccatcttcgccagcccgccacacccggagtcagactctctcaggaacaatccgctgaggcacattctgaaaattag

SEQ ID NO: 276999 - DNA, 1104 bp, Artificial Sequence
  derived and/or modified sequence
atgtttgatgcaggatccacaggcacccgggtgcacgtgttccagtttacacgcccacccagggaaactcccacgttgacgcacgaaactttcaaggctctcaagcctggactgagcgcctacgccgacgatgtggaaaaaagcgctcaggggatcagggagctgctcgatgtcgctaaacaggatatcccattcgatttctggaaagcgactccacttgtgctgaaagcaacggctgggttgaggctgctaccaggtgaaaaggcccagaagctgctccaaaaagttaaaaaggtgttcaaagcttccccatttctggtgggggacgactgtgtaagcataatgaacggcactgatgagggcgtatctgcctggattactatcaactttctgaccggtagtctgaagacgccaggcggtagcagcgtcggaatgctggatctgggaggaggcagcacgcagatcgcttttctgccacgggtcgagggcactctccaggccagcccaccaggctacctaactgctctgagaatgtttaatcgcacatacaagctctatagctacagttatttgggcctcgggttgatgagtgcaaggctcgccatcctgggcggagtggagggccagccggcaaaagacgggaaggaactggtgtccccttgcttatcacctagttttaaaggcgaatgggaacacgcagaggtcacatatcgggtgtcaggccagaaggctgccgcttcccttcatgagctttgtgcggcaagagtgtccgaggtactgcagaacagggtacaccggactgaagaggtaaaacacgtagacttttatgcattttcctattactacgatctcgccgcaggcgtgggactgattgatgctgaaaagggaggctcactggtggtgggcgacttcgagatcgcggctaaatacgggggaagtcatctcgagagagaaggcacgtgtctcatccccagcgtgagtgatcccggtgacacagcagctgaacaacctctgttgatgcatgggccacacctgcgccagccggcaaccccaggcgtccgcctcagtcaagagcagagcgcagaggctcactcagagaattag

SEQ ID NO: 277000 - DNA, 888 bp, Artificial Sequence
  derived and/or modified sequence
tgagtgctcaaagcaactgcagggttgaggctcttgcccggagaaaaggcccagaaattgcttcagaaagtgaaaaaagtgtttaaggcatccccgtttcttgtgggcgacgactgcgtgagtatcatgaatggcacggatgaaggggtctccgcctggataaccattaacttcctgactggaagcttgaagaccccaggcggtagctctgtgggcatgcttgatctgggcggaggatctacgcagatagccttcttacctcgcgttgagggaaccctacaggctagtcctccaggctacctgacagccctgaggatgtttaatcgcacgtacaaactgtattcttactcgtacctggggctgggcctgatgagcgctcggctggcaatactaggcggtgtggagggacagcccgctaaagatggcaaggagctagtgtccccctgtctctctccctcttttaaaggggaatgggagcacgccgaagtcacataccgggtctcgggtcagaaggctgccgcttcgttgcacgaactctgtgcagcacgcgtttctgaggttcttcagaaccgcgtccacaggaccgaagaggtaaagcacgtcgacttttatgccttttcctattactacgatctggccgctggtgtcggcctgatagacgcagaaaaggggggtagcttagtggtcggtgatttcgagatagcggcaaagtacggcggttctcatttggaacgggaggggacctgcttaatcccgagcgtgtcggatccgggtgatacagccgcagagcagccgctgcttatgcatggccctcacctgagacagcctgccacacctggggtgcggttaagtcaggaacagtccgcggaggcacactctgaaaactag

SEQ ID NO: 277001 - DNA, 1104 bp, Artificial Sequence
  derived and/or modified sequence
atgttcgacgccggcagcaccggcaccagagtgcacgtgttccagttcaccagaccccccagagagacccccaccctgacccacgagaccttcaaggccctgaagcccggcctgagcgcctacgccgacgacgtggagaagagcgcccagggcatcagagagctgctggacgtggccaagcaggacatccccttcgacttctggaaggccacccccctggtgctgaaggccaccgccggcctgagactgctgcccggcgagaaggcccagaagctgctgcagaaggtgaagaaggtgttcaaggccagccccttcctggtgggcgacgactgcgtgagcatcatgaacggcaccgacgagggcgtgagcgcctggatcaccatcaacttcctgaccggcagcctgaagacccccggcggcagcagcgtgggcatgctggacctgggcggcggcagcacccagatcgccttcctgcccagagtggagggcaccctgcaggccagcccccccggctacctgaccgccctgagaatgttcaacagaacctacaagctgtacagctacagctacctgggcctgggcctgatgagcgccagactggccatcctgggcggcgtggagggccagcccgccaaggacggcaaggagctggtgagcccctgcctgagccccagcttcaagggcgagtgggagcacgccgaggtgacctacagagtgagcggccagaaggccgccgccagcctgcacgagctgtgcgccgccagagtgagcgaggtgctgcagaacagagtgcacagaaccgaggaggtgaagcacgtggacttctacgccttcagctactactacgacctggccgccggcgtgggcctgatcgacgccgagaagggcggcagcctggtggtgggcgacttcgagatcgccgccaagtacggcggcagccacctggagagagagggcacctgcctgatccccagcgtgagcgaccccggcgacaccgccgccgagcagcccctgctgatgcacggcccccacctgagacagcccgccacccccggcgtgagactgagccaggagcagagcgccgaggcccacagcgagaactag

SEQ ID NO: 277002 - DNA, 888 bp, Artificial Sequence
  derived and/or modified sequence
tgagtgctgaaggccaccgccggcctgagactgctgcccggcgagaaggcccagaagctgctgcagaaggtgaagaaggtgttcaaggccagccccttcctggtgggcgacgactgcgtgagcatcatgaacggcaccgacgagggcgtgagcgcctggatcaccatcaacttcctgaccggcagcctgaagacccccggcggcagcagcgtgggcatgctggacctgggcggcggcagcacccagatcgccttcctgcccagagtggagggcaccctgcaggccagcccccccggctacctgaccgccctgagaatgttcaacagaacctacaagctgtacagctacagctacctgggcctgggcctgatgagcgccagactggccatcctgggcggcgtggagggccagcccgccaaggacggcaaggagctggtgagcccctgcctgagccccagcttcaagggcgagtgggagcacgccgaggtgacctacagagtgagcggccagaaggccgccgccagcctgcacgagctgtgcgccgccagagtgagcgaggtgctgcagaacagagtgcacagaaccgaggaggtgaagcacgtggacttctacgccttcagctactactacgacctggccgccggcgtgggcctgatcgacgccgagaagggcggcagcctggtggtgggcgacttcgagatcgccgccaagtacggcggcagccacctggagagagagggcacctgcctgatccccagcgtgagcgaccccggcgacaccgccgccgagcagcccctgctgatgcacggcccccacctgagacagcccgccacccccggcgtgagactgagccaggagcagagcgccgaggcccacagcgagaactag

SEQ ID NO: 277003 - DNA, 2100 bp, Artificial Sequence
  derived and/or modified sequence
ggtcctcaaggccacagctggcttacgcctgttacctggagaaaaggcccagaagttactgcagaaggtgaaaaaagtatttaaagcatcgcctttccttgtaggggatgactgtgtttccatcatgaacggaacagatgaaggcgtttcggcgtggatcaccatcaacttcctgacaggcagcttgaaaactccaggagggagcagcgtgggcatgctggacttgggcggaggatccactcagatcgccttcctgccacgcgtggagggcaccctgcaggcctccccacccggctacctgacggcactgcggatgtttaacaggacctacaagctctattcctacagctacctcgggctcgggctgatgtcggcacgcctggcgatcctgggcggcgtggaggggcagcctgctaaggatggaaaggagttggtcagcccttgcttgtctcccagtttcaaaggagagtgggaacacgcagaagtcacgtacagggtttcagggcagaaagcagcggcaagcctgcacgagctgtgtgctgccagagtgtcagaggtccttcaaaacagagtgcacaggacggaggaagtgaagcatgtggacttctatgctttctcctactattacgaccttgcagctggtgtgggcctcatagatgcggagaagggaggcagcctggtggtgggggacttcgagatcgcagccaagtacggtgggagtcacctggagcgtgaagggacgtgtctcatccccagtgtgtcggaccctggagacacagccgcagagcagccccttctcatgcatggacctcacctacgtcagcctgctactccaggagttcggctttcccaggagcaaagtgctgaagctcactcggaaaattgacaatgttgagaccagctgggctctgggggccatttttcattacatcgactccctgaacagacagaagagtccagcctcatagtggccgagccatccctgtccccgtcagcagtgtctgtgtgtctgcataaaccctcctgtcctggacgtgacttcatcctgaggagccacagcacaggccgtgctggcactttctgcacactggctctgggacttgcagaaggcctggtgctgccctggcatcagcctcttccagtcacatctggccagagggctgtctggacctgggccctgctcaatgccacctgtctgcctgggctccaagtgggcaggaccaggacagaaccacaggcacacactgagggggcagtgtggctccctgcctgtcccatccccatgccccgtccgcggggctgtggctgctgctgtgcatgtccctgcgatgggagtcttgtctcccagcctgtcagtttcctccccagggcagagctccccttcctgcaagagtctgggaggcggtgcaggctgtcctggctgctctggggaagccgagggacagccataacacccccgggacagtaggtctgggcggcaccactgggaactctggacttgagtgtgtttgcctcttccttgggtatgaatgtgtgagttcacccagaggcctgctctcctcacacattgtgtggtttggggttaatgatggagggagacacctcctcatagacggcaggtgcccacctttcagggagtctcccagcatgggcggatgccgggcatgagctgctgtaaactatttgtggctgtgctgcttgagtgacgtctctgtcgtgtgggtgccaagtgcttgtgtagaaactgtgttctgagcccccttttctggacaccaactgtgtcctgtgaatgtatcgctactgtgagctgttcccgcctagccagggccatgtcttaggtgcagctgtgccacgggtcagctgagccacagtcccagaaccaagctctcggtgtctcgggccaccatccgcccacctcgggctgaccccacctcctccatggacagtgtgagccccgggccgtgcatcctgctcagtgtggcgtcagtgtcggggctgagccccttgagctgcttcagtgaatgtacagtgcccggcacgagctgaacctcatgtgttccactcccaataaaaggttgacaggggcttctccttctctgg

SEQ ID NO: 277004 - protein, 311 aa, Artificial Sequence
  derived and/or modified sequence
  misc_feature (1)..(1): Xaa can be any naturally occurring amino acid
XGSTGTRVHVFQFTRPPRETPTLTHETFKALKPGLSAYADDVEKSAQGIRELLDVAKQDIPFDFWKATPLVLKATAGLRLLPGEKAQKLLQKVKKVFKASPFLVGDDCVSIMNGTDEGVSAWITINFLTGSLKTPGGSSVGMLDLGGGSTQIAFLPRVEGTLQASPPGYLTALRMFNRTYKLYSYSYLGLGLMSARLAILGGVEGQPAASLHELCAARVSEVLQNRVHRTEEVKHVDFYAFSYYYDLAAGVGLIDAEKGGSLVVGDFEIAAKYVCRTLETQPQSSPFSCMDLTYVSLLLQEFGFPRSKVLK

SEQ ID NO: 277005 - DNA, 936 bp, Artificial Sequence
  derived and/or modified sequence
tagggctctacaggcacgcgcgtccatgtgttccaattcactaggcctccacgggaaacacctactctgacacatgaaacattcaaagcattaaaacccggcttaagcgcctacgccgacgacgtagagaaatcggctcagggaattagggagttgctggacgtggctaaacaggacataccattcgacttttggaaggccacacctcttgtactgaaggcaacagctgggttgaggttactgcctggggagaaggcacagaaactcctccaaaaagtcaaaaaagtcttcaaggcaagtccctttctcgtgggcgatgattgtgtgtcgataatgaatggcacggatgagggtgtttccgcatggattaccatcaacttcctcaccgggtcactgaagactccaggggggagcagcgtcggtatgctcgaccttggaggaggctctacacaaattgcatttctcccgcgagtggaggggacactgcaagcgagtccacctggatatcttactgcccttcgcatgtttaaccgcacgtataagctctactcctactcgtatctaggcctgggccttatgagtgccaggctggcgatccttggaggcgtagagggccagcccgccgctagtctgcacgagctatgtgctgctagagtgagcgaagttctccagaaccgagtgcatcgcactgaagaggttaaacatgtggacttctatgcattcagctactactatgacttggccgcaggggtaggactcatcgatgccgagaagggcggcagcctcgtggtgggagactttgagattgccgctaaatacgtatgtcggactcttgagacacaacctcagagctctcctttctcctgtatggatctcacgtacgtttctcttttgttacaagaattcggttttccacgatctaaggttctcaaatag

SEQ ID NO: 277006 - DNA, 936 bp, Artificial Sequence
  derived and/or modified sequence
tgaggaagcacaggcaccagggtgcacgtgttccagttcacccggcccccccgggagacccccaccctgacccatgagaccttcaaggccctgaagccaggcctgagcgcctatgcagatgatgtggagaagagcgcccagggcatccgggagctgctggatgtggccaagcaggacatcccctttgacttctggaaggccacccccctggtgctgaaggccacagctggcctgcggctgctgcccggggagaaggcccagaagctgctgcagaaggtgaagaaggtgttcaaggccagccccttcctggtgggagatgactgtgtgtccatcatgaatggaacagatgagggcgtgtctgcctggatcaccatcaacttcctgaccggcagcctgaagaccccaggcggcagctctgtgggcatgctggacctgggcggcggcagcacccagatcgccttcctgccccgggtggagggcaccctgcaggccagccccccaggctacctgacagccctgaggatgttcaacagaacctacaagctgtacagctacagctacctgggcctgggcctgatgtctgcccggctggccatcctgggcggcgtggagggccagcctgctgccagcctgcacgagctgtgtgccgcccgggtgtctgaggtgctgcagaacagagtgcacaggacagaggaggtgaagcacgtggacttctacgccttctcctactactatgacctggccgccggcgtgggcctgattgatgctgagaagggcggcagcctggtggtgggggactttgaaattgctgccaagtatgtgtgcaggaccctggagacccagccccagagcagccccttcagctgcatggacctgacctacgtgtccctgctgctgcaggagtttggcttccccaggagcaaggtgctgaagtag

SEQ ID NO: 277007 - DNA, 936 bp, Artificial Sequence
  derived and/or modified sequence
tgaggcagcaccggcacccgggtgcacgtgttccagttcacccggccccccagggagacccctacactgacacacgaaactttcaaagctctgaagccaggcctgtctgcttacgccgatgacgtcgagaaaagtgcgcaaggcatccgcgaacttctggatgtcgcaaagcaagacattccgttcgatttttggaaggcgacaccactagtccttaaggctacggccgggctgcgcttactgccgggggagaaggcccagaagttgctgcaaaaggttaagaaggtttttaaagccagcccttttctggtaggagatgattgcgtctctataatgaacggcacggatgaaggggtctccgcttggattaccattaatttccttacaggctcactgaaaaccccaggggggtcttccgtcggaatgttagatctcggtggcgggtctacccagatcgcatttctgcctagagtcgagggtacattgcaggccagcccgcctggctacctgacagctttgcggatgttcaataggacatacaagctctactcatatagctatctggggctaggtctgatgtcggcgcggctggccattttaggtggcgtcgaaggccagcccgccgccagcctgcacgaattatgcgccgcgcgggtaagcgaggtcctacagaatagggtccacagaaccgaggaggtcaagcatgtagacttctacgctttctcgtattattacgatttagcagcaggcgtggggcttatagacgcagagaaaggcggttctctggtcgtgggcgattttgagattgctgccaagtacgtctgtcggacattagagacgcaaccccaatcctcccccttctcttgcatggatttaacatatgtctctcttttgttgcaggaatttggattccctaggtccaaggtcctcaagtag

SEQ ID NO: 277008 - DNA, 936 bp, Artificial Sequence
  derived and/or modified sequence
tgaggctcgaccggcacacgcgtgcatgtgttccaatttacccggccaccacgggagactccgactctgacccatgagacgttcaaagcccttaagccagggttgtcggcatacgcagatgatgtggagaagagcgcgcaaggcatccgcgaacttttagatgtggctaagcaggacataccatttgacttttggaaagctactcccctggtcctgaaggcaaccgcaggactgcgcctgctgcccggagaaaaggcgcaaaagctgctccaaaaagtgaaaaaggttttcaaggcttccccattcctggttggagacgactgtgtgagcattatgaacgggactgatgaaggggtgtccgcctggattacaatcaatttcttgacagggagcctgaagacccccggtggcagcagtgtaggcatgctggatctgggcggaggctccactcaaattgcatttctgcctagagttgaagggacccttcaggcctcccctccagggtacctgactgctctccgtatgtttaaccggacctataaactatacagctattcttaccttggtctcggcctcatgagcgcgagacttgctattcttggcggtgtggaggggcaacctgccgctagtctgcatgagctgtgcgctgctagagtttccgaagtgttgcagaatcgggttcatcgcaccgaagaagtgaagcacgtggatttttacgcttttagttactactatgaccttgcagctggtgttggcctaatcgatgccgagaagggtggatcattagtggtgggagattttgaaattgccgctaagtatgtgtgtcgcaccctggagactcaacctcagtccagccctttctcctgcatggacctaacttatgtgagcctgctgctgcaggagttcggcttccccaggagtaaggtgcttaagtag

SEQ ID NO: 277009 - DNA, 936 bp, Artificial Sequence
  derived and/or modified sequence
tgaggcagcaccggcaccagagtgcacgtgttccagttcaccagaccccccagagagacccccaccctgacccacgagaccttcaaggccctgaagcccggcctgagcgcctacgccgacgacgtggagaagagcgcccagggcatcagagagctgctggacgtggccaagcaggacatccccttcgacttctggaaggccacccccctggtgctgaaggccaccgccggcctgagactgctgcccggcgagaaggcccagaagctgctgcagaaggtgaagaaggtgttcaaggccagccccttcctggtgggcgacgactgcgtgagcatcatgaacggcaccgacgagggcgtgagcgcctggatcaccatcaacttcctgaccggcagcctgaagacccccggcggcagcagcgtgggcatgctggacctgggcggcggcagcacccagatcgccttcctgcccagagtggagggcaccctgcaggccagcccccccggctacctgaccgccctgagaatgttcaacagaacctacaagctgtacagctacagctacctgggcctgggcctgatgagcgccagactggccatcctgggcggcgtggagggccagcccgccgccagcctgcacgagctgtgcgccgccagagtgagcgaggtgctgcagaacagagtgcacagaaccgaggaggtgaagcacgtggacttctacgccttcagctactactacgacctggccgccggcgtgggcctgatcgacgccgagaagggcggcagcctggtggtgggcgacttcgagatcgccgccaagtacgtgtgcagaaccctggagacccagccccagagcagccccttcagctgcatggacctgacctacgtgagcctgctgctgcaggagttcggcttccccagaagcaaggtgctgaagtag

SEQ ID NO: 277010 - DNA, 932 bp, Artificial Sequence
  derived and/or modified sequence
caggaagcactggcacccgagtacacgtcttccagttcacccggccccccagagaaactcccacgttaacccacgaaaccttcaaagcactgaagccaggtctttctgcctatgctgatgatgttgaaaagagcgctcagggaatccgggaactactggatgttgctaaacaggacattccgttcgacttctggaaggccacccctctggtcctcaaggccacagctggcttacgcctgttacctggagaaaaggcccagaagttactgcagaaggtgaaaaaagtatttaaagcatcgcctttccttgtaggggatgactgtgtttccatcatgaacggaacagatgaaggcgtttcggcgtggatcaccatcaacttcctgacaggcagcttgaaaactccaggagggagcagcgtgggcatgctggacttgggcggaggatccactcagatcgccttcctgccacgcgtggagggcaccctgcaggcctccccacccggctacctgacggcactgcggatgtttaacaggacctacaagctctattcctacagctacctcgggctcgggctgatgtcggcacgcctggcgatcctgggcggcgtggaggggcagcctgcggcaagcctgcacgagctgtgtgctgccagagtgtcagaggtccttcaaaacagagtgcacaggacggaggaagtgaagcatgtggacttctatgctttctcctactattacgaccttgcagctggtgtgggcctcatagatgcggagaagggaggcagcctggtggtgggggacttcgagatcgcagccaagtacgtgtgtcggaccctggagacacagccgcagagcagccccttctcatgcatggacctcacctacgtcagcctgctactccaggagttcggctttcccaggagcaaagtgctgaag

SEQ ID NO: 277011 - protein, 437 aa, Artificial Sequence
  derived and/or modified sequence
MKKGIRYETSRKTSYIFQQPQHGPWQTRMRKISNHGSLRVAKVAYPLGLCVGVFIYVAYIKWHRATATQAFFSITRAAPGARWGQQAHSPLGTAADGHEVFYGIMFDAGSTGTRVHVFQFTRPPRETPTLTHETFKALKPGLSAYADDVEKSAQGIRELLDVAKQDIPFDFWKATPLVLKATAGLRLLPGEKAQKLLQKVKKVFKASPFLVGDDCVSIMNGTDEGVSAWITINFLTGSLKTPGGSSVGMLDLGGGSTQIAFLPRVEGTLQASPPGYLTALRMFNRTYKLYSYSYLGLGLMSARLAILGGVEGQPAASLHELCAARVSEVLQNRVHRTEEVKHVDFYAFSYYYDLAAGVGLIDAEKGGSLVVGDFEIAAKYGGSHLEREGTCLIPSVSDPGDTAAEQPLLMHGPHLRQPATPGVRLSQEQSAEAHSEN

SEQ ID NO: 277012 - DNA, 1314 bp, Artificial Sequence
  derived and/or modified sequence
atgaagaagggaatcagatacgaaacctcaaggaagacatcatacatcttccaacaaccccagcatggcccatggcagacacgcatgcgcaaaatcagcaaccacgggtctctaagggtggccaaggttgcataccctctcggcctgtgtgttggggtctttatttacgtggcctacattaagtggcacagggccactgccacacaggccttcttctccatcacccgggccgccccaggtgcgcgttggggccaacaggcccatagccctctaggcaccgccgccgacggtcatgaggtgttttatggaatcatgtttgatgctggatcaacaggaaccagagtacacgtattccaatttacccggccacctagagaaactccaactttaacccacgagaccttcaaggcgctaaaaccaggtctcagtgcctatgccgatgacgtggaaaaaagcgcccaggggatccgcgagcttttggacgtggcgaagcaagatatcccttttgatttttggaaagccacgcccctcgtgctgaaagcaaccgctggactccggctcctgcccggggagaaagcccagaaactgctacagaaggtcaaaaaagtgttcaaggccagtcccttcctggttggcgacgattgcgtgagcatcatgaatgggaccgatgagggggtgtctgcttggataaccattaatttcttgaccgggtcattgaaaactccaggaggatcgagcgtggggatgctggacctggggggcggcagcacgcagattgcctttctccctcgagtggaaggtaccctccaagcaagcccgccaggatacctcaccgccctgagaatgttcaacagaacttacaagctctactcatactcataccttggactcggcctgatgagcgcacgcctagccattttgggcggcgtcgagggacagcccgctgcatccctccacgaactctgcgccgccagggtgtcggaggtgctgcagaatcgcgtacataggacggaagaggttaaacatgttgacttctatgcttttagctactattacgacctcgctgccggagtggggcttatcgatgcagaaaaaggcggctccctcgtggtaggcgattttgaaattgcagcaaagtacgggggcagccatctagagcgggaaggaacttgcttaatccccagcgttagcgatccgggggacactgccgctgaacagcccttacttatgcacgggccgcatcttaggcaaccggcaacacctggggtaaggttgtcacaggaacagtccgctgaagcgcacagcgagaactag

SEQ ID NO: 277013 - DNA, 1314 bp, Artificial Sequence
  derived and/or modified sequence
atgaagaagggcatccgctatgagaccagcaggaagaccagctacatcttccagcagccccagcacggcccctggcagaccaggatgaggaagatcagcaaccacggcagcctgcgggtggccaaggtggcctaccccctgggcctgtgtgtgggcgtcttcatctacgtggcctacatcaagtggcaccgggccacagccacccaggccttcttcagcatcaccagggctgcccctggggcccgctggggccagcaggcccacagccccctgggcacagctgctgatggccacgaggtgttctacggcatcatgtttgatgctggcagcacaggcaccagggtgcacgtgttccagttcaccaggcctccccgggagacccccaccctgacccatgagaccttcaaggccctgaagccaggcctgagcgcctatgcagatgatgtggagaagagcgcccagggcatccgggagctgctggatgtggccaagcaggacatcccctttgacttctggaaggccacccccctggtgctgaaggccacagctggcctgcggctgctgcctggagagaaggcccagaagctgctgcagaaggtgaagaaggtgttcaaggccagccccttcctggtgggagatgactgtgtgtccatcatgaatggaacagatgaaggagtgtctgcctggatcaccatcaacttcctgaccggcagcctgaagacccctgggggcagctctgtgggcatgctggacctgggcggcggcagcacccagatcgccttcctgccccgggtggagggcaccctgcaggccagccccccaggctacctgacagccctgaggatgttcaacagaacctacaagctgtacagctacagctacctgggcctgggcctgatgtctgcccggctggccatcctgggcggcgtggagggccagcctgctgccagcctgcacgagctgtgtgccgcccgggtgtctgaggtgctgcagaacagagtgcacaggacagaggaggtgaagcacgtggacttctacgccttctcctactactatgacctggccgccggcgtgggcctgattgatgctgagaagggcggcagcctggtggtgggggactttgaaattgctgccaagtatggaggcagccacctggagcgggagggcacctgcctgatccccagcgtgtctgaccccggggacacagctgctgagcagcccctgctgatgcacggcccccacctgcggcagcctgccaccccaggagtgcggctgagccaggagcagagcgctgaggcccacagcgagaactag

SEQ ID NO: 277014 - DNA, 1314 bp, Artificial Sequence
  derived and/or modified sequence
atgaagaagggcatccggtacgagaccagccggaagaccagctacatttttcagcaaccacagcacggaccctggcagactcgtatgcgaaagatctcaaaccacgggagtttaagggtcgccaaggtggcgtatcctttaggactgtgtgtgggcgtatttatctatgtagcttacattaagtggcatcgcgctacagctacacaggcattcttcagcatcacacgtgctgcacccggagctaggtggggtcagcaggcccacagtccactagggaccgccgcagacgggcacgaggtgttctatggaattatgtttgacgcggggtcaaccggaacgagggttcacgtatttcaatttacccgccccccccgagagacgcccaccctaacgcacgagacctttaaagctctcaagccagggcttagcgcttatgctgatgatgtggagaaaagtgctcaaggtattagagagcttctcgatgtcgccaaacaggatatccctttcgatttttggaaggcaacacccctcgtgttaaaagctacggccggactcaggctactgcctggggagaaagcccagaagctgctgcagaaagtaaagaaagtgttcaaggctagccccttcctcgtgggggatgactgtgtctccatcatgaatgggaccgatgaaggggtaagcgcttggattacgattaattttcttaccggttcattgaagacccccggaggtagtagcgtcggcatgctggatctgggcgggggttctacccagatcgccttcttgcctagggttgaaggaactctgcaggcatccccacccggttatctgactgccctccgcatgtttaaccgaacctacaagctgtactcatattcctacctcggcctcggattgatgtctgctcgtctggctatccttgggggggtggaagggcaaccggcagcttcgttgcatgaattgtgtgccgcacgcgtttctgaggtgctccaaaatagggttcatcggacagaagaagtcaaacacgtggacttctacgcattttcatattactacgacctggcagcaggagtgggactcatcgatgctgagaaaggtggatccctggttgttggagacttcgagatcgccgccaaatacgggggcagtcacttagagagggagggaacgtgtctgataccaagtgtaagtgaccctggcgataccgccgccgaacaaccattgctgatgcatggtcctcatttacggcagccggccacacctggcgttaggctgtctcaggaacagtccgcagaagctcactccgaaaactag

SEQ ID NO: 277015 - DNA, 1314 bp, Artificial Sequence
  derived and/or modified sequence
atgaaaaagggcattcggtacgaaacttcgcggaagacttcctacatattccagcagcctcagcatggcccttggcagactcggatgcggaagatctccaaccatggttccctccgagtggccaaagttgcatacccgctggggttatgcgttggggtgttcatctacgttgcctatatcaaatggcatcgggcaacagcgacgcaagcgttcttctcaatcaccagggccgctcctggagccaggtggggacagcaggctcactctccccttggaaccgctgcagacgggcacgaagtattttacggtatcatgtttgacgcaggctcgacgggaacacgagtgcatgtctttcagttcacacggccaccgagagagacccctaccctcactcacgagaccttcaaggccttgaaaccgggactctccgcttatgccgatgacgtcgaaaaatctgcacagggcattcgggaacttcttgatgtcgcaaagcaggacattccatttgatttttggaaggctacacccctcgttcttaaggccactgcgggactgcgactcctgcccggtgagaaagcccagaagttgttacaaaaagtgaagaaggtctttaaggcctcaccgtttctggtcggcgatgattgtgtcagcatcatgaacggtactgatgaaggcgtgtccgcttggattaccatcaattttcttaccggctcactgaaaacgcccggtggcagtagcgtcggcatgctggacttggggggaggaagtacccaaattgcctttttgcccagagtggagggcactctgcaggcaagccctcctggctacctcaccgccctccggatgttcaatcgcacttacaagctgtacagctactcatacctgggactagggctgatgtcagctcgtctggccattctgggaggggtggaggggcaacctgctgcttctctacacgaactgtgtgccgcaagagtttcggaggtgctccaaaatcgggtgcaccgcaccgaagaggtgaagcacgtagatttttacgcttttagttactactacgacttggccgcaggtgtgggccttattgatgccgaaaagggcggttccctagtcgtgggggacttcgaaattgctgccaaatacgggggttcacacctggaacgggagggcacctgccttattccctcggtgtctgaccctggagacacagccgctgagcagccccttctgatgcacggacctcacctaaggcagcccgcaacacccggagtacgcctcagccaggaacagagtgctgaggcccatagcgagaattag

SEQ ID NO: 277016 - DNA, 1314 bp, Artificial Sequence
  derived and/or modified sequence
atgaagaagggcatcagatacgagaccagcagaaagaccagctacatcttccagcagccccagcacggcccctggcagaccagaatgagaaagatcagcaaccacggcagcctgagagtggccaaggtggcctaccccctgggcctgtgcgtgggcgtgttcatctacgtggcctacatcaagtggcacagagccaccgccacccaggccttcttcagcatcaccagagccgcccccggcgccagatggggccagcaggcccacagccccctgggcaccgccgccgacggccacgaggtgttctacggcatcatgttcgacgccggcagcaccggcaccagagtgcacgtgttccagttcaccagaccccccagagagacccccaccctgacccacgagaccttcaaggccctgaagcccggcctgagcgcctacgccgacgacgtggagaagagcgcccagggcatcagagagctgctggacgtggccaagcaggacatccccttcgacttctggaaggccacccccctggtgctgaaggccaccgccggcctgagactgctgcccggcgagaaggcccagaagctgctgcagaaggtgaagaaggtgttcaaggccagccccttcctggtgggcgacgactgcgtgagcatcatgaacggcaccgacgagggcgtgagcgcctggatcaccatcaacttcctgaccggcagcctgaagacccccggcggcagcagcgtgggcatgctggacctgggcggcggcagcacccagatcgccttcctgcccagagtggagggcaccctgcaggccagcccccccggctacctgaccgccctgagaatgttcaacagaacctacaagctgtacagctacagctacctgggcctgggcctgatgagcgccagactggccatcctgggcggcgtggagggccagcccgccgccagcctgcacgagctgtgcgccgccagagtgagcgaggtgctgcagaacagagtgcacagaaccgaggaggtgaagcacgtggacttctacgccttcagctactactacgacctggccgccggcgtgggcctgatcgacgccgagaagggcggcagcctggtggtgggcgacttcgagatcgccgccaagtacggcggcagccacctggagagagagggcacctgcctgatccccagcgtgagcgaccccggcgacaccgccgccgagcagcccctgctgatgcacggcccccacctgagacagcccgccacccccggcgtgagactgagccaggagcagagcgccgaggcccacagcgagaactag

SEQ ID NO: 277017 - DNA, 2654 bp, Artificial Sequence
  derived and/or modified sequence
ggaggccggggtggcgccggccggggcgggggagcccaaaagaccggctgccgcctgctccccggaaaagggcactcgtctccgtgggtgtggcggagcgcgcggtgcatggaatgggctatgtgaatgaaaaaaggtatccgttatgaaacttccagaaaaacgagctacatttttcagcagccgcagcacggtccttggcaaacaaggatgagaaaaatatccaaccacgggagcctgcgggtggcgaaggtggcataccccctggggctgtgtgtgggcgtgttcatctatgttgcctacatcaagtggcaccgggccaccgccacccaggccttcttcagcatcaccagggcagccccgggggcccggtggggtcagcaggcccacagccccctggggacagctgcagacgggcacgaggtcttctacgggatcatgtttgatgcaggaagcactggcacccgagtacacgtcttccagttcacccggccccccagagaaactcccacgttaacccacgaaaccttcaaagcactgaagccaggtctttctgcctatgctgatgatgttgaaaagagcgctcagggaatccgggaactactggatgttgctaaacaggacattccgttcgacttctggaaggccacccctctggtcctcaaggccacagctggcttacgcctgttacctggagaaaaggcccagaagttactgcagaaggtgaaaaaagtatttaaagcatcgcctttccttgtaggggatgactgtgtttccatcatgaacggaacagatgaaggcgtttcggcgtggatcaccatcaacttcctgacaggcagcttgaaaactccaggagggagcagcgtgggcatgctggacttgggcggaggatccactcagatcgccttcctgccacgcgtggagggcaccctgcaggcctccccacccggctacctgacggcactgcggatgtttaacaggacctacaagctctattcctacagctacctcgggctcgggctgatgtcggcacgcctggcgatcctgggcggcgtggaggggcagcctgcggcaagcctgcacgagctgtgtgctgccagagtgtcagaggtccttcaaaacagagtgcacaggacggaggaagtgaagcatgtggacttctatgctttctcctactattacgaccttgcagctggtgtgggcctcatagatgcggagaagggaggcagcctggtggtgggggacttcgagatcgcagccaagtacggtgggagtcacctggagcgtgaagggacgtgtctcatccccagtgtgtcggaccctggagacacagccgcagagcagccccttctcatgcatggacctcacctacgtcagcctgctactccaggagttcggctttcccaggagcaaagtgctgaagctcactcggaaaattgacaatgttgagaccagctgggctctgggggccatttttcattacatcgactccctgaacagacagaagagtccagcctcatagtggccgagccatccctgtccccgtcagcagtgtctgtgtgtctgcataaaccctcctgtcctggacgtgacttcatcctgaggagccacagcacaggccgtgctggcactttctgcacactggctctgggacttgcagaaggcctggtgctgccctggcatcagcctcttccagtcacatctggccagagggctgtctggacctgggccctgctcaatgccacctgtctgcctgggctccaagtgggcaggaccaggacagaaccacaggcacacactgagggggcagtgtggctccctgcctgtcccatccccatgccccgtccgcggggctgtggctgctgctgtgcatgtccctgcgatgggagtcttgtctcccagcctgtcagtttcctccccagggcagagctccccttcctgcaagagtctgggaggcggtgcaggctgtcctggctgctctggggaagccgagggacagccataacacccccgggacagtaggtctgggcggcaccactgggaactctggacttgagtgtgtttgcctcttccttgggtatgaatgtgtgagttcacccagaggcctgctctcctcacacattgtgtggtttggggttaatgatggagggagacacctcctcatagacggcaggtgcccacctttcagggagtctcccagcatgggcggatgccgggcatgagctgctgtaaactatttgtggctgtgctgcttgagtgacgtctctgtcgtgtgggtgccaagtgcttgtgtagaaactgtgttctgagcccccttttctggacaccaactgtgtcctgtgaatgtatcgctactgtgagctgttcccgcctagccagggccatgtcttaggtgcagctgtgccacgggtcagctgagccacagtcccagaaccaagctctcggtgtctcgggccaccatccgcccacctcgggctgaccccacctcctccatggacagtgtgagccccgggccgtgcatcctgctcagtgtggcgtcagtgtcggggctgagccccttgagctgcttcagtgaatgtacagtgcccggcacgagctgaacctcatgtgttccactcccaataaaaggttgacaggggcttctccttctctgg

SEQ ID NO: 277018 - DNA, 915 bp, Artificial Sequence
  derived and/or modified sequence
taagggtatgatcaatgggccacttctcagttaataggtaccatcttcttttgcgtgggcattaccactctgctacagactacattcgggtgtcggacaatttttctagtcttactgttttctcagtacgctcgcaacgtgaagttccctctgccaatctacaagtctaaaaaaggctggactgcatacaaactgcagttatttaagatgttccccatcatcctggcgatcttggtttcatggttgctgtgtttcattttcaccgtgacggacgtgttccctcccgacagcaccaagtatggtttctatgcccgcacggacgctcgccagggcgtgctactagtggcgccctggttcaaggtaccgtacccattccaatggggcctccccactgtcagtgcagccggcgttatagggatgttatccgcagttgtggcctcaatcattgaatccattggcgattattatgcctgcgctagactgtcatgtgcaccaccaccgcccattcacgccataaatcgtggaatatttgttgagggcctgtcctgcgtgttagacggcatcttcgggacgggcaacggatccacgtccagctctccaaacatcggcgtactaggcatcactaaggtcggatcaagaagagtcattcagtgtggagccgcactcatgctggctctggggatgattggtaaatttagcgccctgttcgccagtttgccagatccagtcctaggggcactcttctgcactttgttcggcatgattacagccgtgggtctttctaatctccagtttattgacctcaactctagcagaaacttgttcgtactcgggttttcaatttttttcggtctcgttctcccgtcctatctgcgacaaaatccccttgtgactgggattactggaatcgattag

SEQ ID NO: 277019 - DNA, 1611 bp, Artificial Sequence
  derived and/or modified sequence
atgatgggcattggcaagaacaccacttccaaaagtatggaagctggttctagtacggaaggtaaatacgaagatgaggcgaaacaccctgccttttttactcttccggtcgtcataaacgggggagccacttcttctggtgaacaggataacgaggacactgagcttatggcaatctataccacagagaatgggatcgccgagaaatcaagcctcgccgagaccctggacagcacaggcagtctggaccctcagcgatctgatatgatttatactattgaagacgtgccaccatggtacctgtgtatatttcttgggctgcaacattacttgacatgtttttctgggacaatcgcagtcccttttctgttagcggacgctatgtgtgtgggttatgatcaatgggctacttcacagctcataggtacgattttcttctgtgtgggaataacaacattgttgcagacaaccttcggatgtcggacgattttcctcgtgctgctcttcagccaatacgcccggaacgtgaagttcccccttcccatctacaagtctaaaaagggctggactgcttacaagctccaactgttcaaaatgttccctatcattttggccatcctcgtctcttggcttctatgcttcattttcactgtgacagatgttttccctccagactccaccaagtatggcttttatgccagaacagacgcaagacagggagtccttttggtggctccttggtttaaggtgccctatccattccaatggggactgcccacggtcagcgctgccggggtcattggtatgttgagcgccgtggtcgcctccatcatcgaatctattggcgactattacgcctgtgctagactcagctgcgccccacctccaccgatccatgccatcaaccggggcatattcgtcgagggactctcttgtgtcctggatggaattttcggtaccggcaatggatctacctcttcatcccctaatatcggagtccttggcataaccaaggtagggtcaagacgagtgatccagtgcggcgccgccctcatgttggcactgggcatgattggtaagttcagtgcactgttcgcaagcctgcccgatcctgtgctcggcgccctcttctgtacactattcggcatgataactgctgtggggctgtccaacttacagttcatcgacctgaattcctccaggaatctgtttgttctaggcttctccatttttttcggccttgtgctgccgagctatctgcggcagaatcccctggtcacggggatcacaggcatcgatcaggtgcttaatgtcctgctgaccactgccatgtttgtaggcggctgtgttgctttcatcctggataatactatcccaggaaccccagaagagcgaggcattcgaaaatggaagaaaggggttgggaaaggcaataaatcactggatggcatggagagctataatcttccttttgggatgaacatcattaaaaagtacagatgtttctcatatctgcctattagcccaacattcgtgggatacacatggaaaggcttgagaaagagcgacaattctaggtcttccgacgaggactcacaggcgactgggtag

SEQ ID NO: 277020 - DNA, 915 bp, Artificial Sequence
  derived and/or modified sequence
tgaggatatgaccagtgggccaccagccagctgattggcaccatcttcttctgtgtgggcatcaccaccctgctgcagaccaccttcggctgcaggaccatcttcctggtgctgctcttcagccagtatgccagaaatgtgaagttccccctgcccatctacaagagcaagaagggctggacagcctacaagctgcagctgttcaagatgttccccatcatcctggccatcctggtgtcctggctgctgtgcttcatcttcaccgtgacagatgtgttccccccagacagcaccaagtatggcttctacgccaggacagatgcccggcagggcgtgctgctggtggccccctggttcaaggtgccctaccccttccagtggggcctgcccaccgtgtctgctgctggggtcatcggcatgctgtctgctgtggtggccagcatcatcgagagcatcggggactactatgcctgtgcccggctgagctgtgcccctcctccacccatccacgccatcaacagaggcatctttgtggagggcctgagctgtgtgctggatggcatctttggaactggaaatggcagcaccagcagcagccccaacatcggcgtgctgggcatcaccaaggtgggcagcagaagagtcatccagtgtggggccgccctgatgctggccctgggcatgattggcaagttcagcgccctgtttgccagcctgcctgaccctgtgctgggcgccctcttctgcaccctgtttggcatgatcacagctgtgggcctgagcaacctgcagttcatcgacctgaacagcagcaggaacctgtttgtgctgggcttcagcatcttcttcggcctggtgctgcccagctacctgcggcagaaccccctggtgacaggcatcactggaattgattag

SEQ ID NO: 277021 - DNA, 1611 bp, Artificial Sequence
  derived and/or modified sequence
atgatgggcatcggcaagaacaccaccagcaagtccatggaggccggcagcagcacagagggcaagtatgaagatgaggccaagcacccagccttcttcaccctgcctgtggtgatcaatggaggagccaccagcagcggggagcaggacaatgaagacacagagctgatggccatctacaccacagaaaatggaattgctgagaagagcagcctggccgagaccctggacagcacaggcagcctggacccccagaggagtgacatgatctacaccattgaagatgtgcccccctggtacctgtgcatcttcctgggcctgcagcactacctgacctgcttcagcggcaccatcgctgtgcccttcctgctggctgatgccatgtgtgtgggctatgaccagtgggccaccagccagctgattggcaccatcttcttctgtgtgggcatcaccaccctgctgcagaccaccttcggctgcaggaccatcttcctggtgctgctcttcagccagtatgccagaaatgtgaagttccccctgcccatctacaagagcaagaagggctggacagcctacaagctgcagctgttcaagatgttccccatcatcctggccatcctggtgtcctggctgctgtgcttcatcttcaccgtgacagatgtgtttcctccagacagcaccaagtatggcttctacgccaggacagatgcccggcagggcgtgctgctggtggccccctggttcaaggtgccctaccccttccagtggggcctgcccaccgtgtctgctgctggggtgattggcatgctgtctgctgtggtggccagcatcatcgagagcattggagactactatgcctgtgcccggctgagctgtgcccctcctccacccatccacgccatcaacagaggcatctttgtggagggcctgagctgtgtgctggatggcatcttcggcactggaaatggcagcaccagcagcagccccaacattggagtgctgggcatcaccaaggtgggcagccggcgggtcatccagtgtggggccgccctgatgctggccctgggcatgattggcaagttcagcgccctgtttgccagcctgcctgaccctgtgctgggcgccctcttctgcaccctgtttggcatgatcacagctgtgggcctgagcaacctgcagttcatcgacctgaacagcagcaggaacctgtttgtgctgggcttcagcatcttcttcggcctggtgctgcccagctacctgcggcagaaccccctggtgacaggcatcaccggcatcgaccaggtgctgaatgtgctgctgaccacagccatgtttgtgggcggctgtgtggccttcatcctggacaacaccatccctggcaccccagaggagcggggcatcaggaagtggaagaagggcgtgggcaagggcaacaagagcctggatggcatggagagctacaacctgcccttcggcatgaacatcatcaagaagtaccgctgcttctcctacctgcccatcagccccacctttgtgggctacacctggaagggcctgaggaagagtgacaacagccgcagcagtgatgaggacagccaggccactggatag

SEQ ID NO: 277022 - DNA, 915 bp, Artificial Sequence
  derived and/or modified sequence
tgaggctacgaccagtgggccaccagccagctgatcggcaccatcttcttctgtgtgggcatcacaaccctcctgcagaccacgtttggatgccgcaccatcttccttgtccttctgttctcccagtacgccagaaacgtgaagtttcccttacctatttataaatcgaaaaagggctggacagcttacaaactgcagctctttaagatgttccctattattcttgcgatcctcgtgagctggctcttgtgttttattttcactgttactgatgttttccctccagatagtacaaagtatggcttctatgcccggaccgacgcgagacagggggtgctcctcgtagcaccttggtttaaagtgccataccccttccagtgggggcttccgacagtctctgccgcaggtgtgattggaatgttatctgcagtggtggcaagtattatagaatctatcggcgactactatgcctgcgccagactgtcttgcgccccaccacctcccatccacgctattaatcggggaatattcgtcgaaggtctgtcctgcgtgcttgacgggatttttgggactggaaacggctcgactagcagctctccaaacatcggcgtgctgggtatcactaaggtgggatcacggcgcgtgattcagtgcggggctgctctgatgttggcgctcggcatgataggcaagtttagcgccctgtttgcaagcctcccagacccagtcctcggggcactgttctgcaccttgtttgggatgatcacggcggtgggactgtcaaacctgcagtttattgatctgaactctagtagaaacctgttcgttcttggcttcagcatttttttcggcttagttctgccttcgtacttacgacagaacccactggtgaccggcataacgggcatagactag

SEQ ID NO: 277023 - DNA, 1611 bp, Artificial Sequence
  derived and/or modified sequence
atgatgggcatcggcaagaacaccaccagcaagagcatggaggccggcagcagtacggagggaaaatacgaagacgaagcgaaacatcccgctttttttacgctgcctgtcgtcatcaatggcggtgccaccagcagtggcgagcaggataatgaagatactgagttgatggcaatctatacaaccgagaatggcattgctgagaaaagtagcttggccgagactctggattctaccgggagcctcgatccccaaaggagtgatatgatctacacaatcgaggatgttccaccctggtacctgtgtatttttctgggtctgcagcactaccttacctgtttttccggcaccattgctgtccccttcctgttggcggacgccatgtgcgtagggtacgaccagtgggccacctcacaactcataggcacgatctttttctgtgtgggtataactacccttctacagactaccttcggttgtcggacgatctttctagtcctcctcttctcacagtacgctcggaacgtcaaattccctttacccatttataaatccaaaaaagggtggacagcctataagttacagctatttaaaatgtttcccatcattctcgctatcctggtgtcctggcttctgtgcttcatctttacagtgacggacgtgttccccccagactccacaaagtacggtttttacgctagaaccgatgcacgtcaaggtgtgctgctggtggcaccatggttcaaagtcccatacccctttcagtggggattgcccacagtttctgctgccggtgttattgggatgctgtccgcagtcgtggcttctataatagaaagtatcggggactattatgcttgtgccagactctcgtgtgcacctccaccacccattcacgcgatcaaccgggggatttttgtcgaaggcctctcctgcgtgctcgacgggatctttggcaccgggaatgggagtaccagctcgtctccaaacattggcgtgctgggcataactaaggtgggatctagacgcgtcattcagtgcggcgctgctcttatgcttgctctcggcatgatcgggaaattcagcgccctctttgcttcccttcccgacccagtcttgggcgctttgttttgtactctgttcggcatgattaccgcagtgggcttgagcaacttacagttcatcgatctgaacagctcccgcaatctcttcgtgctgggctttagcatatttttcggacttgtactgccttcatacttgaggcagaaccccttggtgaccggaataaccggtattgatcaagtgctcaacgtattgcttactaccgccatgtttgtgggcggctgtgtagctttcattctagacaataccatcccaggcaccccagaggaaagggggattcgcaaatggaaaaagggggtggggaaggggaataagtctctagatgggatggagtcctacaacctgccatttggtatgaatatcataaaaaaatataggtgctttagctacctaccaattagccccacctttgtgggatatacctggaagggtctgcgaaagagtgataactcaaggagcagcgacgaggattctcaggctactggatag

SEQ ID NO: 277024 - DNA, 915 bp, Artificial Sequence
  derived and/or modified sequence
taaggctacgaccaatgggccacctcccagctgattgggacaatctttttttgcgtgggaatcacaacactgctgcagactacttttggatgtcgcacgatatttttggttctcctgttctcccagtatgcaagaaatgttaagttccctcttccaatctataagagtaaaaaaggctggactgcgtacaagttacagctgttcaagatgtttcccataattctcgccattctggttagttggctgctctgttttattttcactgtaactgatgtcttccctcctgactccacaaagtacggcttctacgcacggacggacgctagacagggcgtgcttctggtggccccttggtttaaggtgccttaccccttccagtggggtctgcctaccgtgagcgccgctggagtgattggaatgctgagtgcagttgtggcatccattatcgaatccattggcgactactacgcatgcgcgcgtctgagctgcgccccacctcccccaattcacgctatcaaccggggaatcttcgtcgagggacttagctgcgtgctcgatggcatattcgggacgggaaatggcagcacctccagcagtcctaacatcggcgtgctgggaatcactaaggtgggctcccggagagtgatccaatgcggagctgcgttgatgttggctctgggtatgattgggaagttttccgccctattcgcttctctgccagatcctgtgctaggcgctctgttctgcacgctgttcggaatgatcaccgccgtcggcctgagtaacctccagtttatagatctgaactccagcagaaatttgtttgttttgggctttagcatatttttcgggctggtgctcccctcatatctaaggcagaatccactagtgactggaattacaggtatcgactag

SEQ ID NO: 277025 - DNA, 1611 bp, Artificial Sequence
  derived and/or modified sequence
atgatggggatcggaaagaataccacctcaaagtctatggaggctgggagctctacagaaggaaaatatgaggacgaagcaaagcacccggcttttttcactcttccggtggtgattaacggaggggcaacatctagcggagagcaggacaatgaggacacagagctaatggccatctacacaactgaaaatggaattgccgagaagtcatctctggctgagaccctcgattcaacaggaagcctggatccccagcgcagtgatatgatttatacaatcgaagacgtcccaccctggtatctctgcatctttctgggcctgcagcactacctgacctgctttagtggcaccattgctgtaccttttctcctggctgatgccatgtgtgtgggatatgaccagtgggccacctcgcagctgattggaactattttcttctgtgtcggcatcactacactcttgcagaccactttcggctgccgcacgattttcctggttctgctctttagtcagtatgctaggaatgtgaagttccctctccccatatacaaaagcaagaaaggatggactgcttacaaactgcagctgtttaaaatgttccccattatcctggcaatattggttagctggctgttgtgcttcatatttaccgttaccgatgttttcccccctgacagcaccaaatatggattttacgcaaggactgacgcacgccagggggtcctgcttgtggccccatggtttaaggttccctatccatttcaatggggactcccgacagtgagcgccgctggtgtaattggtatgcttagtgcagtggtagcctcaatcattgaaagcatcggcgattattacgcttgcgcccgactttcatgtgctcctcctccacctattcacgccatcaacaggggtatatttgtcgaggggctgagctgcgttctggacgggatatttggcactggaaacggatctacaagttcgagccccaatatcggtgtgctgggtattacaaaggtagggagccgccgtgtgatacaatgtggggctgcgcttatgctcgctctaggcatgattggaaaattctcggctctgttcgcatctctgcctgatcctgtgctgggcgcactgttttgcacgctgttcgggatgattactgctgtaggcctgagtaacctgcagtttattgacctcaatagctcacggaacctgtttgtcctaggttttagcatcttcttcggactggtactcccctcatatttgaggcagaacccactcgtcacgggtatcaccggcattgaccaggtgctgaacgttcttctaactaccgccatgttcgttggtggctgcgtggcctttattctggataacaccatacccggtactcccgaggagagagggataaggaaatggaaaaagggtgtcggtaaggggaacaaatctctggatggcatggagagttacaatctgcctttcgggatgaacatcatcaagaagtatcgttgcttctcctatttgcctatcagtcccacattcgtaggctatacctggaaggggctgcggaagagcgataattcccggagctctgacgaagacagccaagccacaggctag

SEQ ID NO: 277026 - DNA, 911 bp, Artificial Sequence
  derived and/or modified sequence
ggggtacgaccagtgggccaccagccagctcattgggaccattttcttctgtgtgggaatcactactttgctacagacaacgtttggatgcaggacaatattcctagtattactgttttctcaatacgccagaaatgttaaatttcctctcccgatttataaatccaagaaaggatggactgcgtacaagttacagctgttcaaaatgttccctatcatcctggccatcctggtatcctggctgctctgcttcatcttcacggtgacagatgtcttccctcccgacagcacaaagtatggcttctatgctcgcacagatgccaggcaaggcgtgcttctggtagccccgtggtttaaggttccatacccatttcagtggggactgcccaccgtgtctgcggccggtgtcatcggcatgctcagtgccgtggtcgccagcatcatcgagtctattggtgactactacgcctgtgcacggctgtcctgtgccccacccccccccatccacgcaataaacaggggaattttcgtggaaggcctctcctgtgttcttgatggcatatttggtactgggaatggctctacttcatccagtcccaacattggagttttgggaattacaaaggtcggcagccgccgcgtgatacagtgcggagcagccctcatgctcgctctgggcatgatcgggaagttcagcgccctctttgcgtcccttccggatcctgtgctgggagccctgttctgcacgctctttggaatgatcacagctgttggcctctctaacctgcagttcattgatttaaattcttcccggaacctctttgtgcttggattttcgatcttctttgggctcgtccttccaagttacctcagacagaaccctctggtcacagggataacaggaatcgatc

SEQ ID NO: 277027 - DNA, 2375 bp, Artificial Sequence
  derived and/or modified sequence
attttgcaggcggctgtcgcggggaccggaggcggaggctgcagcgggcactgcggcgccgaggcgcggcggcaggacgggaaccacgcgagctgcagccagctaggtcttgactccactaacggggacttctcatacggctttgaacttggaccttggtgcataagcaaatgtaactcagcgaattgtaatggaaagcatatggacaggtctacgccacatcacttaggtgctaagagatgccgtttgcaggcctcatctctgcttgagaatcgggggctccaggcactagaagagccggctgatcctgggctcctagcttgaataagccttcacttccagctgctctccccaacggctgtgtaaactactcgtttctcttaatgatgggtattggtaagaataccacatccaaatcaatggaggctggaagttcaacagaaggcaaatacgaagacgaggcaaagcacccagctttcttcactcttccggtggtgataaatggaggcgccacctccagcggtgagcaggacaatgaggacactgagctcatggcgatctacactacggaaaacggcattgcagaaaagagctctctcgctgagaccctggatagcactggcagtctggacccccagcgatcagacatgatttataccatagaagatgttcctccctggtacctgtgtatatttctggggctacagcactacctgacatgcttcagcggcacgatcgcagtgcccttcctgttggccgatgccatgtgtgtggggtacgaccagtgggccaccagccagctcattgggaccattttcttctgtgtgggaatcactactttgctacagacaacgtttggatgcaggacaatattcctagtattactgttttctcaatacgccagaaatgttaaatttcctctcccgatttataaatccaagaaaggatggactgcgtacaagttacagctgttcaaaatgttccctatcatcctggccatcctggtatcctggctgctctgcttcatcttcacggtgacagatgtcttccctcccgacagcacaaagtatggcttctatgctcgcacagatgccaggcaaggcgtgcttctggtagccccgtggtttaaggttccatacccatttcagtggggactgcccaccgtgtctgcggccggtgtcatcggcatgctcagtgccgtggtcgccagcatcatcgagtctattggtgactactacgcctgtgcacggctgtcctgtgccccacccccccccatccacgcaataaacaggggaattttcgtggaaggcctctcctgtgttcttgatggcatatttggtactgggaatggctctacttcatccagtcccaacattggagttttgggaattacaaaggtcggcagccgccgcgtgatacagtgcggagcagccctcatgctcgctctgggcatgatcgggaagttcagcgccctctttgcgtcccttccggatcctgtgctgggagccctgttctgcacgctctttggaatgatcacagctgttggcctctctaacctgcagttcattgatttaaattcttcccggaacctctttgtgcttggattttcgatcttctttgggctcgtccttccaagttacctcagacagaaccctctggtcacagggataacaggaatcgatcaagtgttgaacgtccttctcacaactgctatgtttgtagggggctgtgtggcttttatcctggataacaccatcccaggcactccagaggaaagaggaatccggaaatggaagaagggtgtgggcaaagggaacaaatcactcgacggcatggagtcgtacaatttgccatttggcatgaacattataaaaaaatacagatgcttcagctacttacccatcagcccaacctttgtgggctacacatggaaaggcctcaggaagagcgacaacagccggagttcagatgaagactcccaggccacgggatagcctttgctgtgccctgtggcctggccgcagtgaggcatgtatctgtagttccttgctgagtaacaagaagtaaaatacatgtttgtatatctacatttacattctgcgccccagagctaagacagactgcgaatcacttttctgctgtgagggtgatggtgcctgatgcggtgtctcgcctatctccttatttaagcccttaactccttgccctttgagagtgtccattgctggccatggtcactaaatttgaagttccagtcctccctttggagtggacatttaaaatctgcagccattccttgcttcagttcccttccaccacccagggctggctttcctataagccacctccagggtccaggggctttctctctctct

SEQ ID NO: 277028 - DNA, 915 bp, Artificial Sequence
  derived and/or modified sequence
tgaggctacgaccagtgggccaccagccagctgatcggcaccatcttcttctgcgtgggcatcaccaccctgctgcagaccaccttcggctgcagaaccatcttcctggtgctgctgttcagccagtacgccagaaacgtgaagttccccctgcccatctacaagagcaagaagggctggaccgcctacaagctgcagctgttcaagatgttccccatcatcctggccatcctggtgagctggctgctgtgcttcatcttcaccgtgaccgacgtgttcccccccgacagcaccaagtacggcttctacgccagaaccgacgccagacagggcgtgctgctggtggccccctggttcaaggtgccctaccccttccagtggggcctgcccaccgtgagcgccgccggcgtgatcggcatgctgagcgccgtggtggccagcatcatcgagagcatcggcgactactacgcctgcgccagactgagctgcgccccccccccccccatccacgccatcaacagaggcatcttcgtggagggcctgagctgcgtgctggacggcatcttcggcaccggcaacggcagcaccagcagcagccccaacatcggcgtgctgggcatcaccaaggtgggcagcagaagagtgatccagtgcggcgccgccctgatgctggccctgggcatgatcggcaagttcagcgccctgttcgccagcctgcccgaccccgtgctgggcgccctgttctgcaccctgttcggcatgatcaccgccgtgggcctgagcaacctgcagttcatcgacctgaacagcagcagaaacctgttcgtgctgggcttcagcatcttcttcggcctggtgctgcccagctacctgagacagaaccccctggtgaccggcatcaccggcatcgactag

SEQ ID NO: 277029 - DNA, 1611 bp, Artificial Sequence
  derived and/or modified sequence
atgatgggcatcggcaagaacaccaccagcaagagcatggaggccggcagcagcaccgagggcaagtacgaggacgaggccaagcaccccgccttcttcaccctgcccgtggtgatcaacggcggcgccaccagcagcggcgagcaggacaacgaggacaccgagctgatggccatctacaccaccgagaacggcatcgccgagaagagcagcctggccgagaccctggacagcaccggcagcctggacccccagagaagcgacatgatctacaccatcgaggacgtgcccccctggtacctgtgcatcttcctgggcctgcagcactacctgacctgcttcagcggcaccatcgccgtgcccttcctgctggccgacgccatgtgcgtgggctacgaccagtgggccaccagccagctgatcggcaccatcttcttctgcgtgggcatcaccaccctgctgcagaccaccttcggctgcagaaccatcttcctggtgctgctgttcagccagtacgccagaaacgtgaagttccccctgcccatctacaagagcaagaagggctggaccgcctacaagctgcagctgttcaagatgttccccatcatcctggccatcctggtgagctggctgctgtgcttcatcttcaccgtgaccgacgtgttcccccccgacagcaccaagtacggcttctacgccagaaccgacgccagacagggcgtgctgctggtggccccctggttcaaggtgccctaccccttccagtggggcctgcccaccgtgagcgccgccggcgtgatcggcatgctgagcgccgtggtggccagcatcatcgagagcatcggcgactactacgcctgcgccagactgagctgcgccccccccccccccatccacgccatcaacagaggcatcttcgtggagggcctgagctgcgtgctggacggcatcttcggcaccggcaacggcagcaccagcagcagccccaacatcggcgtgctgggcatcaccaaggtgggcagcagaagagtgatccagtgcggcgccgccctgatgctggccctgggcatgatcggcaagttcagcgccctgttcgccagcctgcccgaccccgtgctgggcgccctgttctgcaccctgttcggcatgatcaccgccgtgggcctgagcaacctgcagttcatcgacctgaacagcagcagaaacctgttcgtgctgggcttcagcatcttcttcggcctggtgctgcccagctacctgagacagaaccccctggtgaccggcatcaccggcatcgaccaggtgctgaacgtgctgctgaccaccgccatgttcgtgggcggctgcgtggccttcatcctggacaacaccatccccggcacccccgaggagagaggcatcagaaagtggaagaagggcgtgggcaagggcaacaagagcctggacggcatggagagctacaacctgcccttcggcatgaacatcatcaagaagtacagatgcttcagctacctgcccatcagccccaccttcgtgggctacacctggaagggcctgagaaagagcgacaacagcagaagcagcgacgaggacagccaggccaccggctag

SEQ ID NO: 277030 - protein, 323 aa, Artificial Sequence
  derived and/or modified sequence
MDSDASLVSSRPSSPEPDDLFLPARSKGSSGSAFTGGTVSSSTPSDCPPELSAELRGAMGSAGAHPGDKLGGSGFKSSSSSTSSSTSSAAASSTKKDKKQMTEPELQQLRLKINSRERKRMHDLNIAMDGLREVMPYAHGPSVRKLSKIATLLLARNYILMLTNSLEEMKRLVSEIYGGHHAGFHPSACGGLAHSAPLPAATAHPAAAAHAAHHPAVHHPILPPAAAAAAAAAAAAAVSSASLPGSGLPSVGSIRPPHGLLKSPSAAAAAPLGGGGGGSGASGGFQHWGGMPCPCSMCQVPPPHHHVSAMGAGSLPRLTSDAK

SEQ ID NO: 277031 - protein, 62 aa, Artificial Sequence
  derived and/or modified sequence
MDSDASLVSSRPSSPEPDDLFLPARSKGSSGSAFTGGTVSSSTPSDCPPELSAELRGAMGSA

SEQ ID NO: 277032 - DNA, 2505 bp, Artificial Sequence
  derived and/or modified sequence
gtgcggatgcttattatagatcgacgcgacaccagcgcccggtgccaggttctcccctgaggcttttcggagcgagctcctcaaatcgcatccagattttcgggtccgagggaaggaggaccctgcgaaagctgcgacgactatcttcccctggggccatggactcggacgccagcctggtgtccagccgcccgtcgtcgccagagcccgatgacctttttctgccggcccggagtaagggcagcagcggcagcgccttcactgggggcaccgtgtcctcgtccaccccgagtgactgcccgccggagctgagcgccgagctgcgcggcgctatgggctctgcgggcgcgcatcctggggacaagctaggaggcagtggcttcaagtcatcctcgtccagcacctcgtcgtctacgtcgtcggcggctgcgtcgtccaccaagaaggacaagaagcaaatgacagagccggagctgcagcagctgcgtctcaagatcaacagccgcgagcgcaagcgcatgcacgacctcaacatcgccatggatggcctccgcgaggtcatgccgtacgcacacggcccttcggtgcgcaagctttccaagatcgccacgctgctgctggcgcgcaactacatcctcatgctcaccaactcgctggaggagatgaagcgactggtgagcgagatctacgggggccaccacgctggcttccacccgtcggcctgcggcggcctggcgcactccgcgcccctgcccgccgccaccgcgcacccggcagcagcagcgcacgccgcacatcaccccgcggtgcaccaccccatcctgccgcccgccgccgcagcggctgctgccgccgctgcagccgcggctgtgtccagcgcctctctgcccggatccgggctgccgtcggtcggctccatccgtccaccgcacggcctactcaagtctccgtctgctgccgcggccgccccgctggggggcgggggcggcggcagtggggcgagcgggggcttccagcactggggcggcatgccctgcccctgcagcatgtgccaggtgccgccgccgcaccaccacgtgtcggctatgggcgccggcagcctgccgcgcctcacctccgacgccaagtgagccgactggcgccggcgcgttctggcgacaggggagccaggggccgcggggaagcgaggactggcctgcgctgggctcgggagctctgtcgcgaggaggggcgcaggaccatggactgggggtggggcatggtggggattccagcatctgcgaacccaagcaatgggggcgcccacagagcagtggggagtgaggggatgttctctccgggacctgatcgagcgctgtctggctttaacctgagctggtccagtagacatcgttttatgaaaaggtaccgctgtgtgcattcctcactagaactcatccgacccccgacccccacctccgggaaaagattctaaaaacttctttccctgagagcgtggcctgacttgcagactcggcttgggcagcacttcggggggggagggggtgttatgggagggggacacattggggccttgctcctcttcctcctttcttggcgggtgggagactccgggtagccgcactgcagaagcaacagcccgaccgcgccctccagggtcgtccctggcccaaggccaggggccacaagttagttggaagccggcgttcggtatcagaagcgctgatggtcatatccaatctcaatatctgggtcaatccacaccctcttagaactgtggccgttcctccctgtctctcgttgatttgggagaatatggttttctaataaatctgtggatgttccttcttcaacagtatgagcaagtttatagacattcagagtagaaccacttgtggattggaataacccaaaactgccgatttcaggggcgggtgcattgtagttattattttaaaatagaaactaccccaccgactcatctttccttctctaagcacaaagtgatttggttattttggtacctgagaacgtaacagaattaaaaggcagttgctgtggaaacagtttgggttatttgggggttctgttggctttttaaaattttcttttttggatgtgtaaatttatcaatgatgaggtaagtgcgcaatgctaagctgtttgctcacgtgactgccagccccatcggagtctaagccggctttcctctattttggtttatttttgccacgtttaacacaaatggtaaactcctccacgtgcttcctgcgttccgtgcaagccgcctcggcgctgcctgcgttgcaaactgggctttgtagcgtctgccgtgtaacacccttcctctgatcgcaccgcccctcgcagagagtgtatcatctgttttatttttgtaaaaacaaagtgctaaataatatttattacttgtttggttgcaaaaacggaataaatgactgagtgttgagattttaaataaaatttaaagcaaaaaaaaaaaaaaaa

SEQ ID NO: 277033 - DNA, 531 bp, Artificial Sequence
  derived and/or modified sequence
atgggctgctgcggctgcagcggcggctgcggcagcggctgcggcggatgtgggagcggttctggtggctgtggcagcggctgtgggggatgcggaagttcttgttgcgtgccaatctgttgctgcaaacctgtgtgttgctgcgtccctgcctgttcgtgctcctcatgcggaagctgtggtggcagcaagggagggtgtgggtcgtgtggtagttctaaaggcggctgtggatcctgcgggtgtagccagtccaattgttgcaagccatgctgttcatcctccggttgtggatcattttgttgtcagtcctcttgcagcaaaccatgttgctgccagtcgagctgctgccagagctcatgctgtaaaccctgctgttgccagagctcttgctgccagagtagctgctttaaaccctgttgctgtcaatcctcatgttgcgtgcctgtatgctgccagtctagctgctgcaagccttgctgcagtcagtcctcctgttgcgtgccaatctgctgccagtacaagatatag

SEQ ID NO: 277034 - DNA, 972 bp, Artificial Sequence
  derived and/or modified sequence
atggactcggatgcttccctggtctcatccaggcccagctctccggaacccgacgacctcttcctgcctgcccgcagcaagggtagtagcggaagcgctttcaccggaggcaccgtgtcctcctccacccccagcgattgtccaccggagctgtctgccgaacttcgcggagccatgggatctgccggcgcccatcctggggacaaactgggaggaagtggatttaagtcgagtagctcttccaccagctctagtacgagctccgcggccgccagtagtacaaaaaaggataagaagcaaatgacggagcctgaactgcaacagcttcgcctgaagatcaatagccgcgaaaggaagaggatgcatgacttgaatatcgccatggacgggttgcgcgaagtaatgccgtatgcccatgggccgagtgtccggaaactctcaaagatagctacactgctgctggcacgaaactatattctgatgcttactaacagcttagaggagatgaagaggctggtgtcagaaatctatggaggtcaccacgccggattccatcccagtgcctgcggaggactcgctcacagtgctcccctgcctgccgcaaccgctcatccggcagccgcggcccatgccgcccaccacccagcagtccatcacccaatcctgcctcccgctgctgccgctgccgccgccgccgccgccgctgcagcggtgtctagcgccagtctgcccgggagtggccttccttcagtggggagcatcaggcccccacacgggctcctcaaaagtccaagtgccgcagccgccgctccactgggcggcggcgggggaggcagtggggcctctggagggttccaacactgggggggaatgccgtgtccttgctcgatgtgccaggttccaccccctcaccaccacgtctctgctatgggagcagggtcgctgcccaggctgactagcgacgctaaatag

SEQ ID NO: 277035 - DNA, 972 bp, Artificial Sequence
  derived and/or modified sequence
atggatagcgatgcttccttggtcagtagccgcccctcgagccccgaacctgatgacctcttcctgcccgccaggagcaagggctcgagcggctcagcctttaccggcggaacagtctcatcttccacgccaagcgactgcccacccgaattgtcagctgagctccgcggggcgatgggatcagcaggtgcccaccctggggataagctgggaggaagtggcttcaagtctagctcctcctcaacctcaagcagtacatccagtgcagctgcgagtagcaccaagaaggacaaaaagcagatgacagaacccgagctgcagcagttgagactgaaaattaactcaagagaacgcaaacggatgcacgatctgaatatcgcaatggatggcctcagagaagtgatgccatatgctcacggcccgagtgtaaggaaattgagtaaaatcgcaaccttattgttggccaggaattatatcctcatgctgacaaactcattggaggagatgaaaaggctggtgtcagagatttacggaggccaccacgctggcttccaccccagcgcgtgtggcggactggcgcactccgctcccttgcccgctgccactgcccacccagccgcagcagcgcatgcagctcaccatcccgccgtacaccatccaattctcccaccagctgcagccgcggccgcagcagcagctgccgccgcagcagtgtcatcagcctccctcccaggatccgggctgccctctgttggtagcattcgaccacctcatgggcttttgaagagtcctagcgctgccgccgcagccccgctggggggagggggcggggggagcggggcgtcaggaggctttcaacattggggaggaatgccctgtccttgctccatgtgccaggtgccgccgcctcatcatcatgtctccgccatgggtgcgggatccttaccccgtttaacctccgatgctaagtag

SEQ ID NO: 277036 - DNA, 189 bp, Artificial Sequence
  derived and/or modified sequence
atggattccgatgcaagcctcgttagctcaaggcctagctctccagaaccagatgatttgtttcttcctgctagaagtaaggggagcagtggaagtgcattcactggagggacagtgtcaagtagcaccccatcagactgcccacctgaactcagtgcagaactgagaggtgccatgggatccgcctag

SEQ ID NO: 277037 - DNA, 972 bp, Artificial Sequence
  derived and/or modified sequence
atggacagtgatgccagcctggtgagcagccggcccagcagccctgagccagatgacctcttcctgcctgcccggagcaagggcagcagcggcagcgccttcaccggcggcaccgtgagcagcagcacccccagcgactgccccccagagctgtctgctgagctgcggggggccatgggcagcgctggggcccaccctggggacaagctgggcggcagcggcttcaagagcagcagcagcagcaccagcagcagcaccagcagcgctgctgccagcagcaccaagaaggacaagaagcagatgacagagcctgagctgcagcagctgcggctgaagatcaacagccgggagaggaagaggatgcatgacctgaacatcgccatggatggcctgcgggaggtgatgccctatgcccacggccccagcgtgaggaagctgagcaagatcgccaccctgctgctggccaggaactacatcctgatgctgaccaacagcctggaggagatgaagaggctggtgtctgagatctatggaggccaccacgccggcttccaccccagcgcctgtggcggcctggcccacagcgcccccctgcctgctgccacagcccaccctgctgctgctgcccatgctgcccaccaccctgctgtgcaccaccccatcctgcccccagctgctgctgctgctgctgctgctgctgctgctgctgctgtgagcagcgccagcctgcccggcagcggcctgcccagcgtgggcagcatccggcccccccacggcctgctgaagagccccagcgctgctgctgctgcccccctgggcggcggcggcggcggcagcggggccagcggcggcttccagcactggggcggcatgccctgcccctgcagcatgtgccaggtgcccccaccccaccaccacgtgtctgccatgggcgccggcagcctgccccggctgaccagtgatgccaagtag

SEQ ID NO: 277038 - DNA, 189 bp, Artificial Sequence
  derived and/or modified sequence
atggacagtgatgccagcctggtgagcagccggcccagcagccctgagccagatgacctcttcctgcctgcccggagcaagggcagcagcggcagcgccttcaccggcggcaccgtgagcagcagcacccccagcgactgccccccagagctgtctgctgagctgcggggggccatgggcagcgcctag

SEQ ID NO: 277039 - DNA, 972 bp, Artificial Sequence
  derived and/or modified sequence
atggacagcgacgccagcctggtgagcagccggcccagcagccccgaaccagatgatctgtttctgccagcacgatccaaaggaagttctgggtctgcgttcacaggaggaacggtgagcagtagcaccccatccgactgtccaccagagctttcggccgagcttcgcggcgcgatggggtcggctggagcgcacccaggcgataagctcggtggcagcggtttcaagtcttcttcttcctcaacgtctagtagcacttcatcagccgcggcatctagcactaaaaaggacaagaaacagatgaccgagccagaactgcaacagctgaggctgaagattaatagcagggaaaggaagaggatgcacgacctaaacatcgccatggatggactgagggaggtcatgccttacgcgcacggcccttctgtccggaaactgtctaagatcgcaacattgctgttggcgcggaactacattctgatgctgacgaacagcctggaggagatgaagcgcctggtgtccgagatctatggcggccatcacgctggcttccatcccagtgcttgcggaggtctggcacactccgcccccttgcccgctgccaccgctcaccccgctgccgcggcccacgccgcccaccatcctgccgtgcaccatccgattctgccacctgccgctgcagcagcggcagccgcggcggccgctgccgccgttagtagcgcatccctccctggtagcgggctgcccagtgtcggttccattagacctccccatggactgttgaagtccccctcggccgccgccgcagcaccactgggaggaggaggtgggggctccggcgcttctggaggcttccagcactggggggggatgccatgtccctgctcaatgtgccaggtacctccgccccatcatcatgtgtcggcaatgggggcaggatccctgcccagactgactagtgacgcaaagtag

SEQ ID NO: 277040 - DNA, 972 bp, Artificial Sequence
  derived and/or modified sequence
atggacagcgacgccagcctggtgagcagccggcccagcagccccgagccagacgatctgttcctgccggcaaggagtaaaggctctagcggtagcgccttcacaggcgggacagtgagttcctctaccccatcagactgcccccccgaactgagcgccgagctgagaggcgcaatgggttctgccggtgcccaccccggggataagctgggcggctccggctttaaaagttcatctagtagcacttcctcctccaccagctccgcagcagcctcctcaactaagaaggacaagaagcagatgaccgaacccgagcttcagcaactgaggttgaagattaattcacgggagcggaagcgaatgcatgatttgaacatcgcgatggacggtctccgcgaggtgatgccttatgctcatggccccagcgtcaggaaactgtcgaagatcgccactctgctcctggcacggaactatatcctgatgctcaccaattcacttgaggagatgaaaagattggtctcagagatctacggtggtcatcatgctggctttcatccgagcgcttgtggaggcctggcgcactccgctcctctgcctgctgctacggcccacccggccgccgcagcgcatgccgcgcaccacccagctgtgcaccacccaattctccctccggcggccgccgcggccgccgctgccgccgccgcagccgctgtgagctcggctagcttacctggatccggattgccttcggtggggtctattcgccctccacatggcttgttgaagagcccatcagccgccgctgctgcccctctcggcgggggtggaggcggatccggtgcaagcggcggattccaacactggggtggaatgccttgcccttgctcgatgtgtcaggttccgcctcctcaccaccacgtgtctgcaatgggtgccggatcactcccccgtctcacctcagacgcaaaatag

SEQ ID NO: 277041 - DNA, 189 bp, Artificial Sequence
  derived and/or modified sequence
atggacagcgacgccagcctggtgagcagccggcccagcagccccgagccggatgacctgtttctgccagcccgtagcaaggggagcagcggatcagccttcaccggcgggactgtgagtagtagcaccccctcagattgccccccggagctctctgcagaactgagaggagctatggggtcagcctag

SEQ ID NO: 277042 - DNA, 3262 bp, Artificial Sequence
  derived and/or modified sequence
ggatgcttattatagatcgacgcgacaccagcgcccggtgccaggttctcccctgaggcttttcggagcgagctcctcaaatcgcatccagagtaagtgtccccgccccacagcagccgcagcctagatcccagggacagactctcctcaactcggctgtgacccagaatgctccgatacagggggtctggatccctactctgcgggccatttctccagagcgactttgctcttctgtcctccccacactcaccgctgcatctccctcaccaaaagcgagaagtcggagcgacaacagctctttctgcccaagccccagtcagctggtgagctccccgtggtctccagatgcagcacatggactctgggccccgcgccggctctgggtgcatgtgcgtgtgcgtgtgtttgctgcgtggtgtcgatggagataaggtggatccgtttgaggaaccaaatcattagttctctatctagatctccattctccccaaagaaaggccctcacttcccactcgtttattccagcccgggggctcagttttcccacacctaactgaaagcccgaagcctctagaatgccacccgcaccccgagggtcaccaacgctccctgaaataacctgttgcatgagagcagaggggagatagagagagcttaattataggtacccgcgtgcagctaaaaggagggccagagatagtagcgagggggacgaggagccacgggccacctgtgccgggaccccgcgctgtggtactgcggtgcaggcgggagcagcttttctgtctctcactgactcactctctctctctctccctctctctctctctcattctctctcttttctcctcctctcctggaagttttcgggtccgagggaaggaggaccctgcgaaagctgcgacgactatcttcccctggggccatggactcggacgccagcctggtgtccagccgcccgtcgtcgccagagcccgatgacctttttctgccggcccggagtaagggcagcagcggcagcgccttcactgggggcaccgtgtcctcgtccaccccgagtgactgcccgccggagctgagcgccgagctgcgcggcgctatgggctctgcgggcgcgcatcctggggacaagctaggaggcagtggcttcaagtcatcctcgtccagcacctcgtcgtctacgtcgtcggcggctgcgtcgtccaccaagaaggacaagaagcaaatgacagagccggagctgcagcagctgcgtctcaagatcaacagccgcgagcgcaagcgcatgcacgacctcaacatcgccatggatggcctccgcgaggtcatgccgtacgcacacggcccttcggtgcgcaagctttccaagatcgccacgctgctgctggcgcgcaactacatcctcatgctcaccaactcgctggaggagatgaagcgactggtgagcgagatctacgggggccaccacgctggcttccacccgtcggcctgcggcggcctggcgcactccgcgcccctgcccgccgccaccgcgcacccggcagcagcagcgcacgccgcacatcaccccgcggtgcaccaccccatcctgccgcccgccgccgcagcggctgctgccgccgctgcagccgcggctgtgtccagcgcctctctgcccggatccgggctgccgtcggtcggctccatccgtccaccgcacggcctactcaagtctccgtctgctgccgcggccgccccgctggggggcgggggcggcggcagtggggcgagcgggggcttccagcactggggcggcatgccctgcccctgcagcatgtgccaggtgccgccgccgcaccaccacgtgtcggctatgggcgccggcagcctgccgcgcctcacctccgacgccaagtgagccgactggcgccggcgcgttctggcgacaggggagccaggggccgcggggaagcgaggactggcctgcgctgggctcgggagctctgtcgcgaggaggggcgcaggaccatggactgggggtggggcatggtggggattccagcatctgcgaacccaagcaatgggggcgcccacagagcagtggggagtgaggggatgttctctccgggacctgatcgagcgctgtctggctttaacctgagctggtccagtagacatcgttttatgaaaaggtaccgctgtgtgcattcctcactagaactcatccgacccccgacccccacctccgggaaaagattctaaaaacttctttccctgagagcgtggcctgacttgcagactcggcttgggcagcacttcggggggggagggggtgttatgggagggggacacattggggccttgctcctcttcctcctttcttggcgggtgggagactccgggtagccgcactgcagaagcaacagcccgaccgcgccctccagggtcgtccctggcccaaggccaggggccacaagttagttggaagccggcgttcggtatcagaagcgctgatggtcatatccaatctcaatatctgggtcaatccacaccctcttagaactgtggccgttcctccctgtctctcgttgatttgggagaatatggttttctaataaatctgtggatgttccttcttcaacagtatgagcaagtttatagacattcagagtagaaccacttgtggattggaataacccaaaactgccgatttcaggggcgggtgcattgtagttattattttaaaatagaaactaccccaccgactcatctttccttctctaagcacaaagtgatttggttattttggtacctgagaacgtaacagaattaaaaggcagttgctgtggaaacagtttgggttatttgggggttctgttggctttttaaaattttcttttttggatgtgtaaatttatcaatgatgaggtaagtgcgcaatgctaagctgtttgctcacgtgactgccagccccatcggagtctaagccggctttcctctattttggtttatttttgccacgtttaacacaaatggtaaactcctccacgtgcttcctgcgttccgtgcaagccgcctcggcgctgcctgcgttgcaaactgggctttgtagcgtctgccgtgtaacacccttcctctgatcgcaccgcccctcgcagagagtgtatcatctgttttatttttgtaaaaacaaagtgctaaataatatttattacttgtttggttgcaaaaacggaataaatgactgagtgttgagattttaaataaaatttaaagtaaa

SEQ ID NO: 277043 - DNA, 2578 bp, Artificial Sequence
  derived and/or modified sequence
gcacattgttccccgcccccgcccccgccaccgctgccgccgtcgccgctgccaccgggctataaaaaccggccgagcccctaaaggtgcggatgcttattatagatcgacgcgacaccagcgcccggtgccaggttctcccctgaggcttttcggagcgagctcctcaaatcgcatccagattttcgggtccgagggaaggaggaccctgcgaaagctgcgacgactatcttcccctggggccatggactcggacgccagcctggtgtccagccgcccgtcgtcgccagagcccgatgacctttttctgccggcccggagtaagggcagcagcggcagcgccttcactgggggcaccgtgtcctcgtccaccccgagtgactgcccgccggagctgagcgccgagctgcgcggcgctatgggctctgcgggcgcgcatcctggggacaagctaggaggcagtggcttcaagtcatcctcgtccagcacctcgtcgtctacgtcgtcggcggctgcgtcgtccaccaagaaggacaagaagcaaatgacagagccggagctgcagcagctgcgtctcaagatcaacagccgcgagcgcaagcgcatgcacgacctcaacatcgccatggatggcctccgcgaggtcatgccgtacgcacacggcccttcggtgcgcaagctttccaagatcgccacgctgctgctggcgcgcaactacatcctcatgctcaccaactcgctggaggagatgaagcgactggtgagcgagatctacgggggccaccacgctggcttccacccgtcggcctgcggcggcctggcgcactccgcgcccctgcccgccgccaccgcgcacccggcagcagcagcgcacgccgcacatcaccccgcggtgcaccaccccatcctgccgcccgccgccgcagcggctgctgccgccgctgcagccgcggctgtgtccagcgcctctctgcccggatccgggctgccgtcggtcggctccatccgtccaccgcacggcctactcaagtctccgtctgctgccgcggccgccccgctggggggcgggggcggcggcagtggggcgagcgggggcttccagcactggggcggcatgccctgcccctgcagcatgtgccaggtgccgccgccgcaccaccacgtgtcggctatgggcgccggcagcctgccgcgcctcacctccgacgccaagtgagccgactggcgccggcgcgttctggcgacaggggagccaggggccgcggggaagcgaggactggcctgcgctgggctcgggagctctgtcgcgaggaggggcgcaggaccatggactgggggtggggcatggtggggattccagcatctgcgaacccaagcaatgggggcgcccacagagcagtggggagtgaggggatgttctctccgggacctgatcgagcgctgtctggctttaacctgagctggtccagtagacatcgttttatgaaaaggtaccgctgtgtgcattcctcactagaactcatccgacccccgacccccacctccgggaaaagattctaaaaacttctttccctgagagcgtggcctgacttgcagactcggcttgggcagcacttcggggggggagggggtgttatgggagggggacacattggggccttgctcctcttcctcctttcttggcgggtgggagactccgggtagccgcactgcagaagcaacagcccgaccgcgccctccagggtcgtccctggcccaaggccaggggccacaagttagttggaagccggcgttcggtatcagaagcgctgatggtcatatccaatctcaatatctgggtcaatccacaccctcttagaactgtggccgttcctccctgtctctcgttgatttgggagaatatggttttctaataaatctgtggatgttccttcttcaacagtatgagcaagtttatagacattcagagtagaaccacttgtggattggaataacccaaaactgccgatttcaggggcgggtgcattgtagttattattttaaaatagaaactaccccaccgactcatctttccttctctaagcacaaagtgatttggttattttggtacctgagaacgtaacagaattaaaaggcagttgctgtggaaacagtttgggttatttgggggttctgttggctttttaaaattttcttttttggatgtgtaaatttatcaatgatgaggtaagtgcgcaatgctaagctgtttgctcacgtgactgccagccccatcggagtctaagccggctttcctctattttggtttatttttgccacgtttaacacaaatggtaaactcctccacgtgcttcctgcgttccgtgcaagccgcctcggcgctgcctgcgttgcaaactgggctttgtagcgtctgccgtgtaacacccttcctctgatcgcaccgcccctcgcagagagtgtatcatctgttttatttttgtaaaaacaaagtgctaaataatatttattacttgtttggttgcaaaaacggaataaatgactgagtgttgagattttaaataaaatttaaagtaaa

SEQ ID NO: 277044 - DNA, 575 bp, Artificial Sequence
  derived and/or modified sequence
ggatgcttattatagatcgacgcgacaccagcgcccggtgccaggttctcccctgaggcttttcggagcgagctcctcaaatcgcatccagagtaagtgtccccgccccacagcagccgcagcctagatcccagggacagactctcctcaactcggctgtgacccagaatgctccgatacagggggtctggatccctactctgcgggccatttctccagagcgactttgctcttctgtcctccccacactcaccgctgcatctccctcaccaaaagcgagaagtcggagcgacaacagctctttctgcccaagccccagtcagctgttttcgggtccgagggaaggaggaccctgcgaaagctgcgacgactatcttcccctggggccatggactcggacgccagcctggtgtccagccgcccgtcgtcgccagagcccgatgacctttttctgccggcccggagtaagggcagcagcggcagcgccttcactgggggcaccgtgtcctcgtccaccccgagtgactgcccgccggagctgagcgccgagctgcgcggcgctatgggctctgcgg

SEQ ID NO: 277045 - DNA, 972 bp, Artificial Sequence
  derived and/or modified sequence
atggatagcgacgcttccctcgtgagctctcgccctagctctcccgaacccgacgatttgtttcttccagcccgttccaagggcagctctggaagtgcgtttacggggggaaccgtgagttcttcaaccccctccgactgcccccctgaactatccgcagagctgcggggagctatggggagtgccggagctcatcctggggataaactgggcggatctggattcaagtcgtcttcaagttcgaccagcagctcaacctcaagcgccgcagcctcatcaaccaagaaagacaagaaacaaatgacagagccagagctacagcagttacgtctaaagataaatagccgcgagcgcaaacgcatgcacgacttaaacatcgccatggatgggctccgggaagttatgccatacgctcacggaccgtcagtccggaaactgtcaaaaattgcaactctactgttagccaggaactatattctgatgctcaccaattcattagaggagatgaagagactcgtaagtgaaatctacgggggacaccatgccggattccacccttcagcttgtggcggactcgcccacagcgcgccacttcccgcagccactgcacacccggctgccgcagcccacgccgcacaccatcctgccgtgcaccacccaatcctcccacctgcggctgcagcggcagcagccgcagccgctgccgcagcggtttcatctgccagcctgccaggaagtgggctgccctcagtggggtctatcaggccccctcacggtctacttaagtcgcctagtgctgccgctgccgctccgctgggagggggtggcggaggctctggcgcatcaggcggatttcagcattggggcggaatgccgtgcccctgtagtatgtgtcaggtaccgcctccacaccaccacgtctccgctatgggggcaggaagtctgcctagattgacgagtgatgcaaagtag

SEQ ID NO: 277046 - DNA, 972 bp, Artificial Sequence
  derived and/or modified sequence
atggactcagatgcttccctggtgagctctagaccaagctcccccgagcctgacgatctgttcttgcctgccagatccaaggggtcgtcaggttccgcctttacaggagggaccgtaagctcgagtacaccgtcggattgtccgccagagctgtccgctgaattgcggggtgctatgggctccgctggtgcccaccctggcgataagttaggaggaagcggatttaaatcatcatccagttctacatcatcatcaactagttcagccgcagcgagttcgaccaagaaagacaagaaacagatgactgagcccgaactgcagcagcttcggctcaaaataaacagtcgtgagagaaaaaggatgcacgacctcaacatcgccatggacggcttgcgggaagtgatgccctacgcccacgggccttccgtaagaaagttgtctaagatagccactttgctcctggcccgaaattatatcttgatgttgactaattctctcgaggaaatgaaacgacttgtaagcgaaatctatggcggacaccatgccggattccatccaagtgcttgcgggggtctggcacactccgctcctctgcccgcagcaacggcccaccctgccgctgccgctcatgcagctcatcaccccgctgtacatcatcccatcttgccccctgctgctgccgcagccgctgccgcagctgccgctgccgctgtcagctcagcatcgctgcctggttccgggttgcctagcgttggttccatccgccctccacatggcctattgaaatccccaagcgccgcagctgccgctccattaggagggggaggcggtgggtctggcgcttccggcggttttcaacactggggaggcatgccttgtccgtgcagcatgtgccaagtaccaccgccacatcaccatgtaagcgccatgggggctggctcacttcctagactaacgtctgatgctaagtag

SEQ ID NO: 277047 - DNA, 189 bp, Artificial Sequence
  derived and/or modified sequence
atggactctgacgccagcctggtttcatctagaccaagctcccccgagcctgacgatttatttctgcctgcaagatccaagggttctagcgggtccgccttcacaggtgggaccgtgagctctagtacaccttcagactgcccccctgagctgtctgccgaattgcgaggcgcaatgggctccgcctag

SEQ ID NO: 277048 - DNA, 972 bp, Artificial Sequence
  derived and/or modified sequence
atggacagcgacgccagcctggtgagcagcagacccagcagccccgagcccgacgacctgttcctgcccgccagaagcaagggcagcagcggcagcgccttcaccggcggcaccgtgagcagcagcacccccagcgactgcccccccgagctgagcgccgagctgagaggcgccatgggcagcgccggcgcccaccccggcgacaagctgggcggcagcggcttcaagagcagcagcagcagcaccagcagcagcaccagcagcgccgccgccagcagcaccaagaaggacaagaagcagatgaccgagcccgagctgcagcagctgagactgaagatcaacagcagagagagaaagagaatgcacgacctgaacatcgccatggacggcctgagagaggtgatgccctacgcccacggccccagcgtgagaaagctgagcaagatcgccaccctgctgctggccagaaactacatcctgatgctgaccaacagcctggaggagatgaagagactggtgagcgagatctacggcggccaccacgccggcttccaccccagcgcctgcggcggcctggcccacagcgcccccctgcccgccgccaccgcccaccccgccgccgccgcccacgccgcccaccaccccgccgtgcaccaccccatcctgccccccgccgccgccgccgccgccgccgccgccgccgccgccgccgtgagcagcgccagcctgcccggcagcggcctgcccagcgtgggcagcatcagacccccccacggcctgctgaagagccccagcgccgccgccgccgcccccctgggcggcggcggcggcggcagcggcgccagcggcggcttccagcactggggcggcatgccctgcccctgcagcatgtgccaggtgccccccccccaccaccacgtgagcgccatgggcgccggcagcctgcccagactgaccagcgacgccaagtag

SEQ ID NO: 277049 - DNA, 189 bp, Artificial Sequence
  derived and/or modified sequence
atggacagcgacgccagcctggtgagcagcagacccagcagccccgagcccgacgacctgttcctgcccgccagaagcaagggcagcagcggcagcgccttcaccggcggcaccgtgagcagcagcacccccagcgactgcccccccgagctgagcgccgagctgagaggcgccatgggcagcgcctag

SEQ ID NO: 277050 - DNA, 1410 bp, Artificial Sequence
  derived and/or modified sequence
atgaacgacttcggcatcaagaacatggaccaggtggcccccgtggccaacagctacagaggcaccctgaagagacagcccgccttcgacaccttcgacggcagcctgttcgccgtgttccccagcctgaacgaggagcagaccctgcaggaggtgcccaccggcctggacagcatcagccacgacagcgccaactgcgagctgcccctgctgaccccctgcagcaaggccgtgatgagccaggccctgaaggccaccttcagcggcttcaagaaggagcagagaagactgggcatccccaagaacccctggctgtggagcgagcagcaggtgtgccagtggctgctgtgggccaccaacgagttcagcctggtgaacgtgaacctgcagagattcggcatgaacggccagatgctgtgcaacctgggcaaggagagattcctggagctggcccccgacttcgtgggcgacatcctgtgggagcacctggagcagatgatcaaggagaaccaggagaagaccgaggaccagtacgaggagaacagccacctgaccagcgtgccccactggatcaacagcaacaccctgggcttcggcaccgagcaggccccctacggcatgcagacccagaactaccccaagggcggcctgctggacagcatgtgccccgccagcacccccagcgtgctgagcagcgagcaggagttccagatgttccccaagagcagactgagcagcgtgagcgtgacctactgcagcgtgagccaggacttccccggcagcaacctgaacctgctgaccaacaacagcggcacccccaaggaccacgacagccccgagaacggcgccgacagcttcgagagcagcgacagcctgctgcagagctggaacagccagagcagcctgctggacgtgcagagagtgcccagcttcgagagcttcgaggacgactgcagccagagcctgtgcctgaacaagcccaccatgagcttcaaggactacatccaggagagaagcgaccccgtggagcagggcaagcccgtgatccccgccgccgtgctggccggcttcaccggcagcggccccatccagctgtggcagttcctgctggagctgctgagcgacaagagctgccagagcttcatcagctggaccggcgacggctgggagttcaagctggccgaccccgacgaggtggccagaagatggggcaagagaaagaacaagcccaagatgaactacgagaagctgagcagaggcctgagatactactacgacaagaacatcatccacaagaccagcggcaagagatacgtgtacagattcgtgtgcgacctgcagaacctgctgggcttcacccccgaggagctgcacgccatcctgggcgtgcagcccgacaccgaggactag

SEQ ID NO: 277051 - DNA, 507 bp, Artificial Sequence
  derived and/or modified sequence
atgaacgacttcggcatcaagaacatggaccaggtggcccccgtggccaacagctacagaggcaccctgaagagacagcccgccttcgacaccttcgacggcagcctgttcgccgtgttccccagcctgaacgaggagcagaccctgcaggaggtgcccaccggcctggacagcatcagccacgacagcgccaactgcgagctgcccctgctgaccccctgcagcaaggccgtgatgagccaggccctgaaggccaccttcagcggcttcaagaaggagcagagaagactgggcatccccaagaacccctggctgtggagcgagcagcaggtgtgccagtggctgctgtgggccaccaacgagttcagcctggtgaacgtgaacctgcagagattcggcatgaacggccagatgctgtgcaacctgggcaaggagagattcctggagctggcccccgacttcgtgggcgacatcctgtgggagcacctggagcagatgatcaagtag

SEQ ID NO: 277052 - DNA, 813 bp, Artificial Sequence
  derived and/or modified sequence
atgaacgacttcggcatcaagaacatggaccaggtggcccccgtggccaacagctacagaggcaccctgaagagacagcccgccttcgacaccttcgacggcagcctgttcgccgtgttccccagcctgaacgaggagcagaccctgcaggaggtgcccaccggcctggacagcatcagccacgacagcgccaactgcgagctgcccctgctgaccccctgcagcaaggccgtgatgagccaggccctgaaggccaccttcagcggcttcaagaaggagcagagaagactgggcatccccaagaacccctggctgtggagcgagcagcaggtgtgccagtggctgctgtgggccaccaacgagttcagcctggtgaacgtgaacctgcagagattcggcatgaacggccagatgctgtgcaacctgggcaaggagagattcctggagctggcccccgacttcgtgggcgacatcctgtgggagcacctggagcagatgatcaaggagaaccaggagaagaccgaggaccagtacgaggagaacagccacctgaccagcgtgccccactggatcaacagcaacaccctgggcttcggcaccgagcaggccccctacggcatgcagacccagaactaccccaagggcggcctgctggacagcatgtgccccgccagcacccccagcgtgctgagcagcgagcaggagttccagatgttccccaagagcagactgagcagcgtgagcgtgacctactgcagcgtgagccaggacttccccggcagcaacctgaacctgctgaccaacaacagctag

SEQ ID NO: 277053 - DNA, 1410 bp, Artificial Sequence
  derived and/or modified sequence
atgaatgatttcgggattaaaaatatggatcaggtggcgcctgtggcgaattcttataggggaaccctgaagcggcaacctgcatttgatacttttgacgggagcctgtttgctgtgttcccatctctcaacgaagagcaaacgctccaggaggtgcccacaggacttgacagcatctcccacgacagcgccaattgtgaattaccattgttaacgccttgttcaaaggctgtgatgtcccaggctcttaaagctacctttagcggcttcaagaaggagcagagacgcctggggattccaaagaatccatggctgtggagcgagcagcaagtctgccagtggctcctgtgggccaccaatgaattctctctggttaatgtaaatctgcagcgctttggtatgaatggacaaatgctgtgtaatctgggaaaagaaaggtttcttgagctggcacccgacttcgttggagacattctctgggagcatctggagcaaatgatcaaagagaatcaggaaaaaaccgaggatcagtacgaggagaactctcatttgacttcagtgccgcactggattaatagcaatacacttgggttcggcacagaacaggccccttacgggatgcagacgcagaattaccctaagggcgggctccttgacagcatgtgcccagcgtccacaccaagtgtcctcagtagtgagcaggagttccaaatgtttcctaagtcccggctgtccagcgtgtcagtaacatactgctctgtgagtcaggacttccccgggagcaatttgaacctgctgaccaataactccggaactccaaaagatcatgatagtccagagaatggcgcggattcttttgagagctctgactccctactccaaagctggaatagtcagagctccctattagacgttcaacgagtgcccagctttgaatcttttgaagacgattgctctcagtcgctgtgcttaaacaaacctaccatgtcattcaaggattatattcaggagaggtcagaccctgtggaacaggggaagcctgtcatccccgccgccgtattggcagggttcacaggtagcggtcccatacagttgtggcaatttctgttagagttgctgagcgacaaatcatgccaaagttttatatcatggaccggcgatggatgggagttcaaattggctgacccagatgaggtagcacgtaggtggggaaaacgaaagaacaagccaaaaatgaactacgagaagttaagccgggggctgagatattactacgataaaaatatcatccataaaacatccggtaaaagatatgtctatcgatttgtttgcgacctgcagaatctcctgggctttactcctgaagagctgcacgctatcttgggggtccagcctgacacggaggattag

SEQ ID NO: 277054 - DNA, 1410 bp, Artificial Sequence
  derived and/or modified sequence
atgaatgactttggcatcaaaaacatggatcaagtggcacctgttgcgaatagctatagggggaccctgaagaggcaacccgctttcgacacctttgacggcagtctgtttgccgttttcccttctctgaacgaggaacagacactgcaggaggtgcccaccggtctggactccatctctcacgactccgccaactgtgagctgccattgttgaccccctgcagcaaagccgtgatgtctcaggcactcaaggccactttcagtggattcaagaaagaacagcggcgcctggggatcccaaaaaacccatggctctggtccgagcaacaggtgtgccaatggctactgtgggccaccaacgagttttctctggtgaacgtcaatctccagcgctttgggatgaatggccagatgctgtgtaatttgggcaaggagcgctttctggaactcgcccccgatttcgtgggcgatatcctttgggagcacttagagcagatgatcaaggagaaccaggagaagactgaggatcagtacgaggaaaacagtcaccttacttcagttcctcattggattaatagcaacactcttgggtttgggacggaacaggccccgtacggcatgcaaacgcagaattatccgaaagggggtttgctggattccatgtgtcctgccagcacaccctccgtcctctcttccgaacaggagttccagatgttcccaaagagccgactgtccagtgtgagcgtcacatattgcagcgtatctcaagattttcccggcagtaacttaaacctgttgactaataactctggaacacccaaagaccatgattcaccagagaatggagccgacagctttgaaagttccgactctctgcttcagtcatggaacagccagtcctctttgttggacgttcagcgcgtgcccagtttcgagtcatttgaggatgactgcagccagagcctgtgtctgaataagccgacaatgagtttcaaagattacattcaggagcgcagcgatcctgttgaacagggcaagcccgttatcccagccgccgtgcttgctggatttactggatctggcccgattcagctgtggcagtttcttctggaactcttgagcgacaagtcctgccaaagttttatctcttggactggcgatggctgggagtttaagctcgccgaccctgatgaggtggcccggagatgggggaagcgcaaaaacaaacctaaaatgaactacgagaaactttcacgtggactccgttattactatgataaaaatatcatccataagacgtccggaaaaaggtacgtgtataggtttgtctgcgatctgcagaatctcctcgggttcacaccagaagagctgcatgctattctgggggttcagcccgacaccgaagactag

SEQ ID NO: 277055 - DNA, 507 bp, Artificial Sequence
  derived and/or modified sequence
atgaatgatttcggtatcaaaaatatggatcaggtggcaccagtggcaaattcttaccggggcactttaaagaggcaacctgcctttgacaccttcgatggctcactgtttgccgtgttcccgtccctgaatgaagagcagactctgcaggaagtccccaccggtctcgactcgattagccatgattccgctaattgcgaattgccgctgctaaccccttgctctaaagcagtgatgagccaggctctcaaggcaaccttctcgggcttcaaaaaggagcagcggaggctcggcatccccaaaaacccgtggctgtggtctgagcaacaggtctgccagtggctgctctgggctacgaatgagttttcccttgtaaatgtaaacctacaacgtttcgggatgaacggacagatgctgtgtaacttggggaaagaacgtttcctcgagctagctcccgatttcgtgggtgacattttgtgggagcatctcgaacagatgatcaagtag

SEQ ID NO: 277056 - DNA, 813 bp, Artificial Sequence
  derived and/or modified sequence
atgaatgatttcggcatcaagaacatggaccaggtggctcccgtcgctaattcttatagaggaactctgaagagacagcccgcattcgatacatttgatgggagcttattcgcagtgtttcccagcctgaacgaggagcagactttgcaggaagtgccaacaggcttggatagtatctcacacgacagtgccaactgcgagttaccattactcactccatgcagcaaggctgtcatgtcccaggcactcaaagccaccttcagcgggttcaagaaggagcagcgaaggctgggcattcctaagaacccttggctctggagtgagcagcaggtgtgtcagtggcttttgtgggctacaaacgaattcagtttggtgaatgtgaacctccagagatttgggatgaacggccagatgttatgtaacctgggaaaggagcggtttctagaactggcacccgacttcgtcggtgacatcttgtgggaacacctggaacagatgataaaagagaatcaggaaaaaaccgaggatcaatatgaggagaattcgcacctgacatccgtcccacattggattaactctaacaccctaggctttggaaccgagcaggccccctacggaatgcagacgcagaattatccgaaagggggcctgttggactctatgtgtccagccagtacccccagcgtgctgtcatctgagcaggagtttcagatgttccccaagagcaggttgtcttcagtctctgtcacctactgctccgttagccaggatttccccggcagcaacctgaatctccttaccaacaactcctag

SEQ ID NO: 277057 - DNA, 1410 bp, Artificial Sequence
  derived and/or modified sequence
atgaatgactttggcatcaagaacatggaccaggtggcccctgtggccaacagctaccggggcaccctgaagaggcagcctgcctttgacacctttgatggcagcctgtttgctgtgttccccagcctgaatgaggagcagaccctgcaggaggtgcccaccggcctggacagcatcagccatgattctgccaactgtgagctgcccctgctgaccccctgcagcaaggctgtgatgagccaggccctgaaggccaccttcagcggcttcaagaaggagcagaggcggctgggcatccccaagaacccctggctgtggagcgagcagcaggtgtgccagtggctgctgtgggccaccaatgagttcagcctggtgaatgtgaacctgcagcgcttcggcatgaatggccagatgctgtgcaacctgggcaaggagcgcttcctggagctggccccagactttgtgggggacatcctgtgggagcacctggagcagatgatcaaggagaaccaggagaagacagaggaccagtatgaggagaacagccacctgacctctgtgccccactggatcaacagcaacaccctgggcttcggcacagagcaggccccctacggcatgcagacccagaactaccccaagggcggcctgctggacagcatgtgcccagccagcacccccagcgtgctgagcagcgagcaggagttccagatgttccccaagagccggctgagctctgtgtctgtgacctactgcagcgtgtcccaggacttccctggcagcaacctgaacctgctgaccaacaacagcggcacccccaaggaccatgacagcccagaaaatggagctgacagctttgagagcagtgacagcctgctgcagagctggaacagccagagcagcctgctggatgtgcagagggtgcccagctttgagagctttgaagatgactgcagccagagcctgtgcctgaacaagcccaccatgtccttcaaggactacatccaggagaggagtgaccctgtggagcagggcaagcctgtgatcccagctgctgtgctggccggcttcaccggcagcggccccatccagctgtggcagttcctgctggagctgctgagtgacaagagctgccagagcttcatctcctggacaggagatggctgggagttcaagctggccgaccctgatgaggtggcccggcgctggggcaagaggaagaacaagcccaagatgaactatgagaagctgagccggggcctgcgctactactatgacaagaacatcatccacaagaccagcggcaagcgctacgtgtacagatttgtgtgtgacctgcagaacctgctgggcttcaccccagaggagctgcacgccatcctgggcgtgcagcctgacacagaggactag

SEQ ID NO: 277058 - DNA, 507 bp, Artificial Sequence
  derived and/or modified sequence
atgaatgactttggcatcaagaacatggaccaggtggcccctgtggccaacagctaccggggcaccctgaagaggcagcctgcctttgacacctttgatggcagcctgtttgctgtgttccccagcctgaatgaggagcagaccctgcaggaggtgcccaccggcctggacagcatcagccatgattctgccaactgtgagctgcccctgctgaccccctgcagcaaggctgtgatgagccaggccctgaaggccaccttcagcggcttcaagaaggagcagaggcggctgggcatccccaagaacccctggctgtggagcgagcagcaggtgtgccagtggctgctgtgggccaccaatgagttcagcctggtgaatgtgaacctgcagcgcttcggcatgaatggccagatgctgtgcaacctgggcaaggagcgcttcctggagctggccccagactttgtgggggacatcctgtgggagcacctggagcagatgatcaagtag

SEQ ID NO: 277059 - DNA, 813 bp, Artificial Sequence
  derived and/or modified sequence
atgaatgactttggcatcaagaacatggaccaggtggcccctgtggccaacagctaccggggcaccctgaagaggcagcctgcctttgacacctttgatggcagcctgtttgctgtgttccccagcctgaatgaggagcagaccctgcaggaggtgcccaccggcctggacagcatcagccatgattctgccaactgtgagctgcccctgctgaccccctgcagcaaggctgtgatgagccaggccctgaaggccaccttcagcggcttcaagaaggagcagaggcggctgggcatccccaagaacccctggctgtggagcgagcagcaggtgtgccagtggctgctgtgggccaccaatgagttcagcctggtgaatgtgaacctgcagcgcttcggcatgaatggccagatgctgtgcaacctgggcaaggagcgcttcctggagctggccccagactttgtgggggacatcctgtgggagcacctggagcagatgatcaaggagaaccaggagaagacagaggaccagtatgaggagaacagccacctgacctctgtgccccactggatcaacagcaacaccctgggcttcggcacagagcaggccccctacggcatgcagacccagaactaccccaagggcggcctgctggacagcatgtgcccagccagcacccccagcgtgctgagcagcgagcaggagttccagatgttccccaagagccggctgagctctgtgtctgtgacctactgcagcgtgtcccaggacttccctggcagcaacctgaacctgctgaccaacaacagctag

SEQ ID NO: 277060 - DNA, 1410 bp, Artificial Sequence
  derived and/or modified sequence
atgaacgacttcggcatcaagaacatggaccaggtggcccccgtggcaaactcatacagggggaccctcaaaagacagccggccttcgatacattcgatggtagtttatttgcagtgttcccttccctgaacgaggagcagacgttgcaggaggtgccaaccggactcgatagcatttcccatgattcagccaactgtgagctccctctattgactccctgctcaaaggccgtcatgtcccaggcgctcaaggctaccttcagtggattcaaaaaagagcagcgaagactcggaattcctaaaaacccttggctttggtcagagcaacaagtgtgccagtggttgctgtgggctacaaatgaatttagtctggtcaacgtgaacttacaaaggtttggcatgaacggtcaaatgctgtgtaatctgggcaaagagcgattcttagagctggctcccgattttgtcggagacatcctgtgggaacacctcgagcagatgatcaaggaaaaccaagagaaaaccgaagaccagtacgaagagaactcccacctaaccagcgttcctcattggatcaattctaacaccctcggctttgggactgagcaggctccctatggcatgcagacccaaaattaccccaaaggcgggttgctggattctatgtgtcccgctagcaccccttccgtacttagctccgaacaggagttccaaatgttccccaagagccgattatcctcagtgagcgtgacttactgtagtgtctcgcaggacttccccggatcaaatcttaacttgctgacaaacaattctgggacgcctaaagatcatgattctcctgaaaatggtgcggatagcttcgaatcctctgactctctcctacagagctggaactcccagtcatccttgctggatgtacaacgcgttcctagcttcgagtcgttcgaggacgattgtagccagagtctatgtttgaacaaaccaactatgtcatttaaagactatatacaagaaaggtccgaccccgtagaacagggcaaacctgtgatcccggccgctgtcttagcaggattcactggtagtgggcctatccagctgtggcagttccttctggagttactgagcgataagagctgccagagctttatatcctggacaggagacggctgggagtttaagctcgctgatcctgatgaagttgcacgaagatggggaaagcgtaaaaacaagccaaaaatgaattacgaaaagctgagcaggggcttgcgctactattacgataagaacatcatccacaagacctcgggcaagaggtacgtgtatcgttttgtgtgtgaccttcagaaccttctgggattcactcctgaggaactacacgctatactgggggtccagcctgataccgaggattag

SEQ ID NO: 277061 - DNA, 1410 bp, Artificial Sequence
  derived and/or modified sequence
atgaacgacttcggcatcaagaacatggaccaggtggcccccgtggcaaatagctaccgaggtacgctgaagcggcagcccgcctttgacacttttgacgggtctctgttcgctgttttcccatcgctgaatgaggagcagacactgcaggaggtgcccacgggtctcgattctatttcccacgatagtgccaactgcgagttgcccttgctgaccccatgcagcaaggctgtcatgtcccaagccttgaaagccaccttttccggctttaagaaggagcagaggagactaggcattcctaaaaacccatggctctggagcgaacagcaggtgtgtcagtggctgctctgggctacgaatgagtttagtctagtgaatgtaaatctccagaggttcggcatgaacggacagatgttatgtaacctcgggaaggagagatttctcgaactcgcacctgacttcgttggagacatactgtgggagcaccttgaacagatgatcaaggaaaaccaagagaaaacggaggatcagtacgaagaaaattcccacctgaccagcgtgccacattggatcaatagtaacactctgggcttcgggacagagcaggccccttacgggatgcaaacccagaattatcccaaaggcggcctgttggatagcatgtgtcctgcatccacaccgagtgtcctgagttctgaacaggaattccagatgttccctaaatctagactgagctcagtttccgtcacatactgttcagtcagccaggacttccccggatccaatctcaatctgctgaccaataatagcggaactcctaaggaccatgactctcccgagaacggagcggactcttttgaatcctcggactcattgctgcagagctggaactcacaatcctctctcctggatgtgcagcgcgttccgagctttgagtccttcgaagatgactgttctcagtccctctgtctgaataagccgactatgagcttcaaagattatattcaggagcgttcagaccctgtagagcagggtaagcctgttattcctgccgctgtgcttgctgggttcaccggaagcggacctatccaactctggcagttcctgcttgagttgctgtcagataagtcctgccagtcctttatttcctggacgggcgacggatgggagtttaagctggcagatcctgatgaagtagccaggagatgggggaaacggaagaataagccgaagatgaactatgagaaactgagcagaggtctccggtactattacgacaagaatataatccacaaaacaagtggcaaacgatacgtttaccggtttgtgtgtgacctccagaacttactgggctttacacccgaggaattgcacgccattctgggagtgcagccagatactgaagactag

SEQ ID NO: 277062 - DNA, 507 bp, Artificial Sequence
  derived and/or modified sequence
atgaacgacttcggcatcaagaacatggaccaggtggcccccgtggccaatagctatagaggcactctgaaaagacaacctgcgtttgatacttttgatggatcactgttcgccgtatttccatctttaaacgaagaacagacacttcaggaagtgcctaccggacttgactccatcagccatgactcagcaaattgcgagctgcctctgttgacaccttgcagtaaggctgtcatgtcccaagcactgaaagccacatttagtggctttaagaaagaacaacgccgcctgggcatacctaagaatccgtggctgtggagtgaacagcaagtgtgtcagtggttactgtgggcgaccaacgaattctccctcgtaaacgtgaacctgcagaggttcggtatgaacggacagatgctatgcaacctggggaaagagcggtttctggagctggcccccgactttgttggagacattctttgggagcacctggaacagatgatcaagtag

SEQ ID NO: 277063 - DNA, 813 bp, Artificial Sequence
  derived and/or modified sequence
atgaacgacttcggcatcaagaacatggaccaggtggcccccgtggccaactcttacagaggaacgctgaagaggcagcccgcctttgataccttcgatgggtctttattcgccgtgtttcccagcttgaatgaagaacagactctgcaagaggtgcccaccggattggatagcatttcccacgattctgctaactgtgaactgcctctgctgactccctgctccaaggctgtgatgagtcaggcactgaaggctactttcagcggcttcaaaaaagagcagcggagactgggcatacccaagaatccctggctgtggtcagagcagcaagtgtgccagtggctcttgtgggccactaacgagtttagcctggtaaacgtcaacctgcagcggtttggaatgaatgggcaaatgttgtgtaatctcggcaaggagaggtttctggagctggcaccggacttcgttggtgacatattatgggagcatctcgaacagatgatcaaggagaaccaggaaaaaactgaggatcagtatgaagagaactcccaccttaccagcgtgccacattggattaattcaaacaccctgggctttggcacggaacaagcaccctatggaatgcagacgcagaactatcccaaaggcggattgctggattcaatgtgcccagcttcaacgcctagcgttctctcaagcgagcaggaattccaaatgttccccaagtcaagactgtcctctgtcagtgtgacttactgtagcgtctctcaggacttccctgggtcaaacctcaatttgcttaccaataattcatag

SEQ ID NO: 277064 - DNA, 1410 bp, Artificial Sequence
  derived and/or modified sequence
atgaatgactttggtattaagaatatggatcaggttgcaccagtcgccaactcatacagaggaacattgaagcgccagcctgctttcgacaccttcgatggctcactctttgccgtatttccttcattgaatgaagagcaaactctccaagaagttcctaccggattggatagtatctcccatgatagcgccaactgcgagctgccactcctgactccttgttctaaagccgtgatgtcccaggctctgaaggctacctttagtggattcaagaaagaacaacggagactcggcatcccgaaaaacccatggctgtggagcgaacagcaggtgtgtcagtggctcctatgggcgacaaacgaattttccctcgttaatgttaaccttcaaaggtttggcatgaacggacagatgttatgcaacctgggtaaggagcgatttctggagctcgcaccagacttcgtcggggacatcctctgggagcacctcgagcaaatgataaaggagaaccaagagaaaaccgaggaccagtacgaagaaaattctcacttgacaagcgtgccccactggatcaactctaatactctcgggttcgggaccgagcaagccccttatgggatgcagacacagaactaccccaagggtggtctccttgacagcatgtgtcctgccagcactccatctgtcttgtccagcgaacaggaatttcagatgttccccaagagtcgcctaagttccgttagtgtaacttattgcagcgtctcacaggatttcccgggaagcaacctaaacttgttgaccaataacagcggtacaccgaaggaccatgattcgccggagaatggggcagacagttttgagtcctcagattctctcctccaaagctggaattcacagagttcattattggatgtgcagagggtgccatcattcgaatctttcgaggatgactgttctcagtcactctgcctcaataagccaacaatgtcttttaaagattatatccaggagcggtccgacccggtggagcaagggaagcccgtgatccccgcagccgttctagcaggatttacaggatccggaccaattcaactgtggcagtttttgttggagctactcagtgacaaatcctgccagtcttttatctcctggactggcgatggctgggaattcaaactagctgatcccgacgaagtcgctagaagatggggtaagcgtaagaataagccaaaaatgaactacgagaagctgagcagaggactcagatactattatgataagaacatcatacataagacatctggcaagcggtatgtgtaccgattcgtgtgtgatttacaaaatctgctgggatttacaccagaggagcttcacgccatcctgggggtccagccggatacagaagactag

SEQ ID NO: 277065 - DNA, 1410 bp, Artificial Sequence
  derived and/or modified sequence
atgaacgattttggaattaagaatatggatcaggtggctccagtggcgaattcataccgcggtactctgaaaaggcagccagcatttgacacgttcgacggcagcctcttcgccgtgttccccagcctgaacgaagaacagactctccaggaggtgcctacaggtcttgatagtatctcacatgactccgccaactgcgaactccccttgttaaccccctgctccaaggctgtcatgagccaggctctgaaagcgaccttctcagggttcaaaaaggagcagaggcgactgggtatccccaaaaacccctggctgtggtccgagcagcaggtgtgccaatggctgttgtgggccactaatgagttttccctggtcaacgttaacttgcagagatttggaatgaatggccagatgctctgcaacctcggaaaagagaggtttctggagctggcacccgattttgtcggggacattctgtgggagcatcttgaacagatgataaaagaaaatcaggagaagacggaggaccaatatgaggagaatagccacttgacaagcgtaccacactggattaacagcaacacgctcgggttcggcacagagcaagcaccatatggtatgcaaacgcaaaattatcccaagggtggattgttagattccatgtgtcccgcatctacaccaagtgtgttgagctcggagcaggagtttcaaatgttccctaagagcagactgagttcagtgtcggtgacttattgcagtgttagccaggatttccctggaagcaatcttaaccttttgacaaataactcaggcacacctaaggaccacgactcccctgaaaacggggctgattcctttgaaagcagtgactctctgctccagtcttggaatagccaatccagcctcctcgacgtccagagagtcccttcgtttgaatccttcgaagacgattgcagccaatcactgtgcttgaacaagccaacaatgtcctttaaggactatattcaggagagatcggatcccgtcgagcaggggaaaccagttatccccgcagccgtgctggcgggatttacaggctccggcccaatccagctgtggcaattcctcttggagctgttgtccgataagagttgccagtcctttatatcatggactggtgatggctgggaatttaagctggctgaccctgatgaggtggctaggcgctggggaaaaagaaagaacaaacccaaaatgaattacgagaaattatccagaggtcttaggtactattacgacaaaaatataatccacaaaacgagcggcaagcgatatgtgtacagatttgtgtgcgatctgcaaaatctgctcgggtttaccccagaagaacttcacgccatcctgggtgtgcagcctgatacagaggattag

SEQ ID NO: 277066 - DNA, 507 bp, Artificial Sequence
  derived and/or modified sequence
atgaatgacttcggaatcaagaacatggaccaggtggctcctgtggctaacagttatagaggaacactcaaacggcagcctgcattcgatacgttcgacggctctcttttcgctgtgttcccaagtctgaatgaagagcagacactgcaggaagttcctacaggactggactcaatcagccacgattctgccaattgcgaactgcctctcctcaccccatgtagtaaagcagtcatgtctcaagctcttaaagccacgttttctggatttaagaaggaacagcggcgactgggtattccaaaaaatccttggctctggtctgagcagcaggtttgccagtggctgttatgggccacaaatgagttttccctagtgaatgtaaatctgcagagattcggcatgaacggacaaatgctttgcaatctcggaaaagaacgtttcctcgagcttgccccagatttcgtgggagatattttgtgggagcacctcgaacagatgattaagtag

SEQ ID NO: 277067 - DNA, 813 bp, Artificial Sequence
  derived and/or modified sequence
atgaacgacttcggcattaagaatatggaccaggtggctccagtggcaaacagttatcgcggtactctgaaacgacagccggctttcgacaccttcgatggatctctgtttgcggtctttccctcactcaatgaggagcagaccctgcaggaggtgccgaccgggttggactcaatcagccacgatagcgccaattgtgaactgccgctgctgacaccttgttccaaagccgtgatgtctcaagcccttaaagcaaccttttctggttttaagaaggaacagaggcgcctgggcatccccaaaaatccctggctgtggtctgagcagcaagtctgtcagtggttgctctgggccaccaatgagttttccctggtgaatgtgaacctgcaacggtttgggatgaacgggcagatgctgtgtaacttgggcaaggaaagatttctagaattagctcccgacttcgtgggagatatcctgtgggagcatctggaacagatgatcaaagagaaccaggagaagaccgaagaccagtacgaggagaactcccacctgacatcagtgcctcactggattaactcaaatactctcggtttcggaacagagcaggccccatacggcatgcagacccagaattatcccaagggaggtctgctagactccatgtgccccgcatcgactcctagcgtgttgagctccgaacaggagttccagatgtttcctaaaagccgactctccagtgtgtctgtgacctactgcagtgtctcacaggatttcccaggtagtaacctaaatttgttgactaacaatagttag

SEQ ID NO: 277068 - DNA, 1033 bp, Artificial Sequence
  derived and/or modified sequence
cgagtgcggtgtcgctccagctcagagctcccggagccgcccggccagcgtccggcctccctgatcgtctctggccggcgccctcgccctcgcccggcgcgcaccgagcagccgcgggcgccgagcagccaccgtcccgaccaagcgccggccctgcccgcagcggcagggaaacgcaggcctggtagggggtcctgcccagtggatgtcccggcgaacatgatttcgcgaacgggagtgggggcacaggagagcgtgtccgaggtggcctggcgccccggctttgagggtgacttcctggagcggcgccgggcccggaggatctggggcgcccaagacacctgaaggctgcggcaccgcgggaacctgcggggcgcggggtgccatggtcacctgctcgccgcgtccagggcccgggctggggacccctcggtcgtgcgaggagagcgtggggaacctgtcggaaatgagatctggttgcgctgggctgcctttattttctcgttcctacagcatttgaatgaagagatgaatgatttcggaatcaagaatatggaccaggtagcccctgtggctaacagttacagagggacactcaagcgccagccagcctttgacacctttgatgggtccctgtttgctgtttttccttctctaaatgaagagcaaacactgcaagaagtgccaacaggcttggattccatttctcatgactccgccaactgtgaattgcctttgttaaccccgtgcagcaaggctgtgatgagtcaagccttaaaagctaccttcagtggcttcaaaaaggaacagcggcgcctgggcattccaaagaacccctggctgtggagtgagcaacaggtatgccagtggcttctctgggccaccaatgagttcagtctggtgaacgtgaatctgcagaggttcggcatgaatggccagatgctgtgtaaccttggcaaggaacgctttctggagctggcacctgactttgtgggtgacattctctgggaacatctggagcaaatgatcaaag

SEQ ID NO: 277069 - DNA, 972 bp, Artificial Sequence
  derived and/or modified sequence
gcccactgccccactgtacccacccaagcactcacctaagctggccatggaaatgtgaatgaaaagcctgacccaggccctcttgccctgctaacccagcaaggaggctctgaccagccagccagcaagtgactttttctgtgacatctaagtggaattcaatgaatgatttcggaatcaagaatatggaccaggtagcccctgtggctaacagttacagagggacactcaagcgccagccagcctttgacacctttgatgggtccctgtttgctgtttttccttctctaaatgaagagcaaacactgcaagaagtgccaacaggcttggattccatttctcatgactccgccaactgtgaattgcctttgttaaccccgtgcagcaaggctgtgatgagtcaagccttaaaagctaccttcagtggcttcaaaaaggaacagcggcgcctgggcattccaaagaacccctggctgtggagtgagcaacaggtatgccagtggcttctctgggccaccaatgagttcagtctggtgaacgtgaatctgcagaggttcggcatgaatggccagatgctgtgtaaccttggcaaggaacgctttctggagctggcacctgactttgtgggtgacattctctgggaacatctggagcaaatgatcaaagaaaaccaagaaaagacagaagatcaatatgaagaaaattcacacctcacctccgttcctcattggattaacagcaatacattaggttttggcacagagcaggcgccctatggaatgcagacacagaattaccccaaaggcggcctcctggacagcatgtgtccggcctccacacccagcgtactcagctctgagcaggagtttcagatgttccccaagtctcggctcagctccgtcagcgtcacctactgctctgtcagtcaggacttcccaggcagcaacttgaatttgctcaccaacaattctg

SEQ ID NO: 277070 - protein, 934 aa, Artificial Sequence
  derived and/or modified sequence
MEHGTLLAQPGLWTRDTSWALLYFLCYILPQTAPQVLRIGGIFETVENEPVNVEELAFKFAVTSINRNRTLMPNTTLTYDIQRINLFDSFEASRRACDQLALGVAALFGPSHSSSVSAVQSICNALEVPHIQTRWKHPSVDNKDLFYINLYPDYAAISRAILDLVLYYNWKTVTVVYEDSTGLIRLQELIKAPSRYNIKIKIRQLPSGNKDAKPLLKEMKKGKEFYVIFDCSHETAAEILKQILFMGMMTEYYHYFFTTLDLFALDLELYRYSGVNMTGFRLLNIDNPHVSSIIEKWSMERLQAPPRPETGLLDGMMTTEAALMYDAVYMVAIASHRASQLTVSSLQCHRHKPWRLGPRFMNLIKEARWDGLTGHITFNKTNGLRKDFDLDIISLKEEGTEKIGIWNSNSGLNMTDSNKDKSSNITDSLANRTLIVTTILEEPYVMYRKSDKPLYGNDRFEGYCLDLLKELSNILGFIYDVKLVPDGKYGAQNDKGEWNGMVKELIDHRADLAVAPLTITYVREKVIDFSKPFMTLGISILYRKPNGTNPGVFSFLNPLSPDIWMYVLLACLGVSCVLFVIARFTPYEWYNPHPCNPDSDVVENNFTLLNSFWFGVGALMQQGSELMPKALSTRIVGGIWWFFTLIIISSYTANLAAFLTVERMESPIDSADDLAKQTKIEYGAVRDGSTMTFFKKSKISTYEKMWAFMSSRQQTALVRNSDEGIQRVLTTDYALLMESTSIEYVTQRNCNLTQIGGLIDSKGYGVGTPIGSPYRDKITIAILQLQEEGKLHMMKEKWWRGNGCPEEDNKEASALGVENIGGIFIVLAAGLVLSVFVAIGEFIYKSRKNNDIEQKGKSSRIRFYFRNKVRFHGRKKQSLGVEKCLSFNAIMEELGISLKNQKKIKKKSRTKGKSSFTSILTCHQRRTQRKETVA

SEQ ID NO: 277071 - protein, 748 aa, Artificial Sequence
  derived and/or modified sequence
MEHGTLLAQPGLWTRDTSWALLYFLCYILPQTAPQVLRIACDQLALGVAALFGPSHSSSVSAVQSICNALEVPHIQTRWKHPSVDNKDLFYINLYPDYAAISRAILDLVLYYNWKTVTVVYEDSTGLIRLQELIKAPSRYNIKIKIRQLPSGNKDAKPLLKEMKKGKEFYVIFDCSHETAAEILKQILFMGMMTEYYHYFFTTLDLFALDLELYRYSGVNMTGFRLLNIDNPHVSSIIEKWSMERLQAPPRPETGLLDGMMTTEAALMYDAVYMVAIASHRASQLTVSSLQCHRHKPWRLGPRFMNLIKEARWDGLTGHITFNKTNGLRKDFDLDIISLKEEGTEKIGIWNSNSGLNMTDSNKDKSSNITDSLANRTLIVTTILRADLAVAPLTITYVREKVIDFSKPFMTLGISILYRKPNGTNPGVFSFLNPLSPDIWMYVLLACLGVSCVLFVIARFTPYEWYNPHPCNPDSDVVENNFTLLNSFWFGVGALMQQGSELMPKALSTRIVGGIWWFFTLIIISSYTANLAAFLTVERMESPIDSADDLAKQTKIEYGAVRDGSTMTFFKKSKISTYEKMWAFMSSRQQTALVRNSDEGIQRVLTTDYALLMESTSIEYVTQRNCNLTQIGGLIDSKGYGVGTPIGSPYRDKITIAILQLQEEGKLHMMKEKWWRGNGCPEEDNKEASALGVENIGGIFIVLAAGLVLSVFVAIGEFIYKSRKNNDIEQCLSFNAIMEELGISLKNQ

SEQ ID NO: 277072 - DNA, 2805 bp, Artificial Sequence
  derived and/or modified sequence
atggaacatggcaccttgttagcacagcccggactgtggacacgtgacacctcttgggcattgctctatttcttatgctacattctccctcagacggcaccccaggtgctgaggatcggcggtattttcgagactgtggagaacgagcctgtgaatgtagaagagttggccttcaagttcgccgtgacttcaatcaaccggaacagaacacttatgccgaatactacactcacttacgacatccagcgcattaatctgtttgattcttttgaggcttccaggcgcgcctgcgatcaactggccctgggggtcgccgctctcttcgggccatctcactctagtagcgtttcagctgtgcaaagcatttgtaacgcgctcgaggtgccacacattcagactcgttggaagcaccccagcgtggataacaaagatttgttttacatcaacttataccccgactatgctgcaatttccagggcgatcctggatctggtcctgtattacaactggaaaacagtcaccgtggtgtacgaggactccacaggcctgattagactgcaggagcttatcaaggcaccaagcaggtacaatattaagatcaaaatccgccagctcccatctggcaacaaagacgccaaacctctgttaaaggaaatgaagaaaggcaaggagttctacgtgatctttgactgcagccacgaaacagccgcggagattttaaaacagatcctgttcatgggcatgatgaccgagtattaccattacttctttactaccctggatctctttgctctggatctggagctctacagatattccggcgtgaacatgactgggttcaggctgctcaacatcgataatcctcacgtgtcaagcattatcgagaagtggagcatggaaaggctccaggcacccccgaggccggaaaccggtctgctggacggcatgatgacgaccgaggccgctctcatgtacgacgcggtctacatggtggccatcgcatcccatagagcttctcagctgactgtttcctctctgcaatgtcaccgccataaaccctggcggttgggcccccgatttatgaatctgattaaggaggctcgatgggatgggctgacgggccatatcacattcaataagaccaatgggctaagaaaggacttcgacctcgatattatttccctgaaagaggaaggcacggagaagataggcatatggaactctaattccggcttaaacatgaccgattcaaataaggataaatcgtcaaatataacagactccctagctaaccgaaccttaatcgtgactaccattcttgaagaaccatacgtgatgtataggaagtcagataagcccctatacggcaatgataggtttgagggatactgtttggacctgctgaaagagctgtccaatatacttggatttatttatgacgtcaagctcgtgccggacggaaagtatggggctcaaaacgataaaggagagtggaacggcatggtaaaggaactgattgaccatcgggccgatctggccgtggccccactcacaatcacatacgtacgggaaaaagtgattgacttttctaaaccgttcatgactttgggcatctccattctctatagaaaaccaaatggcacaaatccgggtgtcttctcttttctgaatcccctttcccctgacatttggatgtacgtactgctcgcatgcttaggcgtctcatgcgtcctgtttgtgatcgccagatttacgccttacgagtggtataatccccatccttgcaatcctgactccgatgtagtcgaaaacaacttcacacttctgaatagcttctggtttggagtgggcgctctcatgcagcagggaagtgagttgatgcctaaagctctgagcaccagaatcgtggggggaatatggtggttttttactctaatcatcatctcgtcttacaccgcgaatctagccgccttcttgaccgtggaacgcatggagagtccaattgactccgctgatgatctggccaagcaaactaagattgagtacggcgccgtacgggatggtagcacaatgactttttttaagaagagcaaaatcagcacctacgaaaagatgtgggccttcatgtcgtcacgccagcaaaccgccctggtccggaattcagacgaaggaattcaacgtgtgttaaccacggactacgcattgttgatggagtccaccagtatcgaatatgtgactcagcggaactgtaacctcacacagattggcggattgatagattccaaaggttacggggtggggacccctatcggctctccttatagggataagatcaccattgccatcttacaactgcaggaggaaggcaaattgcacatgatgaaggaaaagtggtggcgcgggaacggatgccctgaagaagataacaaggaagcaagcgcgctcggcgtagagaacatcggaggaatctttatagtgctggctgccggtttggttctttcggtttttgtggcgatcggagagtttatctacaagagccgcaagaacaatgatatcgaacaaaagggaaagagttcaagaattagattttattttaggaataaggttagatttcatgggcggaagaagcagtctttaggcgtggagaagtgcctcagtttcaatgccatcatggaggagctaggtataagtctcaaaaaccagaaaaaaatcaaaaagaagtcaagaacgaaaggcaagagctcattcacatccatcctaacatgccaccagaggagaacccaaaggaaggaaaccgtggcttag

SEQ ID NO: 277073 - DNA, 3624 bp, Artificial Sequence
  derived and/or modified sequence
agaagccggaacgtggctccgctcccagttaacctgctggagctcatcaggcttgctcagagcccctgcaccaactcaccctgtaccctctctccttcttcgttagtcttctttcccccttttccctcctctgtctgtgcctatcccccgacttttgcatctgaccaaaggacgaatgagggagacgttcctgcagatcggggcagcaactttcctcagctggtctctgggctccgggagccagagagcgctgatcctccgcggtctgcggcccatggaagaggaggaggaggagccgtgatgggctagcgacagcactgaggagccccgagagagctcagccttgccagccagctccgcggtcccacgcgggttccctcgagctcgctccgtggggagcgcgcagcgtgcttggaaccggagcatccagagaggatgaggcggggacccggcccaagttgggtgcatctctcgggcgtccggcagcggctgtatctcggcatgaattaagaagctaggaagatggagcacggcacactcctcgcccagcccgggctctggaccagggacaccagctgggcactcctctatttcctctgctatatcctccctcagaccgccccgcaagtactcaggatcggagggatttttgaaacagtggaaaatgagcctgttaatgttgaagaattagctttcaagtttgcagtcaccagcattaacagaaaccgaaccctgatgcctaacaccacattaacctatgacatccagagaattaacctttttgatagttttgaagcctcgcggagagcatgtgaccagctggctcttggtgtggctgctctctttggcccttcccatagctcctccgtcagtgctgtgcagtctatttgcaatgctctcgaagttccacacatacagacccgctggaaacacccctcggtggacaacaaagatttgttttacatcaacctttacccagattatgcagctatcagcagggcgatcctggatctggtcctctattacaactggaaaacagtgacagtggtgtatgaagacagcacaggtctaattcgtctacaagagctcatcaaagctccctccagatataatattaaaatcaaaatccgccagctgccctctgggaataaagatgccaagcctttactcaaggagatgaagaaaggcaaggagttctatgtgatatttgattgttcacatgaaacagccgctgaaatccttaagcagattctgttcatgggcatgatgaccgagtactatcactactttttcacaaccctggacttatttgctttggatctggaactctataggtacagtggcgtaaacatgaccgggtttcggctgcttaacattgacaaccctcacgtgtcatccatcattgagaagtggtccatggagagactgcaggccccacccaggcccgagactggccttttggatggcatgatgacaactgaagcggctctgatgtacgatgctgtgtacatggtggccattgcctcgcaccgggcatcccagctgaccgtcagctccctgcagtgccatagacataagccatggcgcctcggacccagatttatgaacctgatcaaagaggcccggtgggatggcttgactgggcatatcacctttaataaaaccaatggcttgaggaaggattttgatctggacattattagtctcaaagaggaaggaactgaaaagattgggatttggaattccaacagtgggcttaacatgacggacagcaacaaagacaagtccagcaatatcactgattcattggccaacagaacactcattgtcaccaccattctggaagaaccctatgttatgtacaggaaatctgataagcctctatatggaaatgacagatttgaaggatattgcctagacctgttgaaagaattgtcaaacatcctgggtttcatttatgatgttaaactagttcccgatggcaaatatggggcccagaatgacaaaggggagtggaacgggatggttaaagaactcatagatcacagggctgacctggcagtggctcctcttaccatcacctacgtgcgggagaaagtcattgacttctccaaacccttcatgaccctaggcatcagcattctctaccggaagcccaatggtaccaatccaggcgttttctccttcctcaaccccctgtctccagatatttggatgtatgtgctcttagcctgcttgggagtcagctgtgtactctttgtgattgcaaggtttacaccctacgagtggtataacccccacccatgcaaccctgactcagacgtggtggaaaacaattttactttactaaatagtttctggtttggagttggagctctcatgcagcaaggatcagagctgatgcccaaagctctatcgaccagaatagttggagggatatggtggtttttcaccctaatcatcatttcatcctacacggccaatctggctgccttcttgacagtagagagaatggaatcccccatagattcggcagatgatctggcaaagcaaaccaagatagaatatggggcggttagagatggatcaacaatgaccttcttcaagaaatcaaaaatctccacctatgagaagatgtgggctttcatgagcagcaggcagcagaccgccctggtaagaaacagtgatgaggggatccagagagtgctcaccacagactacgcgctgctgatggagtccaccagcattgagtatgtgacgcagagaaactgcaacctcactcagatcgggggcctcattgactccaaaggttacggagtgggaacacctattggttctccttaccgggataaaattactattgctattcttcaactccaagaagaagggaagctgcatatgatgaaagagaagtggtggcgtgggaatggctgccccgaggaagacaacaaagaagccagtgccctgggagtggaaaatattggaggcatcttcattgttctggctgccggactggtcctttctgtatttgtagctattggagaattcatatacaaatcacggaagaataatgatattgaacagaaaggaaagtcatcaagaattagattttattttaggaacaaagtaaggtttcatgggagaaaaaaacaaagccttggtgtagagaagtgtctctctttcaacgctatcatggaagaactgggaatctcactgaagaatcagaaaaaaataaagaaaaagtcaagaactaaggggaaatcttccttcacaagtatccttacttgtcatcagagacgaactcagagaaaagagactgtggcgtgatccaaggaaacgcctgtaggaagaaaaaggatgcattccctacagatttttggagaaaggatttctgaggagtgtgtgatgtgtttccatatatctatatccataactctgattatgaatacagatataagaaatacaaaagtttaaaaagctcacatagatatgacttgggaagtgacaccagttcttttaaaataaatttgtatgctcaattattttgcattttttctttttccccaataaattgttgtgtgtgctttctaaataataataaaacaacagggtttttttccagaa

SEQ ID NO: 277074 - DNA, 2805 bp, Artificial Sequence
  derived and/or modified sequence
atggagcacggcaccctgctggcccagcccggcctgtggacccgggacacctcctgggccctgctgtacttcctgtgctacatcctgccccagacagccccccaggtgctgagaattggaggcatctttgaaacagtggagaatgaacctgtgaatgtggaggagctggccttcaagtttgctgtgaccagcatcaacagaaacagaaccctgatgcccaacaccaccctgacctatgacatccagaggatcaacctgtttgacagctttgaggccagccggcgggcctgtgaccagctggccctgggcgtggccgccctgtttggccccagccacagcagctctgtgtctgctgtgcagagcatctgcaatgccctggaggtgccccacatccagacccgctggaagcaccccagcgtggacaacaaggacctcttctacatcaacctgtacccagactatgctgccatcagccgggccatcctggacctggtgctgtactacaactggaagacagtgacagtggtgtatgaggacagcacaggcctcatccggctgcaggagctgatcaaggcccccagccgctacaacatcaagatcaagatccggcagctgcccagcggcaacaaggatgccaagcccctgctgaaggagatgaagaagggcaaggagttctacgtgatctttgactgcagccatgaaacagctgctgagatcctgaagcagatcctcttcatgggcatgatgacagagtactaccactacttcttcaccaccctggacctgtttgccctggacctggagctgtaccgctacagcggcgtgaacatgacaggcttccggctgctgaacatcgacaacccccacgtgagcagcatcatcgagaagtggagcatggagcggctgcaggccccacccaggcctgagaccggcctgctggatggcatgatgaccacagaagctgccctgatgtatgatgctgtgtacatggtggccatcgccagccaccgggccagccagctgactgtgagcagcctgcagtgccaccgccacaagccctggaggctgggcccccgcttcatgaacctgatcaaggaggcccgctgggatggcctgaccggccacatcaccttcaacaagaccaacggcctgaggaaggactttgacctggacatcatcagcctgaaggaggagggcacagagaagattggcatctggaacagcaacagcggcctgaacatgacagacagcaacaaggacaagagcagcaacatcacagacagcctggccaacagaaccctgattgtgaccaccatcctggaggagccctacgtgatgtacaggaagagtgacaagcccctgtatggaaatgacagatttgagggctactgcctggacctgctgaaggagctgagcaacatcctgggcttcatctatgatgtgaagctggtgcctgatggcaagtatggagcccagaatgacaagggggagtggaatggcatggtgaaggagctgattgaccacagagctgacctggccgtggcccccctgaccatcacctacgtgcgggagaaggtgattgacttcagcaagcccttcatgaccctgggcatcagcatcctgtacaggaagcccaacggcaccaaccctggggtcttctccttcctgaaccccctgagcccagacatctggatgtatgtgctgctggcctgcctgggcgtgtcctgtgtgctgtttgtgattgcccgcttcaccccctatgagtggtacaacccccacccctgcaacccagacagtgatgtggtggagaacaacttcaccctgctgaacagcttctggtttggagtgggcgccctgatgcagcagggcagcgagctgatgcccaaggccctgagcaccagaattgtgggcggcatctggtggttcttcaccctcatcatcatcagcagctacacagccaacctggccgccttcctgactgtggagaggatggagagccccatcgacagcgcagatgacctggccaagcagaccaagattgaatatggagctgtgagagatggcagcaccatgaccttcttcaagaagagcaagatcagcacctatgagaagatgtgggccttcatgagcagccggcagcagacagccctggtgaggaacagtgatgagggcatccagagggtgctgaccacagattatgccctgctgatggagagcaccagcattgaatatgtgacccagaggaactgcaacctgacccagattggaggcctgattgacagcaagggctacggcgtgggcacccccatcggcagcccctacagagacaagatcaccatcgccatcctgcagctgcaggaggagggcaagctgcacatgatgaaggagaagtggtggagaggaaatggctgcccagaggaggacaacaaggaggccagcgccctgggcgtggagaacatcggcggcatcttcatcgtgctggccgccggcctggtgctgtctgtgtttgtggccatcggggagttcatctacaagagcaggaagaacaatgacatcgagcagaagggcaagagcagccgcatccgcttctacttcaggaacaaggtgcgcttccacggcaggaagaagcagagcctgggcgtggagaagtgcctgtccttcaatgccatcatggaggagctgggcatcagcctgaagaaccagaagaagatcaagaagaagagcaggaccaagggcaagagcagcttcaccagcatcctgacctgccaccagaggaggacccagaggaaggagaccgtggcctag

SEQ ID NO: 277075 - DNA, 2805 bp, Artificial Sequence
  derived and/or modified sequence
atggagcacggcaccctgctggcccagcccggcctgtggacccgggacacgtcatgggcactgctgtacttcctctgttacatcctgccccaaaccgctccccaagtgctgagaatcggcggcatctttgagactgttgaaaatgagcctgtgaatgtcgaggaactggcattcaaatttgccgtaactagcataaaccggaaccggaccctgatgcctaataccaccttgacttacgatatccagcgcatcaacttattcgactcgtttgaggcatccaggagagcttgcgatcagttggccttgggtgttgctgctctctttggccctagccacagcagctctgtctctgcagtccagagcatctgtaacgcactagaggttcctcatatccagactcgatggaagcatcctagcgtggataataaggatctattctacattaatctttatcctgattacgcggcaatctctcgggccatcctcgatcttgttctttactataactggaaaactgtcaccgtggtgtacgaagactctacgggcctgattaggctccaagaactcattaaagcacccagtagatacaatatcaaaatcaaaatccggcagctgccctccgggaacaaagatgcgaaacctcttcttaaggaaatgaaaaaggggaaggagttctatgtgatctttgactgttcccacgaaaccgcagctgaaatactgaaacagatactctttatgggcatgatgacagagtactaccattacttcttcaccacactggatctctttgcactggaccttgagctctacaggtacagtggggtcaatatgactggattcagacttcttaatatcgacaatccacatgtgtcatcaatcatcgaaaaatggtcaatggagcgactgcaggcgccccctcgccctgagacaggccttctggatggaatgatgaccaccgaagccgctctgatgtacgacgcggtgtacatggtcgctatcgccagtcatcgcgccagccagctgaccgttagctctcttcagtgccatcggcacaaaccatggaggctagggccgaggtttatgaatctgatcaaggaggccagatgggatggtctgactggacacattacgtttaacaaaaccaacggtctcagaaaggatttcgacctggacataatctcactcaaggaggaaggtaccgagaagattggtatctggaattccaattccggcctgaatatgaccgacagtaacaaggataaatcctctaacataaccgacagcctagccaacaggacactcatcgtcacaacaatactggaggagccgtatgtgatgtatcgtaagagcgataagcccctttatggaaacgaccgctttgagggttactgcctggatttgctgaaggaattgtctaatattctggggttcatatatgacgtgaagctggtcccggatgggaagtacggggcccagaatgataagggtgagtggaacggtatggtgaaggaactgatcgaccaccgcgccgacctcgctgttgccccacttaccatcacatatgttagggaaaaggttatcgacttttccaaacctttcatgacacttgggatatctatcctgtacaggaagcccaacggaactaatccaggcgtgttctctttcttaaacccgctatcaccagacatctggatgtacgtcttactcgcttgcctcggagtgtcttgcgttctgtttgtgatagctcgatttaccccttacgaatggtataatcctcatccatgcaaccccgatagcgacgtggtcgagaataactttaccctattaaactcattctggttcggtgttggtgctctgatgcagcaaggatccgaactaatgccaaaggccctctctaccagaatcgtgggaggcatttggtggttcttcacactcatcataattagcagctacacagctaacctggccgcattcctcacagtagaacggatggagtcaccaatcgactctgccgatgaccttgcaaagcaaactaaaattgagtatggtgctgtgcgggacggttccaccatgaccttctttaaaaagtcgaagattagtacatacgaaaagatgtgggcctttatgagctctcgccagcagaccgctctagtgagaaatagcgacgaggggatccaacgcgtgcttactacggactatgcgctcctaatggaaagcactagcattgagtacgtaacacaacgaaactgcaaccttacccagatcggcgggttgatcgattccaaagggtacggagtcggcacccccatcgggtcaccataccgcgataagatcacaattgcaatactacaactgcaggaggaaggtaagctgcacatgatgaaagagaagtggtggagagggaacggctgtcccgaggaggataacaaggaggccagcgctcttggagtggaaaacatcggagggattttcatcgttctggccgcaggactggttctgtcagtgtttgtggccataggagaatttatttacaagagccgcaagaacaacgatatcgagcagaaaggaaaaagttccagaatacgcttttattttcgtaacaaagtccgcttccacggacgtaagaaacagagcctgggggttgagaagtgtctgtccttcaatgctattatggaggagctggggattagcctgaagaaccaaaagaagatcaagaagaagtcccgtacaaagggcaagtcgagcttcacatccattctgacctgccatcaaagacgaacacagcgtaaagaaaccgttgcctag

SEQ ID NO: 277076 - DNA, 2805 bp, Artificial Sequence
  derived and/or modified sequence
atggagcatgggactctgcttgcccagcctgggttgtggacaagggacacctcctgggccttgctctatttcttgtgttacattttgccacaaacagccccacaggttctccggatcggaggtatttttgaaacagttgagaatgagccagttaatgtcgaggagctcgcgtttaaattcgcagtcacatctatcaaccgcaacagaaccctcatgcccaataccacgttaacttacgacatccagcgcatcaacttgtttgattcatttgaggccagccggagagcatgtgatcagctcgccttgggagtcgccgctttatttggtccctcacatagctcgagcgtcagcgcagtgcaatctatttgtaatgccctcgaagtacctcacattcagacacggtggaagcacccaagcgtagataataaggacctattctacatcaacctttatcccgattacgccgctatttcgcgagcaattctggacctagtcctatactacaactggaaaacagtgaccgtggtgtacgaggactctaccggcttgattaggcttcaggagttgattaaagccccaagtcgctacaacattaaaattaagatcaggcagctcccttctggtaataaagacgccaaaccacttctcaaagagatgaagaaaggcaaggagttttatgttatctttgactgctctcacgagactgccgcagagatactgaagcagatactattcatggggatgatgacagaatactaccactatttttttacaacgcttgacttgtttgcgcttgaccttgagctgtacagatacagcggtgtcaatatgacaggcttccgcctgctgaacattgacaacccccacgtctctagcattattgaaaaatggtcaatggagagacttcaagctccccctcgcccagaaactgggttacttgatggtatgatgacaactgaagccgctttaatgtatgatgctgtatatatggtggccattgcatcccacagagccagtcagctgactgtgtctagtctccagtgccaccgccacaagccttggaggctgggcccaaggttcatgaatcttatcaaggaggcgaggtgggacggactgactggtcatatcacctttaataaaactaacggattgcggaaagatttcgacctggatattatcagtctgaaagaggagggcaccgaaaagattggcatctggaattctaactctggactcaacatgacagacagcaataaagacaagagcagcaacattaccgactccctggcgaatcgtacactcatcgttacgacgatactggaggagccgtacgtgatgtaccgaaagagtgacaagccattgtacgggaacgatcgattcgagggctattgcttagacttgctcaaggagctttccaacattctgggttttatctatgatgtaaagttagtgccagatggcaagtatggagcccagaatgacaaaggagagtggaatggtatggtaaaagagttgatcgaccatagggctgacctagctgtcgcccctctcaccatcacttacgtcagggagaaagtcattgactttagtaaacctttcatgacgttaggaatcagcatcctgtaccgaaagccgaatgggacgaaccccggtgttttttctttcctgaacccgctaagcccagatatctggatgtacgttcttctggcctgtctgggcgtaagctgtgttctcttcgtgatcgctcggtttaccccctacgagtggtataacccccacccctgtaatcccgactctgatgtggtggagaacaatttcaccctattaaactctttttggttcggggtgggcgctctgatgcagcaaggatctgagcttatgcctaaggctctgagcacccgaattgtgggagggatttggtggtttttcacgctcattatcatatcttcatacaccgccaacttggcagccttcctgaccgtggaaaggatggagtctccaatcgacagcgcagatgatttagctaagcagactaagattgagtatggcgcagtgagggatggatctacaatgacttttttcaagaagagcaaaatctctacctatgagaagatgtgggcttttatgtcaagccgacagcaaaccgcgctcgttaggaatagtgacgagggaatccaaagagtcctcacaactgattacgccctgctcatggagtcgacctcaattgagtacgtcacccaacgaaactgtaacttaacccagataggagggctgatcgattccaagggctacggagtcggaactcccattggcagcccgtatagggacaagattacgattgcaattctgcaactccaggaagagggaaaactccacatgatgaaggagaagtggtggagggggaatgggtgtcctgaggaagacaacaaggaggctagcgcattgggcgtcgaaaacataggaggtatatttattgttctggctgcagggctcgtgctgagcgtctttgtggcaataggcgagtttatatacaagagcagaaagaataatgatatcgagcagaaaggcaaatcctcccggatcagattctactttcgtaataaggtgcgctttcatggaaggaagaaacaatccctaggtgtggagaaatgcctcagcttcaatgctatcatggaagaactaggaatctccctgaagaatcagaagaagatcaaaaaaaagagccggacaaagggtaagtcctcttttacttcaatactcacttgtcaccagcgaaggacacagcgcaaggaaactgtggcttag

SEQ ID NO: 277077 - DNA, 2805 bp, Artificial Sequence
  derived and/or modified sequence
atggagcacggcaccctgctggcccagcccggcctgtggaccagagacaccagctgggccctgctgtacttcctgtgctacatcctgccccagaccgccccccaggtgctgagaatcggcggcatcttcgagaccgtggagaacgagcccgtgaacgtggaggagctggccttcaagttcgccgtgaccagcatcaacagaaacagaaccctgatgcccaacaccaccctgacctacgacatccagagaatcaacctgttcgacagcttcgaggccagcagaagagcctgcgaccagctggccctgggcgtggccgccctgttcggccccagccacagcagcagcgtgagcgccgtgcagagcatctgcaacgccctggaggtgccccacatccagaccagatggaagcaccccagcgtggacaacaaggacctgttctacatcaacctgtaccccgactacgccgccatcagcagagccatcctggacctggtgctgtactacaactggaagaccgtgaccgtggtgtacgaggacagcaccggcctgatcagactgcaggagctgatcaaggcccccagcagatacaacatcaagatcaagatcagacagctgcccagcggcaacaaggacgccaagcccctgctgaaggagatgaagaagggcaaggagttctacgtgatcttcgactgcagccacgagaccgccgccgagatcctgaagcagatcctgttcatgggcatgatgaccgagtactaccactacttcttcaccaccctggacctgttcgccctggacctggagctgtacagatacagcggcgtgaacatgaccggcttcagactgctgaacatcgacaacccccacgtgagcagcatcatcgagaagtggagcatggagagactgcaggccccccccagacccgagaccggcctgctggacggcatgatgaccaccgaggccgccctgatgtacgacgccgtgtacatggtggccatcgccagccacagagccagccagctgaccgtgagcagcctgcagtgccacagacacaagccctggagactgggccccagattcatgaacctgatcaaggaggccagatgggacggcctgaccggccacatcaccttcaacaagaccaacggcctgagaaaggacttcgacctggacatcatcagcctgaaggaggagggcaccgagaagatcggcatctggaacagcaacagcggcctgaacatgaccgacagcaacaaggacaagagcagcaacatcaccgacagcctggccaacagaaccctgatcgtgaccaccatcctggaggagccctacgtgatgtacagaaagagcgacaagcccctgtacggcaacgacagattcgagggctactgcctggacctgctgaaggagctgagcaacatcctgggcttcatctacgacgtgaagctggtgcccgacggcaagtacggcgcccagaacgacaagggcgagtggaacggcatggtgaaggagctgatcgaccacagagccgacctggccgtggcccccctgaccatcacctacgtgagagagaaggtgatcgacttcagcaagcccttcatgaccctgggcatcagcatcctgtacagaaagcccaacggcaccaaccccggcgtgttcagcttcctgaaccccctgagccccgacatctggatgtacgtgctgctggcctgcctgggcgtgagctgcgtgctgttcgtgatcgccagattcaccccctacgagtggtacaacccccacccctgcaaccccgacagcgacgtggtggagaacaacttcaccctgctgaacagcttctggttcggcgtgggcgccctgatgcagcagggcagcgagctgatgcccaaggccctgagcaccagaatcgtgggcggcatctggtggttcttcaccctgatcatcatcagcagctacaccgccaacctggccgccttcctgaccgtggagagaatggagagccccatcgacagcgccgacgacctggccaagcagaccaagatcgagtacggcgccgtgagagacggcagcaccatgaccttcttcaagaagagcaagatcagcacctacgagaagatgtgggccttcatgagcagcagacagcagaccgccctggtgagaaacagcgacgagggcatccagagagtgctgaccaccgactacgccctgctgatggagagcaccagcatcgagtacgtgacccagagaaactgcaacctgacccagatcggcggcctgatcgacagcaagggctacggcgtgggcacccccatcggcagcccctacagagacaagatcaccatcgccatcctgcagctgcaggaggagggcaagctgcacatgatgaaggagaagtggtggagaggcaacggctgccccgaggaggacaacaaggaggccagcgccctgggcgtggagaacatcggcggcatcttcatcgtgctggccgccggcctggtgctgagcgtgttcgtggccatcggcgagttcatctacaagagcagaaagaacaacgacatcgagcagaagggcaagagcagcagaatcagattctacttcagaaacaaggtgagattccacggcagaaagaagcagagcctgggcgtggagaagtgcctgagcttcaacgccatcatggaggagctgggcatcagcctgaagaaccagaagaagatcaagaagaagagcagaaccaagggcaagagcagcttcaccagcatcctgacctgccaccagagaagaacccagagaaaggagaccgtggcctag

SEQ ID NO: 277078 - protein, 920 aa, Artificial Sequence
  derived and/or modified sequence
MEHGTLLAQPGLWTRDTSWALLYFLCYILPQTAPQVLRIGGIFETVENEPVNVEELAFKFAVTSINRNRTLMPNTTLTYDIQRINLFDSFEASRRACDQLALGVAALFGPSHSSSVSAVQSICNALEVPHIQTRWKHPSVDNKDLFYINLYPDYAAISRAILDLVLYYNWKTVTVVYEDSTGLIRLQELIKAPSRYNIKIKIRQLPSGNKDAKPLLKEMKKGKEFYVIFDCSHETAAEILKQILFMGMMTEYYHYFFTTLDLFALDLELYRYSGVNMTGFRLLNIDNPHVSSIIEKWSMERLQAPPRPETGLLDGMMTTEAALMYDAVYMVAIASHRASQLTVSSLQCHRHKPWRLGPRFMNLIKEARWDGLTGHITFNKTNGLRKDFDLDIISLKEEGTEKAAGEVSKHLYKVWKKIGIWNSNSGLNMTDSNKDKSSNITDSLANRTLIVTTILEEPYVMYRKSDKPLYGNDRFEGYCLDLLKELSNILGFIYDVKLVPDGKYGAQNDKGEWNGMVKELIDHRADLAVAPLTITYVREKVIDFSKPFMTLGISILYRKPNGTNPGVFSFLNPLSPDIWMYVLLACLGVSCVLFVIARFTPYEWYNPHPCNPDSDVVENNFTLLNSFWFGVGALMQQGSELMPKALSTRIVGGIWWFFTLIIISSYTANLAAFLTVERMESPIDSADDLAKQTKIEYGAVRDGSTMTFFKKSKISTYEKMWAFMSSRQQTALVRNSDEGIQRVLTTDYALLMESTSIEYVTQRNCNLTQIGGLIDSKGYGVGTPIGSPYRDKITIAILQLQEEGKLHMMKEKWWRGNGCPEEDNKEASALGVENIGGIFIVLAAGLVLSVFVAIGEFIYKSRKNNDIEQCLSFNAIMEELGISLKNQKKIKKKSRTKGKSSFTSILTCHQRRTQRKETVA

SEQ ID NO: 277079 - protein, 922 aa, Artificial Sequence
  derived and/or modified sequence
MEHGTLLAQPGLWTRDTSWALLYFLCYILPQTAPQVLRIGGIFETVENEPVNVEELAFKFAVTSINRNRTLMPNTTLTYDIQRINLFDSFEASRRACDQLALGVAALFGPSHSSSVSAVQSICNALEVPHIQTRWKHPSVDNKDLFYINLYPDYAAISRAILDLVLYYNWKTVTVVYEDSTGLIRLQELIKAPSRYNIKIKIRQLPSGNKDAKPLLKEMKKGKEFYVIFDCSHETAAEILKQILFMGMMTEYYHYFFTTLDLFALDLELYRYSGVNMTGFRLLNIDNPHVSSIIEKWSMERLQAPPRPETGLLDGMMTTEAALMYDAVYMVAIASHRASQLTVSSLQCHRHKPWRLGPRFMNLIKEATARWDGLTGHITFNKTNGLRKDFDLDIISLKEEGTEKAAGEVSKHLYKVWKKIGIWNSNSGLNMTDSNKDKSSNITDSLANRTLIVTTILEEPYVMYRKSDKPLYGNDRFEGYCLDLLKELSNILGFIYDVKLVPDGKYGAQNDKGEWNGMVKELIDHRADLAVAPLTITYVREKVIDFSKPFMTLGISILYRKPNGTNPGVFSFLNPLSPDIWMYVLLACLGVSCVLFVIARFTPYEWYNPHPCNPDSDVVENNFTLLNSFWFGVGALMQQGSELMPKALSTRIVGGIWWFFTLIIISSYTANLAAFLTVERMESPIDSADDLAKQTKIEYGAVRDGSTMTFFKKSKISTYEKMWAFMSSRQQTALVRNSDEGIQRVLTTDYALLMESTSIEYVTQRNCNLTQIGGLIDSKGYGVGTPIGSPYRDKITIAILQLQEEGKLHMMKEKWWRGNGCPEEDNKEASALGVENIGGIFIVLAAGLVLSVFVAIGEFIYKSRKNNDIEQCLSFNAIMEELGISLKNQKKIKKKSRTKGKSSFTSILTCHQRRTQRKETVA

SEQ ID NO: 277080 - DNA, 2763 bp, Artificial Sequence
  derived and/or modified sequence
atggagcatggtaccctcctggcccaaccaggtctgtggacaagagacacttcctgggccctactttattttctgtgttacattctcccgcagaccgctccacaggtgctcagaataggtggcatcttcgagaccgtggaaaacgagcccgtgaatgtagaagagctcgcttttaaattcgctgtgacaagtattaacaggaaccgcaccctgatgcccaatacgaccctcacctatgatatccaaagaatcaacctcttcgattcctttgaagcgagccggcgcgcctgcgaccagctggcccttggggtcgcagcactctttgggcccagtcactcgtcatccgtgtcagcagttcagagtatatgcaatgccctggaggtgcctcatattcagactcgctggaaacaccctagtgttgacaataaagacctgttctacatcaacctgtaccctgactacgccgcaatttcacgcgcgatccttgacctggtgctatattataattggaaaacagtaaccgtcgtgtacgaggattccacaggtctaatcaggcttcaggagttgattaaggcgccttctagatataacattaaaataaaaatccgacagttacccagcggcaacaaagatgcaaagccattattaaaagagatgaaaaaggggaaggagttttatgttattttcgactgtagccacgagactgccgctgaaatactgaagcaaatcctttttatgggcatgatgaccgaatactaccactatttctttaccacattagacctgttcgcactggacttggagctgtacagatacagtggcgttaatatgacggggttcagactcttgaatatagacaatccgcatgtgagctcaatcatcgagaagtggagtatggagagacttcaggctcccccaaggcccgaaaccggtctgctggatggaatgatgacgaccgaggccgcacttatgtacgacgccgtgtacatggtggcaatcgcgagtcaccgtgctagtcaacttactgtctccagtttacagtgtcaccggcataaaccttggagacttgggcccaggttcatgaatctcattaaagaggctcgctgggacgggctgactggccacatcacctttaacaaaactaatggtctccggaaggactttgaccttgacataatatctctgaaggaggagggaaccgaaaaagcagcaggggaagtgagcaagcacctgtacaaagtgtggaagaaaattgggatttggaacagcaattccggactgaacatgaccgacagtaacaaggacaaaagctcgaacatcaccgatagtcttgccaaccgtactctgattgtcaccaccattctcgaagaaccgtacgtgatgtatagaaaatccgacaagccactatatggcaacgaccgcttcgagggatactgtcttgacctgctcaaggagctgtctaacatcctcggttttatctatgatgtaaagctggtccctgatggcaagtatggagcccagaacgacaagggcgagtggaacggcatggtcaaagagctgatagatcatagggccgaccttgccgtggcccctctcacaatcacctatgtccgtgagaaagtgatcgacttttcaaagcctttcatgacgctcggcataagcatcctttaccggaagcctaatggaacaaaccccggggtcttctccttcctgaaccccctcagtcccgacatctggatgtacgtgctgctggcttgtcttggtgtgagctgtgtcctgtttgtgatagcgcgatttaccccatatgaatggtacaacccccacccttgcaatccagatagcgatgtggtggagaataacttcacactcctgaatagtttttggttcggcgtgggcgctcttatgcagcagggtagtgagctgatgccaaaggctctgagcacccggatcgtgggcgggatctggtggtttttcacattaatcatcatatccagttataccgcaaatttggcagcattcctaaccgttgaaaggatggagtccccaattgattctgcagatgacttggctaaacaaacgaaaatcgagtacggcgccgttcgcgacgggagcactatgactttctttaagaaaagcaagattagcacatatgagaaaatgtgggccttcatgagtagccggcagcagaccgcactggttcgcaattcagatgaaggcatccagagggtgctgactacagactatgctctacttatggaatctacaagcattgagtatgtaacccaaaggaactgcaacctcacccagattggcggccttattgactctaaagggtatggagtgggaacgcccattgggagcccataccgtgataagatcacaatcgcgatcttgcagcttcaggaggaggggaagctccacatgatgaaagagaagtggtggcgcggaaatggttgtcccgaagaggacaacaaggaagcctccgcattgggcgtggagaacattggcggcattttcatcgtgctcgcagcaggactggtgctttcagtgttcgtggcaattggtgaattcatctataagtcgcgtaagaataatgacatagagcaatgtctttcttttaacgctataatggaggaattaggcatttctctcaagaatcaaaaaaagatcaaaaagaaatcacggacaaagggcaagtctagttttacctcgatcctcacctgtcatcagcgcaggactcagcgcaaggaaactgtagcttag

SEQ ID NO: 277081 - DNA, 2769 bp, Artificial Sequence
  derived and/or modified sequence
atggaacacggtacgttacttgcccagccggggctgtggacacgagacacttcttgggcgctgctgtattttctctgctatatcttaccccagacggccccacaagtactgcgaatcggcggtatcttcgaaaccgtggagaatgagccggtaaacgtggaagaactggcattcaaattcgccgttacctccattaacaggaatagaaccttgatgcccaacacaactctgacctacgatatacagagaatcaatctgtttgacagcttcgaggcctcccggcgagcgtgcgatcaactggctttgggagtggctgccctattcgggcctagtcatagttcatctgtgtctgccgttcaaagtatttgtaacgctttggaggtgccccatatccaaacccggtggaagcacccctctgtggataataaagacttgttttatataaatctgtaccccgattacgcagccatctccagggcgattctcgatctggtgctgtactacaattggaagaccgtcacagtggtgtatgaggattccactggcctgatacggttacaggaactgatcaaggcaccctcacggtacaacataaagatcaagataagacagctgccatccggcaacaaggacgccaagcccctgctgaaagaaatgaaaaaagggaaagagttttacgtgatttttgactgctcacacgagactgccgctgagattctcaagcagattctgttcatgggcatgatgactgagtattaccattatttcttcaccaccctcgatctttttgccctggacctggaactttatcgttattcaggcgtgaatatgactgggttcagactactcaatatcgataacccgcatgtgagttccatcatcgaaaaatggtctatggagcgactccaagcgccacccaggcccgaaaccggcttgctggacggcatgatgactacagaagcggcgctaatgtacgatgcggtgtacatggtggccatcgcaagccaccgcgcttcccagttaactgtaagctcactgcagtgtcaccgacataagccttggcgtttaggtcccaggtttatgaatctgattaaggaagccacggcacggtgggatgggctgaccgggcatatcacatttaacaagactaacgggctcaggaaagattttgaccttgacataataagcttgaaagaggaaggcacggagaaagcggctggagaagtgtctaaacacctgtacaaggtgtggaaaaaaattgggatttggaatagcaactcgggcttaaacatgactgacagcaacaaggacaaatcttctaacatcacggatagcttagccaatagaacactgattgtcacaaccatcctcgaagagccatatgttatgtaccggaaatcagataaacctctgtatggaaatgaccgcttcgaggggtattgccttgacctattaaaggagctctctaacattcttggctttatatacgacgtgaagctggtccctgatggaaagtacggcgcccagaatgacaagggggagtggaatggcatggtgaaagagctcatagatcatcgggctgacctcgctgtcgctccactgaccatcacttacgtccgagagaaggtgatcgatttcagtaagccttttatgacacttgggatttctattctgtaccgcaagcctaacgggaccaaccctggagtcttctcttttctgaaccctctgtcacccgatatttggatgtacgtgctgctggcctgcctaggggtatcttgcgtgctctttgtgatcgcgagatttaccccatacgaatggtataatcctcacccttgcaatccagattccgacgtggtggaaaataactttacactgctcaatagcttttggttcggagtgggagcattgatgcagcagggaagcgaactaatgcctaaggccctgtccaccaggattgttggcgggatctggtggttcttcacactcatcattatatccagctacacggctaatcttgccgcatttctgactgtggagcggatggaatcacccattgactctgccgacgatctagctaagcagacgaaaatcgaatatggcgcagtcagggatggtagcaccatgacgtttttcaaaaaaagcaaaatctctacttatgaaaagatgtgggcctttatgtcttcgcggcagcaaaccgctctcgtgagaaactcagatgaaggcatccaacgggtgctgaccacagattacgccctgcttatggagtccacctctatcgaatacgtgactcagcgcaattgcaacctgacacagatcggcggtctaatcgactcgaagggctacggcgtaggaacacccatagggtcaccttaccgagacaagattacaatagctattctgcaacttcaagaagagggaaaacttcatatgatgaaggaaaagtggtggagggggaatggatgccccgaagaagataataaggaagcctctgccctgggagtggagaacataggcgggatctttatcgtcctagcagctggattggtgttatccgtttttgtcgccatcggcgagtttatttacaaaagtaggaagaataacgacatcgagcaatgcctgtccttcaacgccatcatggaggagcttgggataagcctcaagaaccagaagaaaattaagaagaaaagccgtaccaaaggcaagtcgagcttcacttcgatactgacctgccatcagcggagaacccagcgaaaggagacagtggcttag

SEQ ID NO: 277082 - DNA, 3234 bp, Artificial Sequence
  derived and/or modified sequence
agccagctccgcggtcccacgcgggttccctcgagctcgctccgtggggagcgcgcagcgtgcttggaaccggagcatccagagaggatgaggcggggacccggcccaagttgggtgcatctctcgggcgtccggcagcggctgtatctcggcatgaattaagaagctaggaagatggagcacggcacactcctcgcccagcccgggctctggaccagggacaccagctgggcactcctctatttcctctgctatatcctccctcagaccgccccgcaagtactcaggatcggagggatttttgaaacagtggaaaatgagcctgttaatgttgaagaattagctttcaagtttgcagtcaccagcattaacagaaaccgaaccctgatgcctaacaccacattaacctatgacatccagagaattaacctttttgatagttttgaagcctcgcggagagcatgtgaccagctggctcttggtgtggctgctctctttggcccttcccatagctcctccgtcagtgctgtgcagtctatttgcaatgctctcgaagttccacacatacagacccgctggaaacacccctcggtggacaacaaagatttgttttacatcaacctttacccagattatgcagctatcagcagggcgatcctggatctggtcctctattacaactggaaaacagtgacagtggtgtatgaagacagcacaggtctaattcgtctacaagagctcatcaaagctccctccagatataatattaaaatcaaaatccgccagctgccctctgggaataaagatgccaagcctttactcaaggagatgaagaaaggcaaggagttctatgtgatatttgattgttcacatgaaacagccgctgaaatccttaagcagattctgttcatgggcatgatgaccgagtactatcactactttttcacaaccctggacttatttgctttggatctggaactctataggtacagtggcgtaaacatgaccgggtttcggctgcttaacattgacaaccctcacgtgtcatccatcattgagaagtggtccatggagagactgcaggccccacccaggcccgagactggccttttggatggcatgatgacaactgaagcggctctgatgtacgatgctgtgtacatggtggccattgcctcgcaccgggcatcccagctgaccgtcagctccctgcagtgccatagacataagccatggcgcctcggacccagatttatgaacctgatcaaagaggcccggtgggatggcttgactgggcatatcacctttaataaaaccaatggcttgaggaaggattttgatctggacattattagtctcaaagaggaaggaactgaaaaggctgctggcgaagtgtctaaacacttgtataaagtgtggaagaagattgggatttggaattccaacagtgggcttaacatgacggacagcaacaaagacaagtccagcaatatcactgattcattggccaacagaacactcattgtcaccaccattctggaagaaccctatgttatgtacaggaaatctgataagcctctatatggaaatgacagatttgaaggatattgcctagacctgttgaaagaattgtcaaacatcctgggtttcatttatgatgttaaactagttcccgatggcaaatatggggcccagaatgacaaaggggagtggaacgggatggttaaagaactcatagatcacagggctgacctggcagtggctcctcttaccatcacctacgtgcgggagaaagtcattgacttctccaaacccttcatgaccctaggcatcagcattctctaccggaagcccaatggtaccaatccaggcgttttctccttcctcaaccccctgtctccagatatttggatgtatgtgctcttagcctgcttgggagtcagctgtgtactctttgtgattgcaaggtttacaccctacgagtggtataacccccacccatgcaaccctgactcagacgtggtggaaaacaattttactttactaaatagtttctggtttggagttggagctctcatgcagcaaggatcagagctgatgcccaaagctctatcgaccagaatagttggagggatatggtggtttttcaccctaatcatcatttcatcctacacggccaatctggctgccttcttgacagtagagagaatggaatcccccatagattcggcagatgatctggcaaagcaaaccaagatagaatatggggcggttagagatggatcaacaatgaccttcttcaagaaatcaaaaatctccacctatgagaagatgtgggctttcatgagcagcaggcagcagaccgccctggtaagaaacagtgatgaggggatccagagagtgctcaccacagactacgcgctgctgatggagtccaccagcattgagtatgtgacgcagagaaactgcaacctcactcagatcgggggcctcattgactccaaaggttacggagtgggaacacctattggttctccttaccgggataaaattactattgctattcttcaactccaagaagaagggaagctgcatatgatgaaagagaagtggtggcgtgggaatggctgccccgaggaagacaacaaagaagccagtgccctgggagtggaaaatattggaggcatcttcattgttctggctgccggactggtcctttctgtatttgtagctattggagaattcatatacaaatcacggaagaataatgatattgaacagtgtctctctttcaacgctatcatggaagaactgggaatctcactgaagaatcagaaaaaaataaagaaaaagtcaagaactaaggggaaatcttccttcacaagtatccttacttgtcatcagagacgaactcagagaaaagagactgtggcgtgatccaaggaaacgcctgtaggaagaaaaaggatgcattccctacagatttttggagaaaggatttctgaggagtgtgtgatgtgtttccatatatctatatccataactctgattatgaatacagatataagaaatacaaaagtttaaaaagctcacatagatatgacttgggaagtgacaccagttcttttaaaataaatttgtatgctcaattattttgcattttttctttttccccaataaattgttgtgtgtgctttctaaataataataaaacaacagggtttttttccagaa

SEQ ID NO: 277083 - DNA, 2769 bp, Artificial Sequence
  derived and/or modified sequence
atggagcacggcacactcctcgcccagcccgggctctggaccagggacaccagctgggcactcctctatttcctctgctatatcctccctcagaccgccccgcaagtactcaggatcggagggatttttgaaacagtggaaaatgagcctgttaatgttgaagaattagctttcaagtttgcagtcaccagcattaacagaaaccgaaccctgatgcctaacaccacattaacctatgacatccagagaattaacctttttgatagttttgaagcctcgcggagagcatgtgaccagctggctcttggtgtggctgctctctttggcccttcccatagctcctccgtcagtgctgtgcagtctatttgcaatgctctcgaagttccacacatacagacccgctggaaacacccctcggtggacaacaaagatttgttttacatcaacctttacccagattatgcagctatcagcagggcgatcctggatctggtcctctattacaactggaaaacagtgacagtggtgtatgaagacagcacaggtctaattcgtctacaagagctcatcaaagctccctccagatataatattaaaatcaaaatccgccagctgccctctgggaataaagatgccaagcctttactcaaggagatgaagaaaggcaaggagttctatgtgatatttgattgttcacatgaaacagccgctgaaatccttaagcagattctgttcatgggcatgatgaccgagtactatcactactttttcacaaccctggacttatttgctttggatctggaactctataggtacagtggcgtaaacatgaccgggtttcggctgcttaacattgacaaccctcacgtgtcatccatcattgagaagtggtccatggagagactgcaggccccacccaggcccgagactggccttttggatggcatgatgacaactgaagcggctctgatgtacgatgctgtgtacatggtggccattgcctcgcaccgggcatcccagctgaccgtcagctccctgcagtgccatagacataagccatggcgcctcggacccagatttatgaacctgatcaaagaggcaactgcccggtgggatggcttgactgggcatatcacctttaataaaaccaatggcttgaggaaggattttgatctggacattattagtctcaaagaggaaggaactgaaaaggctgctggcgaagtgtctaaacacttgtataaagtgtggaagaagattgggatttggaattccaacagtgggcttaacatgacggacagcaacaaagacaagtccagcaatatcactgattcattggccaacagaacactcattgtcaccaccattctggaagaaccctatgttatgtacaggaaatctgataagcctctatatggaaatgacagatttgaaggatattgcctagacctgttgaaagaattgtcaaacatcctgggtttcatttatgatgttaaactagttcccgatggcaaatatggggcccagaatgacaaaggggagtggaacgggatggttaaagaactcatagatcacagggctgacctggcagtggctcctcttaccatcacctacgtgcgggagaaagtcattgacttctccaaacccttcatgaccctaggcatcagcattctctaccggaagcccaatggtaccaatccaggcgttttctccttcctcaaccccctgtctccagatatttggatgtatgtgctcttagcctgcttgggagtcagctgtgtactctttgtgattgcaaggtttacaccctacgagtggtataacccccacccatgcaaccctgactcagacgtggtggaaaacaattttactttactaaatagtttctggtttggagttggagctctcatgcagcaaggatcagagctgatgcccaaagctctatcgaccagaatagttggagggatatggtggtttttcaccctaatcatcatttcatcctacacggccaatctggctgccttcttgacagtagagagaatggaatcccccatagattcggcagatgatctggcaaagcaaaccaagatagaatatggggcggttagagatggatcaacaatgaccttcttcaagaaatcaaaaatctccacctatgagaagatgtgggctttcatgagcagcaggcagcagaccgccctggtaagaaacagtgatgaggggatccagagagtgctcaccacagactacgcgctgctgatggagtccaccagcattgagtatgtgacgcagagaaactgcaacctcactcagatcgggggcctcattgactccaaaggttacggagtgggaacacctattggttctccttaccgggataaaattactattgctattcttcaactccaagaagaagggaagctgcatatgatgaaagagaagtggtggcgtgggaatggctgccccgaggaagacaacaaagaagccagtgccctgggagtggaaaatattggaggcatcttcattgttctggctgccggactggtcctttctgtatttgtagctattggagaattcatatacaaatcacggaagaataatgatattgaacagtgtctctctttcaacgctatcatggaagaactgggaatctcactgaagaatcagaaaaaaataaagaaaaagtcaagaactaaggggaaatcttccttcacaagtatccttacttgtcatcagagacgaactcagagaaaagagactgtggcgtga

SEQ ID NO: 277084 - DNA, 2763 bp, Artificial Sequence
  derived and/or modified sequence
atggagcacggcaccctgctggcccagcccggcctgtggacccgggacacctcctgggccctgctgtacttcctgtgctacatcctgccccagacagccccccaggtgctgagaattggaggcatctttgaaacagtggagaatgaacctgtgaatgtggaggagctggccttcaagtttgctgtgaccagcatcaacagaaacagaaccctgatgcccaacaccaccctgacctatgacatccagaggatcaacctgtttgacagctttgaggccagccggcgggcctgtgaccagctggccctgggcgtggccgccctgtttggccccagccacagcagctctgtgtctgctgtgcagagcatctgcaatgccctggaggtgccccacatccagacccgctggaagcaccccagcgtggacaacaaggacctcttctacatcaacctgtacccagactatgctgccatcagccgggccatcctggacctggtgctgtactacaactggaagacagtgacagtggtgtatgaggacagcacaggcctcatccggctgcaggagctgatcaaggcccccagccgctacaacatcaagatcaagatccggcagctgcccagcggcaacaaggatgccaagcccctgctgaaggagatgaagaagggcaaggagttctacgtgatctttgactgcagccatgaaacagctgctgagatcctgaagcagatcctcttcatgggcatgatgacagagtactaccactacttcttcaccaccctggacctgtttgccctggacctggagctgtaccgctacagcggcgtgaacatgacaggcttccggctgctgaacatcgacaacccccacgtgagcagcatcatcgagaagtggagcatggagcggctgcaggccccacccaggcctgagaccggcctgctggatggcatgatgaccacagaagctgccctgatgtatgatgctgtgtacatggtggccatcgccagccaccgggccagccagctgactgtgagcagcctgcagtgccaccgccacaagccctggaggctgggcccccgcttcatgaacctgatcaaggaggcccgctgggatggcctgaccggccacatcaccttcaacaagaccaacggcctgaggaaggactttgacctggacatcatcagcctgaaggaggagggcacagagaaggccgccggggaggtgtccaagcacctgtacaaggtgtggaagaagattggcatctggaacagcaacagcggcctgaacatgacagacagcaacaaggacaagagcagcaacatcacagacagcctggccaacagaaccctcatcgtgaccaccatcctggaggagccctacgtgatgtacaggaagagtgacaagcccctgtatggaaatgacagatttgagggctactgcctggacctgctgaaggagctgagcaacatcctgggcttcatctatgatgtgaagctggtgcctgatggcaagtacggggcccagaatgacaagggggagtggaatggcatggtgaaggagctgattgaccacagagctgacctggccgtggcccccctgaccatcacctacgtgcgggagaaggtgattgacttcagcaagcccttcatgaccctgggcatcagcatcctgtacaggaagcccaacggcaccaaccctggggtcttctccttcctgaaccccctgagcccagacatctggatgtatgtgctgctggcctgcctgggcgtgtcctgtgtgctcttcgtcatcgcccgcttcaccccctatgagtggtacaacccccacccctgcaacccagacagtgatgtggtggagaacaacttcaccctgctgaacagcttctggtttggagtgggcgccctgatgcagcagggcagcgagctgatgcccaaggccctgagcacccgcatcgtgggcggcatctggtggttcttcaccctcatcatcatcagcagctacacagccaacctggccgccttcctgactgtggagaggatggagagccccattgattctgcagatgacctggccaagcagaccaagattgaatatggagctgtgagagatggcagcaccatgaccttcttcaagaagagcaagatcagcacctatgagaagatgtgggccttcatgagcagccggcagcagacagccctggtgaggaacagtgatgagggcatccagagggtgctgaccacagattatgccctgctgatggagagcaccagcattgaatatgtgacccagaggaactgcaacctgacccagatcggcggcctgattgacagcaagggctatggagtgggcacccccatcggcagcccctacagagacaagatcaccatcgccatcctgcagctgcaggaggagggcaagctgcacatgatgaaggagaagtggtggagaggaaatggctgcccagaggaggacaacaaggaggccagcgccctgggcgtggagaacattggaggcatcttcatcgtgctggccgccggcctggtgctgtctgtgtttgtggccatcggggagttcatctacaagagcaggaagaacaatgacatcgagcagtgcctgtccttcaatgccatcatggaggagctgggcatcagcctgaagaaccagaagaagatcaagaagaagagcaggaccaagggcaagagcagcttcaccagcatcctgacctgccaccagaggaggacccagaggaaggagaccgtggcctag

SEQ ID NO: 277085 - DNA, 2769 bp, Artificial Sequence
  derived and/or modified sequence
atggagcacggcaccctgctggcccagcccggcctgtggacccgggacacctcctgggccctgctgtacttcctgtgctacatcctgccccagacagccccccaggtgctgagaattggaggcatctttgaaacagtggagaatgaacctgtgaatgtggaggagctggccttcaagtttgctgtgaccagcatcaacagaaacagaaccctgatgcccaacaccaccctgacctatgacatccagaggatcaacctgtttgacagctttgaggccagccggcgggcctgtgaccagctggccctgggcgtggccgccctgtttggccccagccacagcagctctgtgtctgctgtgcagagcatctgcaatgccctggaggtgccccacatccagacccgctggaagcaccccagcgtggacaacaaggacctcttctacatcaacctgtacccagactatgctgccatcagccgggccatcctggacctggtgctgtactacaactggaagacagtgacagtggtgtatgaggacagcacaggcctcatccggctgcaggagctgatcaaggcccccagccgctacaacatcaagatcaagatccggcagctgcccagcggcaacaaggatgccaagcccctgctgaaggagatgaagaagggcaaggagttctacgtgatctttgactgcagccatgaaacagctgctgagatcctgaagcagatcctcttcatgggcatgatgacagagtactaccactacttcttcaccaccctggacctgtttgccctggacctggagctgtaccgctacagcggcgtgaacatgacaggcttccggctgctgaacatcgacaacccccacgtgagcagcatcatcgagaagtggagcatggagcggctgcaggccccacccaggcctgagaccggcctgctggatggcatgatgaccacagaagctgccctgatgtatgatgctgtgtacatggtggccatcgccagccaccgggccagccagctgactgtgagcagcctgcagtgccaccgccacaagccctggaggctgggcccccgcttcatgaacctgatcaaggaggccacagcccgctgggatggcctgaccggccacatcaccttcaacaagaccaacggcctgaggaaggactttgacctggacatcatcagcctgaaggaggagggcacagagaaggccgccggggaggtgtccaagcacctgtacaaggtgtggaagaagattggcatctggaacagcaacagcggcctgaacatgacagacagcaacaaggacaagagcagcaacatcacagacagcctggccaacagaaccctcatcgtgaccaccatcctggaggagccctacgtgatgtacaggaagagtgacaagcccctgtatggaaatgacagatttgagggctactgcctggacctgctgaaggagctgagcaacatcctgggcttcatctatgatgtgaagctggtgcctgatggcaagtacggggcccagaatgacaagggggagtggaatggcatggtgaaggagctgattgaccacagagctgacctggccgtggcccccctgaccatcacctacgtgcgggagaaggtgattgacttcagcaagcccttcatgaccctgggcatcagcatcctgtacaggaagcccaacggcaccaaccctggggtcttctccttcctgaaccccctgagcccagacatctggatgtatgtgctgctggcctgcctgggcgtgtcctgtgtgctcttcgtcatcgcccgcttcaccccctatgagtggtacaacccccacccctgcaacccagacagtgatgtggtggagaacaacttcaccctgctgaacagcttctggtttggagtgggcgccctgatgcagcagggcagcgagctgatgcccaaggccctgagcacccgcatcgtgggcggcatctggtggttcttcaccctcatcatcatcagcagctacacagccaacctggccgccttcctgactgtggagaggatggagagccccattgattctgcagatgacctggccaagcagaccaagattgaatatggagctgtgagagatggcagcaccatgaccttcttcaagaagagcaagatcagcacctatgagaagatgtgggccttcatgagcagccggcagcagacagccctggtgaggaacagtgatgagggcatccagagggtgctgaccacagattatgccctgctgatggagagcaccagcattgaatatgtgacccagaggaactgcaacctgacccagatcggcggcctgattgacagcaagggctatggagtgggcacccccatcggcagcccctacagagacaagatcaccatcgccatcctgcagctgcaggaggagggcaagctgcacatgatgaaggagaagtggtggagaggaaatggctgcccagaggaggacaacaaggaggccagcgccctgggcgtggagaacattggaggcatcttcatcgtgctggccgccggcctggtgctgtctgtgtttgtggccatcggggagttcatctacaagagcaggaagaacaatgacatcgagcagtgcctgtccttcaatgccatcatggaggagctgggcatcagcctgaagaaccagaagaagatcaagaagaagagcaggaccaagggcaagagcagcttcaccagcatcctgacctgccaccagaggaggacccagaggaaggagaccgtggcctag

SEQ ID NO: 277086 - DNA, 2763 bp, Artificial Sequence
  derived and/or modified sequence
atggagcacggcaccctgctggcccagcccggcctgtggacccgggatacaagctgggctctcttgtatttcttgtgttatattctgccacaaactgctccccaggtgttaaggattggcggtatttttgaaacagttgagaacgagccagtgaatgtggaggaattggcattcaaattcgcagttactagtataaatcgcaatcggacactgatgcctaatactaccctgacctacgatattcagaggatcaacttattcgattcgtttgaagcatccaggagagcatgtgaccagctggcactgggtgtggccgcgctgtttggcccctcacattcttctagtgtgtcggcagtgcagtcaatctgcaacgctttagaagtgccacacatacagacccgttggaaacacccgtccgtggataacaaggacctcttctacattaacctttatccggattacgcggctatttcccgggctatattggacctcgtcctgtattacaattggaaaaccgtcactgtggtgtacgaagattccaccgggctaattagattacaggagctgattaaggcaccatcacggtacaatatcaagattaaaattcggcagctgcccagcggtaataaagatgctaagcccctgctcaaggagatgaaaaagggcaaggaattctacgtgatattcgattgctcacacgagaccgccgctgaaatcttgaaacaaatactttttatgggtatgatgaccgagtactatcactacttctttactacacttgacctgttcgccctggacttagagctgtatcggtactccggcgtgaacatgaccggttttagactcctcaatattgacaatccccatgtgtcatccatcatcgagaagtggagtatggaacgactccaggcacctccacgtcctgagactggcctcctggacggcatgatgaccaccgaggcggccctcatgtacgacgcagtgtacatggtcgcaatcgccagccaccgggcaagtcaactgacagtgagtagcctgcagtgtcatcgccataagccgtggcggttgggcccacggtttatgaacttgattaaagaagcgcggtgggacggcctgacgggccacatcacctttaataagactaacggacttagaaaggatttcgacctggatatcataagcctaaaagaagaagggactgaaaaggccgcaggtgaggtgtctaaacatctgtacaaagtctggaaaaaaataggaatctggaatagcaactcaggtttgaacatgaccgatagtaacaaggacaagagctcgaacatcactgactcattagcgaatcgcactctaatagtgacaactatcctggaggaaccttacgttatgtaccggaagtcagacaaacccctgtatgggaacgataggtttgaaggctattgtctagacctgctgaaagagttatccaatatcctgggtttcatctacgacgtgaaattagtgcccgatggcaagtacggggctcagaatgataaaggggagtggaatggcatggttaaggagctgattgatcaccgggcagatttggccgtggccccccttacaatcacatacgtccgcgaaaaagtcatagatttcagcaaaccattcatgacattgggcatatctattctgtaccgcaaaccaaatgggacaaatccaggcgtgttttcattcctgaaccctctgtccccagacatctggatgtacgtgctgctcgcctgtctgggagtgagctgcgtgttgttcgtgatcgctagatttaccccatacgagtggtacaatcctcacccatgtaatcctgattcagatgttgttgaaaataactttacactgctgaactccttctggtttggcgttggcgcactgatgcagcagggctccgagctcatgccaaaggcactcagcaccagaattgtggggggcatttggtggtttttcaccctaatcattatttcaagttatacagcaaacctcgcggcctttttgacggtggaaaggatggaatcccctattgattcggccgatgatcttgccaaacaaacgaaaatagagtacggcgcagtgcgggatggcagcaccatgacattttttaaaaagagcaagattagtacttacgagaaaatgtgggctttcatgagctcaagacagcagaccgcacttgtgaggaacagtgacgaggggatccaaagagttctcacaaccgactatgccctgctgatggagagcaccagcattgaatatgttacacagaggaattgcaacctcactcagatcgggggcctgatcgatagcaaggggtacggagtcgggactcctattgggagcccttaccgtgacaagattaccattgctatcctgcaattgcaggaggaggggaagcttcatatgatgaaggagaagtggtggcgaggaaacgggtgccctgaagaagataataaagaggcgagcgctctgggggtggaaaatatcggaggcatcttcatagttctcgcagcaggtctggtcctgagcgtgttcgtcgctataggcgagttcatctataaatcccgtaagaataacgatatcgaacagtgcctgtctttcaatgctataatggaggaactagggataagcctcaagaaccagaaaaaaatcaagaagaagagccgaaccaagggcaagagtagtttcacaagcatcctgacatgccaccagaggcgaacccagcgcaaagagaccgtagcctag

SEQ ID NO: 277087 - DNA, 2769 bp, Artificial Sequence
  derived and/or modified sequence
atggagcacggcaccctgctggcccagcccggcctgtggacccgggatacatcttgggcccttctgtactttctctgttacatattgcctcagacagcaccccaggttttaaggatcggcggtattttcgaaaccgtggaaaatgagccggtgaacgtggaagagctcgcattcaaattcgcggtcaccagcattaatcggaacaggacactgatgccaaatacaactttgacctacgacattcagaggattaaccttttcgactcatttgaggccagcaggcgggcctgtgaccagttagctctcggagtggctgccctgtttggtccctcacactctagttccgtgagtgctgtccagtctatctgtaacgcactggaggtgccacacatccagacgcgttggaaacatcccagtgtcgacaacaaagatcttttctacattaacctgtatcccgactacgcagccatcagccgcgctattttggaccttgtactgtactataactggaaaacagttacagttgtgtacgaggactccaccgggctcataagattgcaggaactgataaaggcacccagtaggtataacattaagatcaagatcaggcagctgcctagcggtaataaggacgcaaagcctctgctgaaagagatgaaaaagggcaaggaattttatgtgattttcgattgctctcacgagaccgctgctgaaatcctgaagcagatcctgttcatgggcatgatgacagagtactatcactatttcttcacaaccctcgacctatttgcccttgacctggagttatatagatactctggagtgaatatgaccggttttcggctgctgaatatcgataacccacacgtatcctcaatcattgaaaagtggagcatggagagactgcaggccccccctaggcctgagaccggcctgctcgacggcatgatgactacagaggccgcattgatgtacgacgccgtgtacatggtggccatcgcttcccaccgggccagccagctgacagtttcaagtttgcagtgccacagacacaaaccttggcgattaggacctaggttcatgaacctgatcaaggaagcaaccgcacgctgggacggactcactgggcacatcacattcaataagacaaacggcctccgaaaagatttcgatctggacattatctcactcaaggaggaagggaccgagaaggccgccggcgaagtttctaagcacctctataaagtgtggaagaaaatagggatctggaatagcaattctggcctcaacatgaccgacagcaataaggataaatcttccaacattaccgattccctggctaatcgaactctgatagtcacgaccatcctggaggagccctatgtaatgtacagaaaatcagataagcccctttatggtaatgatagatttgagggttactgcctggatctacttaaagaacttagcaatatcttgggcttcatttacgatgtcaaactcgtgcccgacggaaagtatggggctcagaatgacaaaggcgaatggaatggaatggttaaggagctgattgatcatcgagccgatctggcagtcgcgcctttgactattacatacgttcgagagaaggtgatcgatttctcaaagccatttatgaccctggggatcagcattttgtatcggaaacccaacggcacaaatcccggagtcttttcttttctgaatcccctttcacccgatatctggatgtatgtgttattagcctgcctaggagtgagttgcgtgctgtttgtgatagcccgatttactccttacgagtggtacaaccctcatccttgtaatcccgacagtgatgttgtagagaataatttcactctccttaactcattctggttcggcgtgggcgctttaatgcagcagggctccgaactgatgcccaaggccctgagtactcgaatagtggggggcatctggtggttttttaccttgattattatttcctcttatacagccaatctggctgcctttctcacggtggagcgcatggagtcccccatcgactctgctgatgacctggcaaaacagacaaaaatcgagtacggggctgtcagagatggctcgactatgaccttctttaagaagtcaaagatctccacgtatgaaaagatgtgggccttcatgagttcacggcagcagaccgctttggtaaggaattccgatgagggtatccagcgtgtactgaccaccgactacgcgctcttgatggagtctaccagcatcgaatacgtaactcagaggaattgtaacctcacacagatcggtggtctgatcgactcgaaagggtacggtgtggggactccaatcggctctccgtatcgggataaaatcaccattgctatcctgcagttacaggaagaagggaaactgcacatgatgaaagaaaagtggtggcgaggtaacggttgcccagaggaggacaacaaggaagcctctgcactgggcgtcgaaaatatcggcggtatatttattgtcctggctgccggcctggtgctgtctgttttcgtggccattggagagttcatttacaagtcaaggaagaacaacgatatagagcagtgcctgagtttcaacgccattatggaagagctggggatctccctcaagaatcaaaaaaaaattaagaagaaaagtcgcaccaaaggaaagtcatcttttacttccatattgacatgccatcaacgaagaacccagagaaaagagaccgtggcctag

SEQ ID NO: 277088 - DNA, 2763 bp, Artificial Sequence
  derived and/or modified sequence
atggaacacggcaccctcctcgcgcagcctggactctggacgcgcgacacatcatgggctttgctgtattttttgtgctatatcttgccgcagacagcacctcaggtccttaggatcgggggaattttcgagaccgtggaaaatgagcccgtaaacgtggaagagttagcctttaagtttgccgtcactagtataaaccgcaaccggactctgatgccgaatacaacccttacctacgatatccaaagaattaatctcttcgactctttcgaggcaagccggagggcttgtgatcagctagccctgggggttgccgcactgtttggaccctcacattcaagttctgtgtctgcagtacagagcatatgcaacgcactggaggttcctcatattcagaccagatggaaacaccctagtgtggataataaggacttgttctatattaatctatatcccgactatgcagcaatttctagagcaattctcgatttagtcctctactataactggaagaccgttactgtcgtctacgaggacagtactgggttgatacggctccaagaattgattaaagctccttcccggtacaacataaagataaagatccggcagcttcccagcgggaacaaggacgctaagccactcctaaaagaaatgaagaagggaaaggagttctacgttattttcgattgttcccacgaaacggcagcagagatcctgaaacaaatcctctttatgggaatgatgacagagtactaccactatttcttcactacactagacctgtttgctcttgatctcgagctttaccggtactcaggcgttaacatgacggggtttcgcctgttgaatatcgacaatcctcacgtcagctcaataatcgagaagtggtcgatggaaaggctccaggctccgccaagaccagaaacaggactactcgacggaatgatgaccaccgaggctgcactgatgtatgatgccgtctatatggtcgctattgcgtcccaccgtgcttcacaacttacagtgagctctctccaatgccatagacataagccttggagacttgggcctagattcatgaacttgatcaaggaagcaaggtgggacggactgactggacacattaccttcaacaagacaaacggactgcgcaaagattttgatctcgatatcattagtttgaaagaggaaggcaccgagaaggccgctggtgaggtgagcaagcatttgtataaagtctggaagaagatcgggatttggaactccaatagcggactaaacatgaccgatagtaataaggacaaaagctctaacataaccgacagcctggccaaccggaccttaattgtgacaacaatcctggaagaaccatacgtgatgtacaggaagagcgataagccattatacggaaatgaccgattcgaaggctactgtctggacttactaaaggaactctcgaacattctcgggttcatctacgacgtgaaactggtgcccgacggaaagtatggggctcagaacgacaagggcgagtggaatgggatggtgaaggagctcatagaccacagagctgatctggccgtcgcgcctctgacaattacctatgtgagagaaaaagtgatagatttttcaaagccttttatgactttgggcatctctattctgtataggaagccaaacggtacaaatcccggtgtgttttcgttcctgaaccctctttctccagatatctggatgtacgttctgttggcatgcctcggagtgtcctgcgtcctcttcgtcatcgctcgttttaccccttatgagtggtacaacccacacccatgtaaccctgattccgacgtagttgagaataacttcaccctgctgaactccttttggttcggagttggggctttgatgcagcagggcagtgagctcatgccaaaagctctaagcaccagaatagttggaggaatctggtggtttttcacattaataatcatcagttcctatactgcaaacctggctgcttttctgactgtcgagaggatggaaagcccgatcgactctgcggacgatctggcgaaacagacaaaaatagagtacggagccgtgcgcgacggctcaaccatgaccttctttaagaaatcaaagattagcacctatgagaaaatgtgggcttttatgtcctcccggcagcagaccgctctggtaagaaattccgatgaaggaattcagagggtgcttacaacagactatgcccttctgatggagagtacaagcattgagtacgtcactcaaaggaattgtaacttgacccagatagggggtctgatcgactcaaaggggtacggggttgggaccccgattgggtccccatacagagacaaaatcactatcgccatcctgcagctacaggaagagggaaagttacacatgatgaaggagaaatggtggcgtgggaatgggtgccccgaagaggacaacaaggaggcatccgccctgggcgttgagaacatcggcggaatatttatcgtccttgcggcagggctagtcctgtctgtgttcgtggctataggggagttcatttacaaatcccgaaaaaacaacgacatcgaacaatgtttgagctttaacgctattatggaggaacttggtatctctctcaaaaaccagaagaaaattaagaagaaatcacgcaccaagggaaaatcatcttttacaagcatactgacatgccaccagagacgaactcagaggaaggaaaccgtggcatag

SEQ ID NO: 277089 - DNA, 2769 bp, Artificial Sequence
  derived and/or modified sequence
atggaacacggcacgttgcttgcccagccaggtctgtggactcgggacacatcctgggccctgctctatttcctctgttacattcttccccagacggctccacaagtcctcaggatcggcggaattttcgagacggttgaaaatgaaccagttaacgtagaggagttggctttcaagtttgcggtgacaagcattaaccgcaatcggactctcatgccaaataccactcttacatatgatatccaacggatcaacctattcgattcttttgaagcctccaggagggcctgcgatcaattggccctgggagtggctgccctctttggacctagccatagtagtagtgttagcgcggtgcaatccatctgcaatgcactggaggtgccacacattcaaaccaggtggaagcacccatccgtagacaacaaggaccttttttacattaacctgtacccagattacgccgctatatcacgggctatattggatctcgtgctatactacaattggaaaacagtcaccgtggtatatgaggattcaaccggactcataagattgcaagaattgattaaagctccatcccgctacaatatcaaaattaaaataagacagctgccctccggtaacaaggacgccaagccactgctgaaggagatgaagaagggaaaggagttctatgttatcttcgactgtagccatgagacagctgccgaaatcctaaagcaaatcctctttatgggcatgatgaccgagtactaccattacttcttcacaacgttagacctcttcgcgctcgacctggaactttatagatatagtggggtcaatatgaccggcttcaggctccttaatatcgacaaccctcatgtctcatcaatcatagagaagtggagtatggaacggctgcaggcaccccctaggcctgagactggccttctggatgggatgatgacaaccgaggccgctctcatgtacgatgccgtgtacatggtggctatcgcttcccaccgagcctcccagctaactgttagtagtctccagtgccaccggcataaaccttggcgtctgggacctagattcatgaacttaatcaaggaagctacggccaggtgggacggcttgaccgggcacattacattcaacaagactaatggactgcgcaaagattttgatctcgatataattagcctgaaggaggaaggaacagagaaggcggcaggcgaggtctccaagcatttgtataaggtgtggaagaaaatcggtatatggaatagcaatagcgggctcaacatgacggacagcaacaaagacaaaagttccaacattacagattcactcgccaaccgcacactaatcgttacgactatcctagaggagccatacgtgatgtatcggaaatcagacaagcctttgtatggtaacgacagatttgaaggctactgcttggacctactgaaggaactgtcaaatattctcggttttatatacgatgtaaaattagttcccgacggcaagtatggtgctcagaacgacaagggcgagtggaatgggatggtcaaggagctcattgaccacagagctgacctggctgtggcccctttgacgatcacctatgtgagagagaaagtaatagactttagcaagccatttatgaccctcggcatctctatcctgtaccgcaaacctaatgggaccaaccctggtgtcttcagtttcctcaacccactttccccggatatatggatgtatgtgttattggcctgcctgggggtgagttgcgttctatttgtaattgctcggttcacaccatacgaatggtacaacccccacccttgtaaccctgatagcgacgtggtggagaataactttaccctgcttaattcattttggttcggtgtgggcgctctcatgcaacaaggctccgagcttatgcctaaggccctatctacgcgaatagtgggcggaatctggtggttcttcacgctcataataatttcgagctataccgccaacttagcagccttcttgactgtagagcgtatggagagtccaatcgacagcgctgatgaccttgccaagcagaccaaaatcgagtatggagccgtcagggacggcagcactatgacgttctttaagaaatcaaagatctccacgtatgaaaagatgtgggcctttatgagcagtcgccaacagacagcgctggtgcggaactcagacgaggggatccaaagagtacttacgactgattacgccttgctcatggagtccacttctatcgagtatgtcacacagaggaattgtaatctaacccagatcgggggactgatagactcaaagggctatggggtgggaacacctatcggctcaccttacagggacaaaattaccatcgccattctccagctgcaagaggaaggaaagctccacatgatgaaggagaaatggtggcggggtaatgggtgccccgaagaagataacaaggaagcctctgctttaggcgttgagaacatcggaggcatcttcattgtcctggcagccggattggtcttgagtgttttcgtggccatcggggagtttatttacaaatcccgcaaaaataacgatattgagcagtgcctgtcatttaacgccataatggaagagctggggatcagcttgaagaaccagaaaaaaataaaaaagaaaagtcggacaaaggggaagtcctcttttacatccatcctgacctgtcaccagcgcaggacccagcgcaaagaaacggtggcatag

SEQ ID NO: 277090 - DNA, 2763 bp, Artificial Sequence
  derived and/or modified sequence
atggagcacggcaccctgctggcccagcccggcctgtggaccagagacaccagctgggccctgctgtacttcctgtgctacatcctgccccagaccgccccccaggtgctgagaatcggcggcatcttcgagaccgtggagaacgagcccgtgaacgtggaggagctggccttcaagttcgccgtgaccagcatcaacagaaacagaaccctgatgcccaacaccaccctgacctacgacatccagagaatcaacctgttcgacagcttcgaggccagcagaagagcctgcgaccagctggccctgggcgtggccgccctgttcggccccagccacagcagcagcgtgagcgccgtgcagagcatctgcaacgccctggaggtgccccacatccagaccagatggaagcaccccagcgtggacaacaaggacctgttctacatcaacctgtaccccgactacgccgccatcagcagagccatcctggacctggtgctgtactacaactggaagaccgtgaccgtggtgtacgaggacagcaccggcctgatcagactgcaggagctgatcaaggcccccagcagatacaacatcaagatcaagatcagacagctgcccagcggcaacaaggacgccaagcccctgctgaaggagatgaagaagggcaaggagttctacgtgatcttcgactgcagccacgagaccgccgccgagatcctgaagcagatcctgttcatgggcatgatgaccgagtactaccactacttcttcaccaccctggacctgttcgccctggacctggagctgtacagatacagcggcgtgaacatgaccggcttcagactgctgaacatcgacaacccccacgtgagcagcatcatcgagaagtggagcatggagagactgcaggccccccccagacccgagaccggcctgctggacggcatgatgaccaccgaggccgccctgatgtacgacgccgtgtacatggtggccatcgccagccacagagccagccagctgaccgtgagcagcctgcagtgccacagacacaagccctggagactgggccccagattcatgaacctgatcaaggaggccagatgggacggcctgaccggccacatcaccttcaacaagaccaacggcctgagaaaggacttcgacctggacatcatcagcctgaaggaggagggcaccgagaaggccgccggcgaggtgagcaagcacctgtacaaggtgtggaagaagatcggcatctggaacagcaacagcggcctgaacatgaccgacagcaacaaggacaagagcagcaacatcaccgacagcctggccaacagaaccctgatcgtgaccaccatcctggaggagccctacgtgatgtacagaaagagcgacaagcccctgtacggcaacgacagattcgagggctactgcctggacctgctgaaggagctgagcaacatcctgggcttcatctacgacgtgaagctggtgcccgacggcaagtacggcgcccagaacgacaagggcgagtggaacggcatggtgaaggagctgatcgaccacagagccgacctggccgtggcccccctgaccatcacctacgtgagagagaaggtgatcgacttcagcaagcccttcatgaccctgggcatcagcatcctgtacagaaagcccaacggcaccaaccccggcgtgttcagcttcctgaaccccctgagccccgacatctggatgtacgtgctgctggcctgcctgggcgtgagctgcgtgctgttcgtgatcgccagattcaccccctacgagtggtacaacccccacccctgcaaccccgacagcgacgtggtggagaacaacttcaccctgctgaacagcttctggttcggcgtgggcgccctgatgcagcagggcagcgagctgatgcccaaggccctgagcaccagaatcgtgggcggcatctggtggttcttcaccctgatcatcatcagcagctacaccgccaacctggccgccttcctgaccgtggagagaatggagagccccatcgacagcgccgacgacctggccaagcagaccaagatcgagtacggcgccgtgagagacggcagcaccatgaccttcttcaagaagagcaagatcagcacctacgagaagatgtgggccttcatgagcagcagacagcagaccgccctggtgagaaacagcgacgagggcatccagagagtgctgaccaccgactacgccctgctgatggagagcaccagcatcgagtacgtgacccagagaaactgcaacctgacccagatcggcggcctgatcgacagcaagggctacggcgtgggcacccccatcggcagcccctacagagacaagatcaccatcgccatcctgcagctgcaggaggagggcaagctgcacatgatgaaggagaagtggtggagaggcaacggctgccccgaggaggacaacaaggaggccagcgccctgggcgtggagaacatcggcggcatcttcatcgtgctggccgccggcctggtgctgagcgtgttcgtggccatcggcgagttcatctacaagagcagaaagaacaacgacatcgagcagtgcctgagcttcaacgccatcatggaggagctgggcatcagcctgaagaaccagaagaagatcaagaagaagagcagaaccaagggcaagagcagcttcaccagcatcctgacctgccaccagagaagaacccagagaaaggagaccgtggcctag

SEQ ID NO: 277091 - DNA, 2769 bp, Artificial Sequence
  derived and/or modified sequence
atggagcacggcaccctgctggcccagcccggcctgtggaccagagacaccagctgggccctgctgtacttcctgtgctacatcctgccccagaccgccccccaggtgctgagaatcggcggcatcttcgagaccgtggagaacgagcccgtgaacgtggaggagctggccttcaagttcgccgtgaccagcatcaacagaaacagaaccctgatgcccaacaccaccctgacctacgacatccagagaatcaacctgttcgacagcttcgaggccagcagaagagcctgcgaccagctggccctgggcgtggccgccctgttcggccccagccacagcagcagcgtgagcgccgtgcagagcatctgcaacgccctggaggtgccccacatccagaccagatggaagcaccccagcgtggacaacaaggacctgttctacatcaacctgtaccccgactacgccgccatcagcagagccatcctggacctggtgctgtactacaactggaagaccgtgaccgtggtgtacgaggacagcaccggcctgatcagactgcaggagctgatcaaggcccccagcagatacaacatcaagatcaagatcagacagctgcccagcggcaacaaggacgccaagcccctgctgaaggagatgaagaagggcaaggagttctacgtgatcttcgactgcagccacgagaccgccgccgagatcctgaagcagatcctgttcatgggcatgatgaccgagtactaccactacttcttcaccaccctggacctgttcgccctggacctggagctgtacagatacagcggcgtgaacatgaccggcttcagactgctgaacatcgacaacccccacgtgagcagcatcatcgagaagtggagcatggagagactgcaggccccccccagacccgagaccggcctgctggacggcatgatgaccaccgaggccgccctgatgtacgacgccgtgtacatggtggccatcgccagccacagagccagccagctgaccgtgagcagcctgcagtgccacagacacaagccctggagactgggccccagattcatgaacctgatcaaggaggccaccgccagatgggacggcctgaccggccacatcaccttcaacaagaccaacggcctgagaaaggacttcgacctggacatcatcagcctgaaggaggagggcaccgagaaggccgccggcgaggtgagcaagcacctgtacaaggtgtggaagaagatcggcatctggaacagcaacagcggcctgaacatgaccgacagcaacaaggacaagagcagcaacatcaccgacagcctggccaacagaaccctgatcgtgaccaccatcctggaggagccctacgtgatgtacagaaagagcgacaagcccctgtacggcaacgacagattcgagggctactgcctggacctgctgaaggagctgagcaacatcctgggcttcatctacgacgtgaagctggtgcccgacggcaagtacggcgcccagaacgacaagggcgagtggaacggcatggtgaaggagctgatcgaccacagagccgacctggccgtggcccccctgaccatcacctacgtgagagagaaggtgatcgacttcagcaagcccttcatgaccctgggcatcagcatcctgtacagaaagcccaacggcaccaaccccggcgtgttcagcttcctgaaccccctgagccccgacatctggatgtacgtgctgctggcctgcctgggcgtgagctgcgtgctgttcgtgatcgccagattcaccccctacgagtggtacaacccccacccctgcaaccccgacagcgacgtggtggagaacaacttcaccctgctgaacagcttctggttcggcgtgggcgccctgatgcagcagggcagcgagctgatgcccaaggccctgagcaccagaatcgtgggcggcatctggtggttcttcaccctgatcatcatcagcagctacaccgccaacctggccgccttcctgaccgtggagagaatggagagccccatcgacagcgccgacgacctggccaagcagaccaagatcgagtacggcgccgtgagagacggcagcaccatgaccttcttcaagaagagcaagatcagcacctacgagaagatgtgggccttcatgagcagcagacagcagaccgccctggtgagaaacagcgacgagggcatccagagagtgctgaccaccgactacgccctgctgatggagagcaccagcatcgagtacgtgacccagagaaactgcaacctgacccagatcggcggcctgatcgacagcaagggctacggcgtgggcacccccatcggcagcccctacagagacaagatcaccatcgccatcctgcagctgcaggaggagggcaagctgcacatgatgaaggagaagtggtggagaggcaacggctgccccgaggaggacaacaaggaggccagcgccctgggcgtggagaacatcggcggcatcttcatcgtgctggccgccggcctggtgctgagcgtgttcgtggccatcggcgagttcatctacaagagcagaaagaacaacgacatcgagcagtgcctgagcttcaacgccatcatggaggagctgggcatcagcctgaagaaccagaagaagatcaagaagaagagcagaaccaagggcaagagcagcttcaccagcatcctgacctgccaccagagaagaacccagagaaaggagaccgtggcctag

SEQ ID NO: 277092 - protein, 903 aa, Artificial Sequence
  derived and/or modified sequence
MEHGTLLAQPGLWTRDTSWALLYFLCYILPQTAPQVLRIGGIFETVENEPVNVEELAFKFAVTSINRNRTLMPNTTLTYDIQRINLFDSFEASRRACDQLALGVAALFGPSHSSSVSAVQSICNALEVPHIQTRWKHPSVDNKDLFYINLYPDYAAISRAILDLVLYYNWKTVTVVYEDSTGLIRLQELIKAPSRYNIKIKIRQLPSGNKDAKPLLKEMKKGKEFYVIFDCSHETAAEILKQILFMGMMTEYYHYFFTTLDLFALDLELYRYSGVNMTGFRLLNIDNPHVSSIIEKWSMERLQAPPRPETGLLDGMMTTEAALMYDAVYMVAIASHRASQLTVSSLQCHRHKPWRLGPRFMNLIKEARWDGLTGHITFNKTNGLRKDFDLDIISLKEEGTEKIGIWNSNSGLNMTDSNKDKSSNITDSLANRTLIVTTILEEPYVMYRKSDKPLYGNDRFEGYCLDLLKELSNILGFIYDVKLVPDGKYGAQNDKGEWNGMVKELIDHRADLAVAPLTITYVREKVIDFSKPFMTLGISILYRKPNGTNPGVFSFLNPLSPDIWMYVLLACLGVSCVLFVIARFTPYEWYNPHPCNPDSDVVENNFTLLNSFWFGVGALMQQGSELMPKALSTRIVGGIWWFFTLIIISSYTANLAAFLTVERMESPIDSADDLAKQTKIEYGAVRDGSTMTFFKKSKISTYEKMWAFMSSRQQTALVRNSDEGIQRVLTTDYALLMESTSIEYVTQRNCNLTQIGGLIDSKGYGVGTPIGSPYRDKITIAILQLQEEGKLHMMKEKWWRGNGCPEEDNKEASALGVENIGGIFIVLAAGLVLSVFVAIGEFIYKSRKNNDIEQAFCFFYGLQCKQTHPTNSTSGTTLSTDLECGKLIREERGIRKQSSVHTV

SEQ ID NO: 277093 - DNA, 2712 bp, Artificial Sequence
  derived and/or modified sequence
atggaacacggtaccctattggcacaaccaggattgtggacccgggacacaagctgggccctgctgtacttcttgtgctacatccttcctcaaacggcgccgcaagtgctccgaattggtgggatctttgaaaccgtcgaaaatgaacccgtcaatgtggaggaactagctttcaagtttgctgtcacttcaatcaaccgaaacaggacactgatgcctaacacaacactcacgtatgatatccaaaggataaacttatttgattctttcgaggcctcgcggcgggcctgtgaccagctcgctctgggcgtcgctgccctgttcggcccttcacacagcagtagcgtcagcgccgtacagtcaatatgtaacgccctggaggtcccccacattcagacccggtggaagcacccatcggtcgataataaggatttattctacattaacctataccccgactatgctgccatatccagggcgattctggacctggtgctgtactataattggaagaccgttactgttgtgtacgaagatagcaccgggctcattcgcctgcaagaactcatcaaggcccccagtaggtacaacataaagattaagattcggcagttgccatccggcaataaagacgcgaagccactccttaaagagatgaagaagggcaaagaattttacgtgattttcgattgctcgcacgaaaccgcagctgagatcctgaaacagattcttttcatgggcatgatgacagaatattaccactattttttcacaaccctggacttgtttgccttggacttggagctataccgatactcaggtgtgaatatgacagggttccgcctgctgaatattgacaatcctcacgtttcctcaattattgagaagtggagtatggaaagactgcaagcacctccacgccctgaaactggccttttagatggcatgatgacaacagaagcagctctgatgtatgacgccgtgtacatggtagccatcgccagtcaccgggcaagccagctgaccgtctccagtctccaatgccaccgccacaagccatggcgtcttggcccccgattcatgaacctaattaaagaagctcgctgggatggcctgacaggacatattacatttaataaaaccaacggcttgaggaaagactttgatctggacatcatttccctgaaagaggaggggaccgaaaagattggtatatggaactccaactctggactaaatatgaccgacagcaacaaggataagagttccaatatcactgatagtctcgcaaataggacactgattgtgaccacaatcttggaagagccttatgttatgtacagaaaatctgataagcctctgtatggcaacgataggtttgaaggctactgtttagatctgctcaaagagttgtcgaacatcctgggtttcatctatgatgtgaagctggtgcctgacggcaaatacggagcacagaacgacaaaggggagtggaacggcatggtcaaggaacttattgatcatcgagctgacctggctgtggcacccctcaccatcacctacgtgcgagagaaagtgatcgacttttcaaaacccttcatgacactcgggatttccatcctctacaggaagccaaacggtacaaatcctggtgtgttctcctttctcaatccactgtcacctgatatttggatgtatgtgcttctcgcatgtctcggtgtttcttgtgtactgttcgtgatagctagattcaccccctacgagtggtacaacccccacccctgtaaccccgatagcgatgtggtggaaaacaattttaccctgctgaatagtttctggtttggcgtgggcgcgctcatgcaacagggtagcgagttaatgcccaaggccctgtcaacgcggattgtgggcggtatctggtggttcttcacgttgatcatcatctctagttataccgcgaatctggcagcgttcctgacagttgaacgaatggagagtcctatcgactccgctgatgatcttgcgaagcagaccaagatcgagtatggggctgtccgtgatgggtccacaatgaccttctttaaaaagagcaaaatcagtacgtacgagaagatgtgggcatttatgtccagcagacagcagaccgccctggttcgcaactcagacgaaggcatccagagggtactgaccaccgactacgctctgctaatggaaagcacatcgattgagtacgtgacacagagaaactgcaatttgactcaaattggcggactaattgactccaagggatacggtgttggaacgcctatcggttctccttacagagataaaattactatcgcaattcttcagctacaggaggagggaaagttgcacatgatgaaggagaagtggtggcgcgggaatggatgcccagaggaggacaataaggaagcgagcgccctcggagttgagaatattgggggcatctttattgtgttggcagcgggattagttctgtccgtattcgtggcgattggagaattcatctataagagtcgaaagaacaacgatattgaacaggcgttttgtttcttctatggtctgcagtgtaagcaaactcacccaacaaacagtacatctggcacaacactgagcacagatctcgagtgtgggaaactgatccgggaagaacgagggatccggaagcagtcctctgttcacacggtgtag

SEQ ID NO: 277094 - DNA, 3427 bp, Artificial Sequence
  derived and/or modified sequence
ctttcccccttttccctcctctgtctgtgcctatcccccgacttttgcatctgaccaaaggacgaatgagggagacgttcctgcagatcggggcagcaactttcctcagctggtctctgggctccgggagccagagagcgctgatcctccgcggtctgcggcccatggaagaggaggaggaggagccgtgatgggctagcgacagcactgaggagccccgagagagctcagccttgccagccagctccgcggtcccacgcgggttccctcgagctcgctccgtggggagcgcgcagcgtgcttggaaccggagcatccagagaggatgaggcggggacccggcccaagttgggtgcatctctcgggcgtccggcagcggctgtatctcggcatgaattaagaagctaggaagatggagcacggcacactcctcgcccagcccgggctctggaccagggacaccagctgggcactcctctatttcctctgctatatcctccctcagaccgccccgcaagtactcaggatcggagggatttttgaaacagtggaaaatgagcctgttaatgttgaagaattagctttcaagtttgcagtcaccagcattaacagaaaccgaaccctgatgcctaacaccacattaacctatgacatccagagaattaacctttttgatagttttgaagcctcgcggagagcatgtgaccagctggctcttggtgtggctgctctctttggcccttcccatagctcctccgtcagtgctgtgcagtctatttgcaatgctctcgaagttccacacatacagacccgctggaaacacccctcggtggacaacaaagatttgttttacatcaacctttacccagattatgcagctatcagcagggcgatcctggatctggtcctctattacaactggaaaacagtgacagtggtgtatgaagacagcacaggtctaattcgtctacaagagctcatcaaagctccctccagatataatattaaaatcaaaatccgccagctgccctctgggaataaagatgccaagcctttactcaaggagatgaagaaaggcaaggagttctatgtgatatttgattgttcacatgaaacagccgctgaaatccttaagcagattctgttcatgggcatgatgaccgagtactatcactactttttcacaaccctggacttatttgctttggatctggaactctataggtacagtggcgtaaacatgaccgggtttcggctgcttaacattgacaaccctcacgtgtcatccatcattgagaagtggtccatggagagactgcaggccccacccaggcccgagactggccttttggatggcatgatgacaactgaagcggctctgatgtacgatgctgtgtacatggtggccattgcctcgcaccgggcatcccagctgaccgtcagctccctgcagtgccatagacataagccatggcgcctcggacccagatttatgaacctgatcaaagaggcccggtgggatggcttgactgggcatatcacctttaataaaaccaatggcttgaggaaggattttgatctggacattattagtctcaaagaggaaggaactgaaaagattgggatttggaattccaacagtgggcttaacatgacggacagcaacaaagacaagtccagcaatatcactgattcattggccaacagaacactcattgtcaccaccattctggaagaaccctatgttatgtacaggaaatctgataagcctctatatggaaatgacagatttgaaggatattgcctagacctgttgaaagaattgtcaaacatcctgggtttcatttatgatgttaaactagttcccgatggcaaatatggggcccagaatgacaaaggggagtggaacgggatggttaaagaactcatagatcacagggctgacctggcagtggctcctcttaccatcacctacgtgcgggagaaagtcattgacttctccaaacccttcatgaccctaggcatcagcattctctaccggaagcccaatggtaccaatccaggcgttttctccttcctcaaccccctgtctccagatatttggatgtatgtgctcttagcctgcttgggagtcagctgtgtactctttgtgattgcaaggtttacaccctacgagtggtataacccccacccatgcaaccctgactcagacgtggtggaaaacaattttactttactaaatagtttctggtttggagttggagctctcatgcagcaaggatcagagctgatgcccaaagctctatcgaccagaatagttggagggatatggtggtttttcaccctaatcatcatttcatcctacacggccaatctggctgccttcttgacagtagagagaatggaatcccccatagattcggcagatgatctggcaaagcaaaccaagatagaatatggggcggttagagatggatcaacaatgaccttcttcaagaaatcaaaaatctccacctatgagaagatgtgggctttcatgagcagcaggcagcagaccgccctggtaagaaacagtgatgaggggatccagagagtgctcaccacagactacgcgctgctgatggagtccaccagcattgagtatgtgacgcagagaaactgcaacctcactcagatcgggggcctcattgactccaaaggttacggagtgggaacacctattggttctccttaccgggataaaattactattgctattcttcaactccaagaagaagggaagctgcatatgatgaaagagaagtggtggcgtgggaatggctgccccgaggaagacaacaaagaagccagtgccctgggagtggaaaatattggaggcatcttcattgttctggctgccggactggtcctttctgtatttgtagctattggagaattcatatacaaatcacggaagaataatgatattgaacaggctttttgtttcttttatggactgcaatgtaagcaaacccatccaaccaactccacttctggaactactttatctacggatttagaatgtggtaaattaattcgagaggagagagggattcgaaaacagtcctcagttcatactgtgtaatcagtttaaaaaaaaaaaaaaagatgtgcccagtagaaaatgtttttgctaattggtgttgttgatatttgtatttgctaagcataaatagccacaattctctattcctttaggatagcaaaactcatgtattctagacattgaaatgaatacactggaaagatacttgcactgtatgttgaagcaggggcatattaggggtataaagacttctagaaatgtgtatttacaggaatcttctctgtcccactcatcatcttagttctatcttcatgcattaaaaataagtaactcttccttcat

SEQ ID NO: 277095 - DNA, 2712 bp, Artificial Sequence
  derived and/or modified sequence
atggagcacggcaccctgctggcccagcccggcctgtggacccgggacacctcctgggccctgctgtacttcctgtgctacatcctgccccagacagccccccaggtgctgagaattggaggcatctttgaaacagtggagaatgaacctgtgaatgtggaggagctggccttcaagtttgctgtgaccagcatcaacagaaacagaaccctgatgcccaacaccaccctgacctatgacatccagaggatcaacctgtttgacagctttgaggccagccggcgggcctgtgaccagctggccctgggcgtggccgccctgtttggccccagccacagcagctctgtgtctgctgtgcagagcatctgcaatgccctggaggtgccccacatccagacccgctggaagcaccccagcgtggacaacaaggacctcttctacatcaacctgtacccagactatgctgccatcagccgggccatcctggacctggtgctgtactacaactggaagacagtgacagtggtgtatgaggacagcacaggcctcatccggctgcaggagctgatcaaggcccccagccgctacaacatcaagatcaagatccggcagctgcccagcggcaacaaggatgccaagcccctgctgaaggagatgaagaagggcaaggagttctacgtgatctttgactgcagccatgaaacagctgctgagatcctgaagcagatcctcttcatgggcatgatgacagagtactaccactacttcttcaccaccctggacctgtttgccctggacctggagctgtaccgctacagcggcgtgaacatgacaggcttccggctgctgaacatcgacaacccccacgtgagcagcatcatcgagaagtggagcatggagcggctgcaggccccacccaggcctgagaccggcctgctggatggcatgatgaccacagaagctgccctgatgtatgatgctgtgtacatggtggccatcgccagccaccgggccagccagctgactgtgagcagcctgcagtgccaccgccacaagccctggaggctgggcccccgcttcatgaacctgatcaaggaggcccgctgggatggcctgaccggccacatcaccttcaacaagaccaacggcctgaggaaggactttgacctggacatcatcagcctgaaggaggagggcacagagaagattggcatctggaacagcaacagcggcctgaacatgacagacagcaacaaggacaagagcagcaacatcacagacagcctggccaacagaaccctgattgtgaccaccatcctggaggagccctacgtgatgtacaggaagagtgacaagcccctgtatggaaatgacagatttgagggctactgcctggacctgctgaaggagctgagcaacatcctgggcttcatctatgatgtgaagctggtgcctgatggcaagtatggagcccagaatgacaagggggagtggaatggcatggtgaaggagctgattgaccacagagctgacctggccgtggcccccctgaccatcacctacgtgcgggagaaggtgattgacttcagcaagcccttcatgaccctgggcatcagcatcctgtacaggaagcccaacggcaccaaccctggggtcttctccttcctgaaccccctgagcccagacatctggatgtatgtgctgctggcctgcctgggcgtgtcctgtgtgctgtttgtgattgcccgcttcaccccctatgagtggtacaacccccacccctgcaacccagacagtgatgtggtggagaacaacttcaccctgctgaacagcttctggtttggagtgggcgccctgatgcagcagggcagcgagctgatgcccaaggccctgagcaccagaattgtgggcggcatctggtggttcttcaccctcatcatcatcagcagctacacagccaacctggccgccttcctgactgtggagaggatggagagccccatcgacagcgcagatgacctggccaagcagaccaagattgaatatggagctgtgagagatggcagcaccatgaccttcttcaagaagagcaagatcagcacctatgagaagatgtgggccttcatgagcagccggcagcagacagccctggtgaggaacagtgatgagggcatccagagggtgctgaccacagattatgccctgctgatggagagcaccagcattgaatatgtgacccagaggaactgcaacctgacccagattggaggcctgattgacagcaagggctacggcgtgggcacccccatcggcagcccctacagagacaagatcaccatcgccatcctgcagctgcaggaggagggcaagctgcacatgatgaaggagaagtggtggagaggaaatggctgcccagaggaggacaacaaggaggccagcgccctgggcgtggagaacatcggcggcatcttcatcgtgctggccgccggcctggtgctgtctgtgtttgtggccatcggggagttcatctacaagagcaggaagaacaatgacatcgagcaggccttctgcttcttctacggcctgcagtgcaagcagacccaccccaccaacagcaccagcggcaccaccctgagcacagacctggagtgtgggaagctgatccgggaggagcggggcatcaggaagcagagctctgtgcacacagtgtag

SEQ ID NO: 277096 - DNA, 2712 bp, Artificial Sequence
  derived and/or modified sequence
atggagcacggcaccctgctggcccagcccggcctgtggacccgggacacgtcatgggccctgctctattttctctgctatatactgcctcaaactgctccccaggtactgaggataggcggaatcttcgagactgtggaaaatgaaccagtcaacgtagaggagctagccttcaagttcgccgttacaagcatcaacaggaaccgaacactcatgcctaacaccacacttacttacgacatccaaagaatcaacctttttgacagcttcgaggccagtcgccgggcctgcgaccagctggcactgggagttgccgccttattcggaccttcccactcttcttctgtctcggccgtgcagtctatctgtaatgctttagaggtgccacatattcagacccggtggaagcacccatcagtagataacaaagacctgttttacattaacctgtatccagattatgctgcgatatcaagagctatcctggacctggtgctgtattacaactggaaaaccgttacagtggtttatgaggattctacaggactgatccggttgcaggagcttattaaggccccatccaggtacaatatcaagatcaagattaggcagctccctagcggcaacaaggacgccaaacctcttttgaaagagatgaagaagggtaaagagttttatgtgatctttgactgctcacatgagaccgcagctgaaattctgaagcagatcctcttcatgggcatgatgaccgaatattaccactacttttttactaccctcgacctgttcgctctcgacctggagctgtacagatactcaggggtcaatatgaccgggtttagattgctgaacatagacaatcctcacgtaagctctataattgaaaagtggtctatggagcgccttcaggctcccccacgacctgaaacgggtctcttggatggaatgatgacaacagaagctgctctgatgtatgatgctgtgtacatggtggcaatagcatctcatagggcctcgcaactgaccgtgagcagcctccagtgccaccggcacaagccctggcggttgggccctcggttcatgaatcttatcaaggaggctagatgggatgggctgacgggtcacattactttcaacaagacgaacgggttgcgcaaagactttgacctggacatcatctccctgaaggaggaagggaccgaaaaaataggtatctggaattcgaactcaggcttgaacatgacggacagtaataaggacaaatcttcaaatatcacggactcactcgccaaccgtactttaatcgtgaccacaattctcgaggaaccgtacgttatgtataggaaaagtgacaaaccattatacggtaacgatcgtttcgagggatactgtttagacctgctcaaggaactctccaatattttgggatttatctacgatgtaaaactggtccccgacggtaaatacggcgctcagaatgacaagggagaatggaatggtatggtcaaagaactaatcgatcatagggctgatctggcagtggctcctcttaccattacttacgtccgcgagaaggttatagatttctcgaagccctttatgactctagggatctcaattctctataggaagccaaacgggacaaacccgggtgtcttctcgttccttaatcccctctctccagacatatggatgtatgtgctgctcgcgtgtctgggggtttcctgcgtgctcttcgttatcgctaggtttacgccatacgaatggtacaatccccacccatgtaatccagattctgacgttgtggagaataatttcactctgctgaattcattttggttcggagtgggggcactgatgcagcaaggctccgagttaatgccaaaagctctgtccacccggatagtgggaggaatttggtggttctttacgctaattataatcagcagctacaccgccaacctggccgcattccttacagtggagcggatggaaagccccatcgatagcgcagatgacctcgccaaacagactaagattgaatatggtgccgtccgggacggctccacaatgactttttttaaaaagtcaaaaattagtacttacgaaaagatgtgggcattcatgagttctcgtcagcagacagctcttgttcgaaattccgatgagggcattcagagagttctgacgactgactacgctctgctgatggagagtacttctattgagtacgtgacccagagaaactgcaatctgactcagataggcggcctcatcgactcaaaaggttatggggtgggaacaccaatcggtagcccttatcgagacaaaattaccatagccattctgcaactccaggaggaggggaagctgcatatgatgaaagaaaagtggtggcgcggaaacggttgccccgaggaggacaataaagaggccagtgccctgggtgtggaaaatatcggtggcatcttcattgtgctggccgccggcctcgttctcagcgtgtttgtggcaattggagaattcatttataagagccgaaagaataatgatatcgaacaggccttctgctttttctacggcctccagtgcaagcagacacacccgacgaacagcaccagcggcactacacttagtactgacttagagtgcggtaagctcatccgcgaggaaagggggatccgaaagcagtcaagtgtccatacagtttag

SEQ ID NO: 277097 - DNA, 2712 bp, Artificial Sequence
  derived and/or modified sequence
atggaacacggaactcttctggcccagcccggtctgtggacccgagatacttcctgggcgctcctgtacttcttgtgctacatcttacctcagactgcaccacaggtgttgcgcattggcggaatctttgagactgtcgaaaatgagcccgttaacgtagaggaactggccttcaagttcgctgttacgagcattaatagaaacagaaccctgatgccgaacaccaccctgacttatgatatccaacggatcaacctgttcgacagctttgaggcaagtcggagggcctgcgatcagctcgctctgggggtcgccgctctctttggaccctcacatagcagtagcgtgagcgccgtccagtcgatttgtaatgctcttgaagtgccccatatccagacacgctggaaacatcctagcgtggacaataaggaccttttctacatcaacctgtatcctgactacgctgccatttctcgggcaattctggacctggttctgtattataactggaagacagttaccgtggtttatgaagactccacgggcctgatcagactccaggagctcattaaggccccatcacgatacaatatcaaaattaaaatccggcaattgccatctgggaataaggatgcaaagccactcctgaaagagatgaaaaagggaaaggagttctacgtaatcttcgactgctcacacgagacagccgcagagatattgaaacaaatcctgttcatggggatgatgacagaatattatcattatttcttcaccacccttgatctgtttgcgttagaccttgagctttatcggtattcaggggtaaatatgactggattcagactgctcaatatcgacaatccacacgtgtcaagcatcattgagaagtggagcatggagcggcttcaagctccaccaaggcctgagacagggctcctggacggcatgatgaccacagaggcagccctcatgtatgacgctgtgtatatggtggcaattgcctcccatcgggcttcacagctcactgtgtcctctctccagtgccacagacacaaaccttggaggctcggcccaagatttatgaatctgatcaaggaagccagatgggacggactgaccgggcatatcacattcaataagactaacggcctgaggaaagacttcgatctggatattattagcctaaaagaggagggcacagagaaaatcggtatatggaactccaactccgggcttaatatgacagactcgaataaagacaagagttctaacatcactgattccctcgccaatcgcacactcattgttacaacgatcctggaggaaccctacgttatgtataggaagtctgacaaaccactgtatggaaacgaccggttcgagggctattgtcttgatctgctgaaggagctcagcaatatcctggggtttatatatgacgtgaagctggtacccgacggcaaatatggcgctcagaatgacaaaggggaatggaacggcatggtaaaggagctcattgatcatagggcagatctcgcagtcgctcccctcactatcacttatgtccgcgagaaggtcatcgactttagcaagccatttatgacattggggatatctatcttgtatagaaagcctaacggaaccaatcctggggtgttctcgtttctgaatcccttgtctccagacatctggatgtacgtgctgttggcctgccttggcgttagctgcgtccttttcgtgatcgcgagattcactccatacgaatggtacaacccacatccttgtaatccagactcagatgtggtagagaataattttactctactgaactctttttggtttggagttggcgcactcatgcaacaaggttcagagctgatgcctaaagccctctctacacgtatcgtgggcggaatatggtggttctttacactgatcattattagcagctatactgcgaacttagcggcatttctgacagtcgagagaatggagagtcccatcgactccgcagacgacttggctaagcagactaaaatcgaatacggcgcagtcagggacggcagcactatgaccttctttaagaaaagcaagatctcaacctatgaaaagatgtgggcatttatgagttctcgccaacagacagccctcgtcaggaatagcgacgaggggatccaacgtgtcttgactaccgattatgccctgctgatggaatctacctctatcgaatacgttacccaaaggaactgtaatctgacacagatcggcggtcttatcgactcgaagggctatggcgtcggtacgccgatcggctctccttaccgtgacaagatcaccatagcaatcctgcaactgcaggaggaaggcaagctccatatgatgaaggaaaagtggtggagaggtaacgggtgccctgaggaggataacaaagaggcgagtgcgctcggtgttgaaaacattgggggaattttcatagtgctcgccgctggcctggtgctgtccgtgtttgttgcaattggcgagtttatctacaagagtaggaagaacaatgatatcgaacaggcgttttgtttcttctacggattacaatgtaagcagacccaccccactaactccacatccggcacgacgctgtctactgatttggagtgcggcaagttgattagagaggaaagagggatacggaagcaatcgagcgtccacaccgtttag

SEQ ID NO: 277098 - DNA, 2712 bp, Artificial Sequence
  derived and/or modified sequence
atggagcacggcaccctgctggcccagcccggcctgtggaccagagacaccagctgggccctgctgtacttcctgtgctacatcctgccccagaccgccccccaggtgctgagaatcggcggcatcttcgagaccgtggagaacgagcccgtgaacgtggaggagctggccttcaagttcgccgtgaccagcatcaacagaaacagaaccctgatgcccaacaccaccctgacctacgacatccagagaatcaacctgttcgacagcttcgaggccagcagaagagcctgcgaccagctggccctgggcgtggccgccctgttcggccccagccacagcagcagcgtgagcgccgtgcagagcatctgcaacgccctggaggtgccccacatccagaccagatggaagcaccccagcgtggacaacaaggacctgttctacatcaacctgtaccccgactacgccgccatcagcagagccatcctggacctggtgctgtactacaactggaagaccgtgaccgtggtgtacgaggacagcaccggcctgatcagactgcaggagctgatcaaggcccccagcagatacaacatcaagatcaagatcagacagctgcccagcggcaacaaggacgccaagcccctgctgaaggagatgaagaagggcaaggagttctacgtgatcttcgactgcagccacgagaccgccgccgagatcctgaagcagatcctgttcatgggcatgatgaccgagtactaccactacttcttcaccaccctggacctgttcgccctggacctggagctgtacagatacagcggcgtgaacatgaccggcttcagactgctgaacatcgacaacccccacgtgagcagcatcatcgagaagtggagcatggagagactgcaggccccccccagacccgagaccggcctgctggacggcatgatgaccaccgaggccgccctgatgtacgacgccgtgtacatggtggccatcgccagccacagagccagccagctgaccgtgagcagcctgcagtgccacagacacaagccctggagactgggccccagattcatgaacctgatcaaggaggccagatgggacggcctgaccggccacatcaccttcaacaagaccaacggcctgagaaaggacttcgacctggacatcatcagcctgaaggaggagggcaccgagaagatcggcatctggaacagcaacagcggcctgaacatgaccgacagcaacaaggacaagagcagcaacatcaccgacagcctggccaacagaaccctgatcgtgaccaccatcctggaggagccctacgtgatgtacagaaagagcgacaagcccctgtacggcaacgacagattcgagggctactgcctggacctgctgaaggagctgagcaacatcctgggcttcatctacgacgtgaagctggtgcccgacggcaagtacggcgcccagaacgacaagggcgagtggaacggcatggtgaaggagctgatcgaccacagagccgacctggccgtggcccccctgaccatcacctacgtgagagagaaggtgatcgacttcagcaagcccttcatgaccctgggcatcagcatcctgtacagaaagcccaacggcaccaaccccggcgtgttcagcttcctgaaccccctgagccccgacatctggatgtacgtgctgctggcctgcctgggcgtgagctgcgtgctgttcgtgatcgccagattcaccccctacgagtggtacaacccccacccctgcaaccccgacagcgacgtggtggagaacaacttcaccctgctgaacagcttctggttcggcgtgggcgccctgatgcagcagggcagcgagctgatgcccaaggccctgagcaccagaatcgtgggcggcatctggtggttcttcaccctgatcatcatcagcagctacaccgccaacctggccgccttcctgaccgtggagagaatggagagccccatcgacagcgccgacgacctggccaagcagaccaagatcgagtacggcgccgtgagagacggcagcaccatgaccttcttcaagaagagcaagatcagcacctacgagaagatgtgggccttcatgagcagcagacagcagaccgccctggtgagaaacagcgacgagggcatccagagagtgctgaccaccgactacgccctgctgatggagagcaccagcatcgagtacgtgacccagagaaactgcaacctgacccagatcggcggcctgatcgacagcaagggctacggcgtgggcacccccatcggcagcccctacagagacaagatcaccatcgccatcctgcagctgcaggaggagggcaagctgcacatgatgaaggagaagtggtggagaggcaacggctgccccgaggaggacaacaaggaggccagcgccctgggcgtggagaacatcggcggcatcttcatcgtgctggccgccggcctggtgctgagcgtgttcgtggccatcggcgagttcatctacaagagcagaaagaacaacgacatcgagcaggccttctgcttcttctacggcctgcagtgcaagcagacccaccccaccaacagcaccagcggcaccaccctgagcaccgacctggagtgcggcaagctgatcagagaggagagaggcatcagaaagcagagcagcgtgcacaccgtgtag

SEQ ID NO: 277099 - DNA, 5706 bp, Artificial Sequence
  derived and/or modified sequence
acgagagggcgcagcgcggcgcggcagggattcgcgggcgaccacccggcgcaggagcggccgcgtttcggcctcagaatccattgaagacttgaacaagtgggccctatttcttgtgtctccttttatacttgaagcagaacacatagcatttgtgacggagagcatttgggtacaaagtgagaatttacagagatcatcctcttcagaaacagttcggtttttgcccactagggatgatgtggtttctcatgaggttacttgctctaaaggactttatattttggaaccataagagcacccttgtggcccaggcactttatggatgatcccttttagtgctcccagtaaccttccaagattgtcaagtggtcagactgttgtttgccattagcttgcagacctggggatccttatcggctaattgctgaagcaagtgtggacaacttcagcaagctgggggtggcgttcatggaagatagactccacatggataatggactggtaccccaaaagattgtgtcggtgcacttgcaggactccactctgaaggaagttaaggatcaggtctcaaacaagcaagcccagatcctagagccgaagcctgaaccttctcttgagattaagcctgagcaggacggtatggagcatgttggcagagatgacccaaaggctcttggtgaagaacccaaacaaaggagaggcagtgcctctgggagtgagcctgctggggacagtgacaggggagggggccccgttgagcattatcacctccatctgtctagttgccacgagtgtctggaacttgagaacagcaccattgagtcagtcaagtttgcgtctgccgagaacattccagaccttccctacgattatagcagcagtttggagagtgttgctgatgagacctcccccgaaagagaagggaggagagtcaacctcacgggaaaggcacccaacatcctcctctatgtgggctccgactcccaggaagccctcggccggttccacgaggtccggtctgtgctggccgactgtgtggacattgacagttatattctctaccacctgctggaggacagtgctctcagagacccgtggacggacaactgtctgctgttggtcattgctaccagggagtccattcccgaagacctgtaccagaagttcatggcctatctttctcagggagggaaggtgttgggcctgtcttcatccttcacctttggtggctttcaggtgacaagcaagggtgcactgcacaagacagtccagaacttggttttctccaaggctgaccagagcgaggtgaagctcagcgtcttgagcagtggctgcaggtaccaggaaggccccgtccggctcagccccggcaggctccagggccacctggagaatgaggacaaggacaggatgattgtgcatgtgccttttggaactcgcgggggagaagctgttctttgccaggtgcacttagaactacctcccagctccaacatagtgcaaactccagaagattttaacttgctcaagtcaagcaattttagaagatacgaagtccttagagagattctgacaacccttggcctcagctgtgacatgaaacaagttcctgccttaactcctctttacttgctgtcagctgcggaggaaatcagggatcctcttatgcagtggcttgggaaacatgtggactccgagggagaaataaaatccggccagctctctcttagatttgtttcatcctacgtgtctgaagtagaaataaccccatcttgtatacctgtggtgaccaacatggaggccttctcatcagaacatttcaacttagagatctatcgccaaaatctgcagaccaagcagttggggaaagtaattttgtttgccgaagtgacccccacaacgatgcgtctcctggatgggctgatgtttcagacaccgcaggaaatgggcttaatagtgatcgcggcccggcagaccgagggcaaaggacggggagggaatgtgtggctgagccctgtgggatgtgctctttctactctgctcatctccattccactgagatcccagctgggacagaggatcccgtttgtccagcatctgatgtccgtggctgtcgtggaagcagtgaggtccattcccgagtatcaggatatcaacttacgagtgaagtggcccaacgatatttattacagtgacctcatgaagatcggcggagttctggttaactcaacactcatgggagaaacattttatatacttattggctgtggatttaatgtgactaacagtaaccctaccatctgcatcaacgacctcatcacagaatacaataaacaacacaaggcagaactgaagcccttaagagccgattatctcatcgccagagtcgtgactgtgctggagaaactgatcaaagagtttcaggacaaagggcccaacagcgtccttcccctttattaccgatactgggtccacagtggtcagcaagtccatctgggcagcgcagagggaccaaaggtgtccatcgttggcctggacgattctggcttcctccaggttcaccaggagggcggcgaggttgtgactgtgcacccggacggcaactccttcgacatgctgagaaacctcatcctccccaaacggcggtaatgccgggcgtccccgagacgcggctgcctgtccgtgcccatgcatctggaaatctaatttagagttgtaggtgaattttcttttcctccaattcatttgttaagtctttgttctttttctgtgtttctgtttgtttttaggtttgttttgttgtcgttttctttggtgtttgaagaggctctgggatagatggttaagaagtagaaaatttagtttagggaaagccctcccacaggtgggaaattgctctcccctctgtggcttggacttacgtttattgtcaaggggagtttttacatggaaatgacaatgggaaaattcagatattttcttagtagtgcagacctttacccctagtctatgaaaaaacaaaccaaaatatgctcttgcgcccaggccagtggtgagttagaggtatgctatcactgtttgtaagcatctggggaggtactgaactgtaagaacatgcttggacacttagtcattgttctgtgtttttattaatgaagaaaagggaagacagacttccaagagttactgtccacccggtggtgtggccccatagcgaagtctaaatgcctgtagagatagagctagctggtgtggttgcagtgaccttgtagaggaaatcagttcattactttgacatcattcagtgagctctcctttcctaaggaagtttaaatgtccttagttagggactgactttcttaagtaagtttaaatttactacatattgtgaagagacaggatcaagttcagaatccttaaatgtctgattaggcatcacttggatgaggaggtgggcgatttggctctgacagctggagatgaaggcacactcataccacatacaagggaggatttggagcttttaagccagtttcagatttactctgaaatgtggagcattcctgcaagactgtgcagctcacggaatatagaagacatggcattttactcagaagtcataagtttttgcccccctcatttacctcgtattaccaagaaagaaaatgttatcgatactaaacaccatcagttcagagggaggatgtgtgtgtgtgcccgcatatgtgtgtgcgtgcgtgtgtgcgcacatagctttaaaagaagacattcaaaatttgatgtgctacaagcctcatgaaagaacaaaagaaatgaagccttttgatatgcattcgctattcccagatgtacgccatgccttttccatgtccctcctatctctgttgaacttatgaatcatactcattacttttcagctttttaaaaggccaatttttgtccagttttctctcttccagtcccagctgaaattagtggaaagaaagtttgatggagctttcagctttgaacaaaatcccttcattgtaaactagcaccatctttatccaggtcttacccagtcaggctaattccagaaacttgtggtttttagtatagtctgtctacctttagccaggcacaggacagccctatgaaaaaatacccaatatatattttttggaaatgaaacattaaaagaacttaaaaagtaatttttggaaatgaggcttcaattagaattatttttctcaaaaaacaaacaaacaaaaaacacaaaaaaaaccactcttctccaaatgcccaagccttctttcaaaattagttagaaacttaagtaaaatacaagtccacaccatccccaaattacaaaatggacttacccttgagagggcatctgcagaatatcatcagggacaaagatctcgaggctaacgatgtaggtttcatttctcagactttgtaatataaggcaagccctctctcagagctgccatcatcactttttgaatttctttgggggttatttaatgaaaaacatgctatgttttgttttaagctgaagtcctattctggacactctgctttgggaaaaaatgttatcatttaatttcctttctgcaaattaaaactaatgaagtgtggccttgtcaaaggctatggagatgttccgggcatactgctgtgctctgtgctttccagcaggcgctcctccctcacgcaggagactcagttgtcctgagagagatgaagcagccttgaagcagatgctgcgttttccataaacctgattttgcctcacatgaaccaaagactctcaaaactccgcttctatagaattagctgaataaaggcattttactgatagctgttcgtgttagcgaaacctgtctacctgctatagcacactctccgatttgggccatttatgcaccccgcaacctgggatctcaaggagctttaaagtcttaatgggaacttggcattttcctgatgatctttaaaatgtggtcactaaactcaggattggcgtgtgcttttagaacactggagtagcccttgttttagaggctgtgcattgagtatcgaccgtattttgtaaaaggcaagatatcctcccttccaggctggtaacgggtttcaaggggactcttgaggaagtgccccctaaaatagaacacagcaataactgggcttcctgtccccacccccaccccagcagtgctctctggcactgggaactctgctagggagtggtggaagtaggaaggatttgtgtgcaaaggaaaatcgtggttgagtttcactgcagcaggctgacgttgcctgatgtgagagcaagtggccgactggggtgcgggtgcacaggtcgggggagcacaggccacagagcgcagcctctgggggtcccccaaggcacagcatatacagcatggtcgccccttgccctggagtctgggaacaaagagaggagccagcctccccgcactgcttcagatggaaaagggaggcagggtgggcttccgttctccagatctgtttgctcttaacaggcagaacatgggagaatccttattcctggttaatcactatgcatatttgaaataaaagaaagcgtaagcctctgcaattttaacttctcaaaggatgtctctgaaaagaatcactttaaaccaatgcctataaaaagcaagtctaccaaaataaactaagactttctatgtg

SEQ ID NO: 277100 - DNA, 6466 bp, Artificial Sequence
  derived and/or modified sequence
ggccgcgtcttctgcgtcagcgacagccagtccattgaagacttgaacaagtgggccctatttcttgtgtctccttttatacttgaagcagaacacatagcatttgtgacggagagcatttgggtacaaagtgagaatttacagagatcatcctcttcagaaacaacggagtgtcgttctgtcgtccaggctggagtgcagtggtgtggtctcggctcaccacaacctctgcctactgggttccagtgattctcctgcctcagcatcccgagtagctgggactacaggtgcacgctaccatgcccggctaatttttgtatttttagtagaggcgggggtttcaccatgccatccaggctggtttcgaactcctgacctcgtgatccacctgtctcggcctcccaaagtgctgggattacaggtgtgagccaccgcgcctggccctgtattttcaaattctttacctctgcgtttccagccttgctccatccaatttgttactagagctttttaacaatttcacgttgaattaagatgatttggaagaggagaaacaagagtcagaaaaattagcagcatccgtgatctgactctgggtaccagtgggttgttgagatttctgttccccactcactgcagagctgctgcctgccaatgccccctgttgggcagggccacctgtgctagtttaacctggggtctttcactcccggactgcttcttggatgtgagttttaagttgagcagagaagatatgccttgcctgctgccatacattgtaacatcaagtcaagagctttagttacttaacagatttctgctggctgctattataggaggaaactcctttgtttagggacagccagggcttccttagctttgatctttgggagtgagccttttgcttgacttcccttctcttttccatgcctttgtttccatctcgaagtgcaaatttaaagtgtcctgtttgcctttatccactggaaggcaaacaccctggacgacgtatcagtgacagcgcggttctgctttgatcggagcacccagcgctgcttgaaggcgtttgcatggtccatggctcatggaccacgctcctagaaaacggaaatgcacttagattgtcaagtggtcagactgttgtttgccattagcttgcagacctggggatccttatcggctaattgctgaagcaagtgtggacaacttcagcaagctgggggtggcgttcatggaagatagactccacatggataatggactggtaccccaaaagattgtgtcggtgcacttgcaggactccactctgaaggaagttaaggatcaggtctcaaacaagcaagcccagatcctagagccgaagcctgaaccttctcttgagattaagcctgagcaggacggtatggagcatgttggcagagatgacccaaaggctcttggtgaagaacccaaacaaaggagaggcagtgcctctgggagtgagcctgctggggacagtgacaggggagggggccccgttgagcattatcacctccatctgtctagttgccacgagtgtctggaacttgagaacagcaccattgagtcagtcaagtttgcgtctgccgagaacattccagaccttccctacgattatagcagcagtttggagagtgttgctgatgagacctcccccgaaagagaagggaggagagtcaacctcacgggaaaggcacccaacatcctcctctatgtgggctccgactcccaggaagccctcggccggttccacgaggtccggtctgtgctggccgactgtgtggacattgacagttatattctctaccacctgctggaggacagtgctctcagagacccgtggacggacaactgtctgctgttggtcattgctaccagggagtccattcccgaagacctgtaccagaagttcatggcctatctttctcagggagggaaggtgttgggcctgtcttcatccttcacctttggtggctttcaggtgacaagcaagggtgcactgcacaagacagtccagaacttggttttctccaaggctgaccagagcgaggtgaagctcagcgtcttgagcagtggctgcaggtaccaggaaggccccgtccggctcagccccggcaggctccagggccacctggagaatgaggacaaggacaggatgattgtgcatgtgccttttggaactcgcgggggagaagctgttctttgccaggtgcacttagaactacctcccagctccaacatagtgcaaactccagaagattttaacttgctcaagtcaagcaattttagaagatacgaagtccttagagagattctgacaacccttggcctcagctgtgacatgaaacaagttcctgccttaactcctctttacttgctgtcagctgcggaggaaatcagggatcctcttatgcagtggcttgggaaacatgtggactccgagggagaaataaaatccggccagctctctcttagatttgtttcatcctacgtgtctgaagtagaaataaccccatcttgtatacctgtggtgaccaacatggaggccttctcatcagaacatttcaacttagagatctatcgccaaaatctgcagaccaagcagttggggaaagtaattttgtttgccgaagtgacccccacaacgatgcgtctcctggatgggctgatgtttcagacaccgcaggaaatgggcttaatagtgatcgcggcccggcagaccgagggcaaaggacggggagggaatgtgtggctgagccctgtgggatgtgctctttctactctgctcatctccattccactgagatcccagctgggacagaggatcccgtttgtccagcatctgatgtccgtggctgtcgtggaagcagtgaggtccattcccgagtatcaggatatcaacttacgagtgaagtggcccaacgatatttattacagtgacctcatgaagatcggcggagttctggttaactcaacactcatgggagaaacattttatatacttattggctgtggatttaatgtgactaacagtaaccctaccatctgcatcaacgacctcatcacagaatacaataaacaacacaaggcagaactgaagcccttaagagccgattatctcatcgccagagtcgtgactgtgctggagaaactgatcaaagagtttcaggacaaagggcccaacagcgtccttcccctttattaccgatactgggtccacagtggtcagcaagtccatctgggcagcgcagagggaccaaaggtgtccatcgttggcctggacgattctggcttcctccaggttcaccaggagggcggcgaggttgtgactgtgcacccggacggcaactccttcgacatgctgagaaacctcatcctccccaaacggcggtaatgccgggcgtccccgagacgcggctgcctgtccgtgcccatgcatctggaaatctaatttagagttgtaggtgaattttcttttcctccaattcatttgttaagtctttgttctttttctgtgtttctgtttgtttttaggtttgttttgttgtcgttttctttggtgtttgaagaggctctgggatagatggttaagaagtagaaaatttagtttagggaaagccctcccacaggtgggaaattgctctcccctctgtggcttggacttacgtttattgtcaaggggagtttttacatggaaatgacaatgggaaaattcagatattttcttagtagtgcagacctttacccctagtctatgaaaaaacaaaccaaaatatgctcttgcgcccaggccagtggtgagttagaggtatgctatcactgtttgtaagcatctggggaggtactgaactgtaagaacatgcttggacacttagtcattgttctgtgtttttattaatgaagaaaagggaagacagacttccaagagttactgtccacccggtggtgtggccccatagcgaagtctaaatgcctgtagagatagagctagctggtgtggttgcagtgaccttgtagaggaaatcagttcattactttgacatcattcagtgagctctcctttcctaaggaagtttaaatgtccttagttagggactgactttcttaagtaagtttaaatttactacatattgtgaagagacaggatcaagttcagaatccttaaatgtctgattaggcatcacttggatgaggaggtgggcgatttggctctgacagctggagatgaaggcacactcataccacatacaagggaggatttggagcttttaagccagtttcagatttactctgaaatgtggagcattcctgcaagactgtgcagctcacggaatatagaagacatggcattttactcagaagtcataagtttttgcccccctcatttacctcgtattaccaagaaagaaaatgttatcgatactaaacaccatcagttcagagggaggatgtgtgtgtgtgcccgcatatgtgtgtgcgtgcgtgtgtgcgcacatagctttaaaagaagacattcaaaatttgatgtgctacaagcctcatgaaagaacaaaagaaatgaagccttttgatatgcattcgctattcccagatgtacgccatgccttttccatgtccctcctatctctgttgaacttatgaatcatactcattacttttcagctttttaaaaggccaatttttgtccagttttctctcttccagtcccagctgaaattagtggaaagaaagtttgatggagctttcagctttgaacaaaatcccttcattgtaaactagcaccatctttatccaggtcttacccagtcaggctaattccagaaacttgtggtttttagtatagtctgtctacctttagccaggcacaggacagccctatgaaaaaatacccaatatatattttttggaaatgaaacattaaaagaacttaaaaagtaatttttggaaatgaggcttcaattagaattatttttctcaaaaaacaaacaaacaaaaaacacaaaaaaaaccactcttctccaaatgcccaagccttctttcaaaattagttagaaacttaagtaaaatacaagtccacaccatccccaaattacaaaatggacttacccttgagagggcatctgcagaatatcatcagggacaaagatctcgaggctaacgatgtaggtttcatttctcagactttgtaatataaggcaagccctctctcagagctgccatcatcactttttgaatttctttgggggttatttaatgaaaaacatgctatgttttgttttaagctgaagtcctattctggacactctgctttgggaaaaaatgttatcatttaatttcctttctgcaaattaaaactaatgaagtgtggccttgtcaaaggctatggagatgttccgggcatactgctgtgctctgtgctttccagcaggcgctcctccctcacgcaggagactcagttgtcctgagagagatgaagcagccttgaagcagatgctgcgttttccataaacctgattttgcctcacatgaaccaaagactctcaaaactccgcttctatagaattagctgaataaaggcattttactgatagctgttcgtgttagcgaaacctgtctacctgctatagcacactctccgatttgggccatttatgcaccccgcaacctgggatctcaaggagctttaaagtcttaatgggaacttggcattttcctgatgatctttaaaatgtggtcactaaactcaggattggcgtgtgcttttagaacactggagtagcccttgttttagaggctgtgcattgagtatcgaccgtattttgtaaaaggcaagatatcctcccttccaggctggtaacgggtttcaaggggactcttgaggaagtgccccctaaaatagaacacagcaataactgggcttcctgtccccacccccaccccagcagtgctctctggcactgggaactctgctagggagtggtggaagtaggaaggatttgtgtgcaaaggaaaatcgtggttgagtttcactgcagcaggctgacgttgcctgatgtgagagcaagtggccgactggggtgcgggtgcacaggtcgggggagcacaggccacagagcgcagcctctgggggtcccccaaggcacagcatatacagcatggtcgccccttgccctggagtctgggaacaaagagaggagccagcctccccgcactgcttcagatggaaaagggaggcagggtgggcttccgttctccagatctgtttgctcttaacaggcagaacatgggagaatccttattcctggttaatcactatgcatatttgaaataaaagaaagcgtaagcctctgcaattttaacttctcaaaggatgtctctgaaaagaatcactttaaaccaatgcctataaaaagcaagtctaccaaaataaactaagactttctatgtg

SEQ ID NO: 277101 - protein, 87 aa, Artificial Sequence
  derived and/or modified sequence
MEDRLHMDNGLVPQKIVSVHLQDSTLKEVKDQVSNKQAQILEPKPEPSLEIKPEQDGMEHVGRDDPKALGEEPKQRRGSASGSEPAG

SEQ ID NO: 277102 - protein, 77 aa, Artificial Sequence
  derived and/or modified sequence
MEDRLHMDNGLVPQKIVSVHLQDSTLKEVKDQVSNKQAQILEPKPEPSLEIKPEQDGMEHVGRDDPKALGEEPKQRR

SEQ ID NO: 277103 - protein, 92 aa, Artificial Sequence
  derived and/or modified sequence
MEDRLHMDNGLVPQKIVSVHLQDSTLKEVKDQVSNKQAQILEPKPEPSLEIKPEQDGMEHVGRDDPKALGEEPKQRRGSASGSEPAGDSDRG

SEQ ID NO: 277104 - protein, 662 aa, Artificial Sequence
  derived and/or modified sequence
MVVSEVDIAKADPAAASHPLLLNGDATVAQKNPGSVAENNLCSQYEEKVRPCIDLIDSLRALGVEQDLALPAIAVIGDQSSGKSSVLEALSGVALPRGSGIVTRCPLVLKLKKLVNEDKWRGKVSYQDYEIEISDASEVEKEINKAQNAIAGEGMGISHELITLEISSRDVPDLTLIDLPGITRVAVGNQPADIGYKIKTLIKKYIQRQETISLVVVPSNVDIATTEALSMAQEVDPEGDRTIGILTKPDLVDKGTEDKVVDVVRNLVFHLKKGYMIVKCRGQQEIQDQLSLSEALQREKIFFENHPYFRDLLEEGKATVPCLAEKLTSELITHICKSLPLLENQIKETHQRITEELQKYGVDIPEDENEKMFFLIDKVNAFNQDITALMQGEETVGEEDIRLFTRLRHEFHKWSTIIENNFQEGHKILSRKIQKFENQYRGRELPGFVNYRTFETIVKQQIKALEEPAVDMLHTVTDMVRLAFTDVSIKNFEEFFNLHRTAKSKIEDIRAEQEREGEKLIRLHFQMEQIVYCQDQVYRGALQKVREKELEEEKKKKSWDFGAFQSSSATDSSMEEIFQHLMAYHQEASKRISSHIPLIIQFFMLQTYGQQLQKAMLQLLQDKDTYSWLLKERSDTSDKRKFLKERLARLTQARRRLAQFPG

SEQ ID NO: 277105 - protein, 201 aa, Artificial Sequence
  derived and/or modified sequence
MVVSEVDIAKADPAAASHPLLLNGDATVAQKNPGSVAENNLCSQYEEKVRPCIDLIDSLRALGVEQDLALPAIAVIGDQSSGKSSVLEALSGVALPRGSGIVTRCPLVLKLKKLVNEDKWRGKVSYQDYEIEISDASEVEKEINKAQNAIAGEGMGISHELITLEISSRDVPDLTLIDLPGITRVAVGNQPADIGYKIKTL

SEQ ID NO: 277106 - protein, 26 aa, Artificial Sequence
  derived and/or modified sequence
MVVSEVDIAKADPAAASHPLLLNGDA

SEQ ID NO: 277107 - protein, 35 aa, Artificial Sequence
  derived and/or modified sequence
MVVSEVDIAKADPAAASHPLLLNGDATVAQKNPGS

SEQ ID NO: 277108 - protein, 77 aa, Artificial Sequence
  derived and/or modified sequence
MVVSEVDIAKADPAAASHPLLLNGDATVAQKNPGSVAENNLCSQYEEKVRPCIDLIDSLRALGVEQDLALPAIAVIG

SEQ ID NO: 277109 - DNA, 1989 bp, Artificial Sequence
  derived and/or modified sequence
atggtggtgtcagaggtggacatcgctaaggccgacccggcggccgccagccatcctctgctgctgaacggtgacgctactgttgcacagaaaaatcctggatctgtggctgagaataatctgtgcagccaatacgaagagaaagtacgcccttgtattgatcttatcgattccctgcgggccctgggcgttgagcaggacttagcactcccggctatcgctgtcatcggcgaccaatcatctggaaaaagcagtgtgcttgaagctctgagcggtgtcgctctgccacgtggaagcgggattgtcacccggtgccccttggtgttaaaactgaagaaattagtgaatgaggacaagtggagaggtaaggtgagctatcaggattatgaaatcgagatctccgacgcatcggaggtcgagaaggagataaataaagctcaaaatgccatcgcgggcgaaggcatggggatttctcatgaactcataaccctggagatttccagccgcgatgtgccagacctgacgcttattgacctgccgggcatcacccgggtcgccgtgggcaaccagccggccgacattgggtacaagatcaaaacactgatcaagaaatacattcagaggcaggagacaattagcctcgtggtcgtgcccagcaacgtcgatatagccactacagaggcgctgtctatggcccaagaagtggacccggaaggcgatagaactatcggaattttgactaagcccgatctggttgataagggcaccgaagacaaagtcgtggacgtagtcaggaatttagtttttcatctgaagaaagggtatatgattgttaagtgtcgagggcagcaagaaatacaagatcagctctctctgagtgaggctctgcagcgcgagaagattttcttcgagaaccatccgtactttcgagaccttctggaggaaggaaaagcaaccgttccctgcctggctgaaaagcttacctccgagcttatcactcacatctgtaaatccctcccattattggagaaccaaattaaggagacccatcagcgcattaccgaggagctgcagaagtatggagtagacatcccagaggatgagaatgagaagatgttctttttaatagacaaagtgaacgcgtttaatcaggatataacagctctgatgcaaggcgaagagactgttggcgaggaagacatcaggctttttacgagacttcgccatgagttccacaagtggtccactattatcgagaacaacttccaggagggtcacaagatcctcagcagaaaaatacagaaattcgagaaccagtatcggggaagggaactgccagggttcgttaactatcgcacctttgagactattgtgaagcagcaaattaaggccctggaggagccggcagtggacatgctgcatacagtaaccgatatggtgcggcttgcatttactgacgtttccatcaagaattttgaagaattcttcaaccttcaccggactgctaagtccaagatcgaagatatccgcgccgagcaggaacgagaaggggaaaagctgattagattgcactttcagatggagcagatcgtatattgccaggaccaggtgtatcgaggagccctccagaaggtcagggaaaaagagttagaggaggaaaaaaagaagaagagttgggacttcggagcattccagtcctcttctgccacagatagctctatggaggagattttccagcatcttatggcctaccatcaagaggccagcaagagaatttccagccacatcccactgattatccaattctttatgcttcagacatatggtcagcagctccagaaagcgatgctgcagcttctgcaggataaggatacctattcctggttgctgaaagaacggagcgacacgagcgataagcgtaagttcctaaaggagaggctagctcgactgacgcaggcccgtcgacgactggctcaattccctggatag

SEQ ID NO: 277110 - DNA, 1989 bp, Artificial Sequence
  derived and/or modified sequence
atggtggtgagcgaagtagatatcgcaaaagccgacccagcagccgcttctcatccattgctgctcaacggggatgctacagtcgctcagaagaacccagggtccgtcgcagagaataacctgtgttcacaatacgaagagaaggtgcgcccttgcattgacctcattgattcacttagagcactgggagtcgagcaggatctggcactgcctgccatcgccgttattggggaccaaagtagcggcaagtctagtgtgttggaggctcttagcggagtggccctgcctcgcgggtccggcattgtcacgcggtgccccttagtattgaaactcaagaaacttgtaaacgaagataaatggcgcggtaaagtgagttatcaggattatgagatcgagatctccgatgcaagcgaggtcgaaaaggagattaataaagcacagaatgcaattgctggggagggtatgggtatctctcatgagctcatcactcttgagatcagctctagagatgtgcccgatctaaccctgatagacttacccgggattaccagggtcgccgtggggaatcagccagctgacattgggtacaagattaagacactcatcaaaaaatacatacagcggcaggagactatttctctcgtggtcgttcctagcaatgttgatattgctactactgaggccctgtccatggcacaggaggtggacccagaaggggatcggaccatcggcattctgacgaaaccagacctggttgacaaaggtaccgaagataaggtcgtcgacgttgtaagaaaccttgtttttcacctaaaaaaaggctatatgattgtgaagtgtagggggcagcaagagatacaagatcagctgtccctgagtgaagccttacagcgtgagaaaattttttttgagaaccacccttacttcagagatctcctcgaggagggtaaggcgaccgttccatgcttagccgagaaactgacctctgagcttatcacccatatatgtaagagcctgccgttacttgagaaccagatcaaagagacccaccaaaggatcaccgaggagttgcagaaatacggggtggatattccagaagatgaaaacgaaaagatgtttttcctgatcgacaaagtaaacgcatttaaccaagacatcaccgcactgatgcagggagaagaaacagtgggcgaggaagatatccgcctgtttacgaggctgcggcacgagtttcataagtggtctactattatcgaaaataactttcaggagggtcacaagatcttatctagaaagattcagaagtttgaaaaccaataccgaggcagggagctacctgggttcgtgaattaccggacgtttgaaactatcgttaagcaacagattaaggccctcgaagaaccggctgttgacatgctccacaccgtgacagacatggtgcgactcgcctttaccgacgtgtccatcaagaattttgaagaattttttaacctccaccggaccgctaaatcgaagatagaagacattagggccgaacaagaacgagagggggaaaaactcattcgactacactttcaaatggagcagattgtgtactgtcaggaccaagtgtatcgcggggcgttgcagaaggtgcgagagaaagagttggaggaggagaagaagaagaaaagctgggacttcggggcatttcaatcttccagtgcaacggatagctccatggaggagattttccagcacttaatggcataccatcaagaagcctcaaaacgcattagcagccacatccctctgatcatccagtttttcatgttgcagacatatggacagcagcttcagaaagctatgctgcagttgttgcaggacaaagatacttatagttggctgttgaaggagcgctccgacaccagcgataaaagaaagttcttgaaggagagattggcgagacttacacaggcccgtagacgccttgctcagtttcccgggtag

SEQ ID NO: 277111 - DNA, 81 bp, Artificial Sequence
  derived and/or modified sequence
atggttgtctctgaggtggatatagcgaaagccgaccctgctgcagccagtcacccactcttgttgaacggcgatgcgtag

SEQ ID NO: 277112 - DNA, 108 bp, Artificial Sequence
  derived and/or modified sequence
atggtagtcagcgaagttgatatcgccaaggccgaccccgcagcggcctcccaccctctgttgttgaatggagacgctactgttgctcaaaagaatccaggttcatag

SEQ ID NO: 277113 - DNA, 1989 bp, Artificial Sequence
  derived and/or modified sequence
atggtggtatccgaagtggatatcgcaaaagccgacccggcagcagcatcacatccgctgctcctgaatggtgacgcgacagtggcgcagaagaaccccggaagcgttgctgaaaacaatctgtgcagtcaatacgaagagaaagttcggccatgtattgatttgatcgactccctacgtgccctgggggtcgagcaggatcttgccctgccagctatcgcggtgatcggcgaccagagcagcgggaagagctcagtgctggaagcactgtctggagtcgctcttcctagaggcagtggaattgttacaaggtgcccccttgtgttgaagctgaaaaagcttgtaaacgaagataaatggcgcggcaaggtgtcttatcaggactatgaaattgagatttccgatgctagcgaagttgagaaggagattaacaaggctcaaaatgctatagctggtgaaggcatgggaatttcgcatgagctgattacactggagatcagcagcagggatgttcccgatctgactctgatcgatttgcctggcataactagggtcgccgtcggaaatcagccggctgacatcggatacaagataaagactcttatcaaaaaatacattcaacgacaggaaacaatcagcttagtcgtggtgccatctaacgtcgacatagccactacggaggccctgtctatggcccaggaagttgatcctgagggagaccgcactattggcatccttacaaagcctgatctggttgacaagggtactgaagataaggtggttgatgtcgttaggaatcttgtttttcaccttaagaaaggctacatgattgtgaaatgcaggggacaacaagaaatccaggaccagctttctctgagtgaagctttgcagcgtgagaagatcttctttgagaatcacccttattttagagatctcttggaagaaggaaaggcaacagtgccctgcctggcggagaaacttacctccgaactaatcacacacatatgtaagagccttcctctcttagaaaaccagatcaaagaaacacaccagcgtattacagaagagctccagaaatacggggtggacattcctgaagacgaaaatgagaaaatgttctttctcattgacaaggtgaacgcatttaaccaggacataacagctctaatgcagggcgaggaaacagtgggcgaagaagatatcaggctgttcacaagactacgacatgaattccacaaatggtctacaataatcgaaaataatttccaagaagggcacaaaatcttgagtaggaaaatccagaagttcgaaaaccagtacagaggacgggaactaccagggttcgtcaattaccgaacatttgagacaatcgttaaacagcaaataaaagccctggaagaacccgcagtggatatgctccatacagtcaccgatatggtgagactggcctttacggacgtgagtattaaaaactttgaggagttcttcaaccttcatcgaaccgccaaaagtaagattgaagatattagggccgagcaagaaagggaaggcgagaagcttataaggttgcacttccagatggagcagattgtttactgtcaagaccaggtataccgaggcgccctgcagaaggttagggagaaagagctcgaagaggaaaagaaaaagaagtcttgggacttcggagcgtttcagtcatcttccgccaccgactcaagcatggaagaaatatttcagcatctgatggcttatcaccaggaagctagtaagcgcatctcgtcgcacattcccctcatcatccaattcttcatgctgcaaacctatggccaacaacttcagaaggctatgctgcagttgctacaggacaaagacacgtacagttggcttctgaaggaaagatctgacacgagcgacaaacgcaagttcctgaaggagagattagccagattgactcaggcacggcgacgcctcgcccagttccccggttag

SEQ ID NO: 277114 - DNA, 1989 bp, Artificial Sequence
  derived and/or modified sequence
atggtggtgtctgaggtggacatcgccaaggctgaccctgctgctgccagccaccccctgctgctgaatggagatgccaccgtggcccagaagaaccctggctctgtggccgagaacaacctgtgcagccagtatgaggagaaggtgcggccctgcatcgacctgattgacagcctgcgggccctgggcgtggagcaggacctggccctgcctgccatcgccgtcatcggggaccagagcagcggcaagagctctgtgctggaggccctgtctggagtggccctgccccggggcagcggcatcgtgacccgctgccccctggtgctgaagctgaagaagctggtgaatgaagacaagtggaggggcaaggtgtcctaccaggactatgaaattgagatcagtgatgccagcgaggtggagaaggagatcaacaaggcccagaatgccatcgccggggagggcatgggcatcagccatgagctgatcaccctggagatcagcagcagagatgtgcctgacctgaccctgattgacctgcccggcatcaccagggtggccgtgggcaaccagcctgctgacatcggctacaagatcaagaccctcatcaagaagtacatccagaggcaggagaccatcagcctggtggtggtgcccagcaatgtggacatcgccaccacagaggccctgtccatggcccaggaggtggaccctgagggggacaggaccatcggcatcctgaccaagccagacctggtggacaagggcacagaggacaaggtggtggatgtggtgaggaacctggtgttccacctgaagaagggctacatgattgtgaagtgccggggccagcaggagatccaggaccagctgagcctgtctgaggccctgcagcgggagaagatcttctttgagaaccacccctacttccgggacctgctggaggagggcaaggccaccgtgccctgcctggccgagaagctgaccagcgagctgatcacccacatctgcaagagcctgcccctgctggagaaccagatcaaggagacccaccagaggatcacagaggagctgcagaagtatggagtggacatcccagaagatgaaaatgagaagatgttcttcctgattgacaaggtgaatgccttcaaccaggacatcacagccctgatgcagggcgaggagaccgtgggggaggaggacatccgcctcttcacccggctgcggcatgagttccacaagtggagcaccatcatcgagaacaacttccaggagggccacaagatcctgagcaggaagatccagaagtttgagaaccagtaccggggccgggagctgcccggctttgtgaactaccgcacctttgagaccatcgtgaagcagcagatcaaggccctggaggagcctgctgtggacatgctgcacacagtgacagacatggtgcggctggccttcacagatgtgtccatcaagaactttgaggagttcttcaacctgcacaggacagccaagagcaagattgaggacatccgggcagagcaggagcgggagggggagaagctgatccggctgcacttccagatggagcagatcgtgtactgccaggaccaggtgtacagaggagccctgcagaaggtgcgggagaaggagctggaggaggagaagaagaagaagtcctgggactttggagccttccagagcagcagcgccacagacagctccatggaggagatcttccagcacctgatggcctaccaccaggaggccagcaagaggatcagcagccacatccccctcatcatccagttcttcatgctgcagacctacggccagcagctgcagaaggccatgctgcagctgctgcaggacaaggacacctacagctggctgctgaaggagaggagtgacaccagtgacaagaggaagttcctgaaggagcggctggcccggctgacccaggcccggcggcggctggcccagtttcctggatag

SEQ ID NO: 277115 - DNA, 81 bp, Artificial Sequence
  derived and/or modified sequence
atggtggtgtctgaggtggacatcgccaaggctgaccctgctgctgccagccaccccctgctgctgaatggagatgcctag

SEQ ID NO: 277116 - DNA, 108 bp, Artificial Sequence
  derived and/or modified sequence
atggtggtgtctgaggtggacatcgccaaggctgaccctgctgctgccagccaccccctgctgctgaatggagatgccaccgtggcccagaagaaccctggcagctag

SEQ ID NO: 277117 - DNA, 2850 bp, Artificial Sequence
  derived and/or modified sequence
tgagtttcatttcttcgcggcgcggggcggggctgggcgcggggtgaaagaggcgaagcgagagcggaggccgcactccagcactgcgcagggaccgccttggaccgcagttgccggccaggaatcccagtgtcacggtggacacgcctccctcgcgcccttgccgcccacctgctcacccagctcaggggctttggaattctgtggccacactgcgaggagatcggttctgggtcggaggctacaggaagactcccactccctgaaatctggagtgaagaacgccgccatccagccaccattccaaggaggtgcaggagaacagctctgtgataccatttaacttgttgacattacttttatttgaaggaacgtatattagagcttactttgcaaagaaggaagatggttgtttccgaagtggacatcgcaaaagctgatccagctgctgcatcccaccctctattactgaatggagatgctactgtggcccagaaaaatccaggctcggtggctgagaacaacctgtgcagccagtatgaggagaaggtgcgcccctgcatcgacctcattgactccctgcgggctctaggtgtggagcaggacctggccctgccagccatcgccgtcatcggggaccagagctcgggcaagagctccgtgttggaggcactgtcaggagttgcccttcccagaggcagcgggatcgtgaccagatgcccgctggtgctgaaactgaagaaacttgtgaacgaagataagtggagaggcaaggtcagttaccaggactacgagattgagatttcggatgcttcagaggtagaaaaggaaattaataaagcccagaatgccatcgccggggaaggaatgggaatcagtcatgagctaatcaccctggagatcagctcccgagatgtcccggatctgactctaatagaccttcctggcataaccagagtggctgtgggcaatcagcctgctgacattgggtataagatcaagacactcatcaagaagtacatccagaggcaggagacaatcagcctggtggtggtccccagtaatgtggacatcgccaccacagaggctctcagcatggcccaggaggtggaccccgagggagacaggaccatcggaatcttgacgaagcctgatctggtggacaaaggaactgaagacaaggttgtggacgtggtgcggaacctcgtgttccacctgaagaagggttacatgattgtcaagtgccggggccagcaggagatccaggaccagctgagcctgtccgaagccctgcagagagagaagatcttctttgagaaccacccatatttcagggatctgctggaggaaggaaaggccacggttccctgcctggcagaaaaacttaccagcgagctcatcacacatatctgtaaatctctgcccctgttagaaaatcaaatcaaggagactcaccagagaataacagaggagctacaaaagtatggtgtcgacataccggaagacgaaaatgaaaaaatgttcttcctgatagataaagttaatgcctttaatcaggacatcactgctctcatgcaaggagaggaaactgtaggggaggaagacattcggctgtttaccagactccgacacgagttccacaaatggagtacaataattgaaaacaattttcaagaaggccataaaattttgagtagaaaaatccagaaatttgaaaatcagtatcgtggtagagagctgccaggctttgtgaattacaggacatttgagacaatcgtgaaacagcaaatcaaggcactggaagagccggctgtggatatgctacacaccgtgacggatatggtccggcttgctttcacagatgtttcgataaaaaattttgaagagttttttaacctccacagaaccgccaagtccaaaattgaagacattagagcagaacaagagagagaaggtgagaagctgatccgcctccacttccagatggaacagattgtctactgccaggaccaggtatacaggggtgcattgcagaaggtcagagagaaggagctggaagaagaaaagaagaagaaatcctgggattttggggctttccagtccagctcggcaacagactcttccatggaggagatctttcagcacctgatggcctatcaccaggaggccagcaagcgcatctccagccacatccctttgatcatccagttcttcatgctccagacgtacggccagcagcttcagaaggccatgctgcagctcctgcaggacaaggacacctacagctggctcctgaaggagcggagcgacaccagcgacaagcggaagttcctgaaggagcggcttgcacggctgacgcaggctcggcgccggcttgcccagttccccggttaaccacactctgtccagccccgtagacgtgcacgcacactgtctgcccccgttcccgggtagccactggactgacgacttgagtgctcagtagtcagactggatagtccgtctctgcttatccgttagccgtggtgatttagcaggaagctgtgagagcagtttggtttctagcatgaagacagagccccaccctcagatgcacatgagctggcgggattgaaggatgctgtcttcgtactgggaaagggattttcagccctcagaatcgctccaccttgcagctctccccttctctgtattcctagaaactgacacatgctgaacatcacagcttatttcctcatttttataatgtcccttcacaaacccagtgttttaggagcatgagtgccgtgtgtgtgcgtcctgtcggagccctgtctcctctctctgtaataaactcatttctagcagaca

SEQ ID NO: 277118 - DNA, 3470 bp, Artificial Sequence
  derived and/or modified sequence
agtctgaagtcatgcaatttgacttttcctttctggaaaccagcgagcagaaatgaaaccgaaactgaattgtccgggaaattcgcggtgggggcggagagcgcagggagaagtaagcccagtgcaggatcctgaggcccgtgtttgcaggaccagggccggccttccgattccccattcattccagaagcaccgaaccacgctgtgcccggatcccaagtgcagcggcacccagcgtgggcctggggttgccggttgacccggtcctcagcctggtagcagaggccaggccagtgccacaaggcacctaagtccacctgggcctggagcaggacaggttgcaaaagaaaatatctcgggacccccaaactccttatgctaagggaaacatcgagcctgggaactgagccatcaacgctgccattctttttcccaaacagaaccctgttgtcagaggtacacccagagcaactccacaccgggtgcatgccacagcaactccatcttaaataggagctggtaaaacgaggctgatacctactgggctgcattcccagacggcatagcgaggaggtgctgaagagcgcaggtttggagaatgatcacctggattggaaccatagctctaccaatatggaacccagctccttaggcctcggtcttctcatggagaacatggtgtgataatcctactcctctgggagggtggctgttaagccttggaccgcagttgccggccaggaatcccagtgtcacggtggacacgcctccctcgcgcccttgccgcccacctgctcacccagctcaggggctttggaattctgtggccacactgcgaggagatcggttctgggtcggaggctacaggaagactcccactccctgaaatctggagtgaagaacgccgccatccagccaccattccaaggaggtgcaggagaacagctctgtgataccatttaacttgttgacattacttttatttgaaggaacgtatattagagcttactttgcaaagaaggaagatggttgtttccgaagtggacatcgcaaaagctgatccagctgctgcatcccaccctctattactgaatggagatgctactgtggcccagaaaaatccaggctcggtggctgagaacaacctgtgcagccagtatgaggagaaggtgcgcccctgcatcgacctcattgactccctgcgggctctaggtgtggagcaggacctggccctgccagccatcgccgtcatcggggaccagagctcgggcaagagctccgtgttggaggcactgtcaggagttgcccttcccagaggcagcgggatcgtgaccagatgcccgctggtgctgaaactgaagaaacttgtgaacgaagataagtggagaggcaaggtcagttaccaggactacgagattgagatttcggatgcttcagaggtagaaaaggaaattaataaagcccagaatgccatcgccggggaaggaatgggaatcagtcatgagctaatcaccctggagatcagctcccgagatgtcccggatctgactctaatagaccttcctggcataaccagagtggctgtgggcaatcagcctgctgacattgggtataagatcaagacactcatcaagaagtacatccagaggcaggagacaatcagcctggtggtggtccccagtaatgtggacatcgccaccacagaggctctcagcatggcccaggaggtggaccccgagggagacaggaccatcggaatcttgacgaagcctgatctggtggacaaaggaactgaagacaaggttgtggacgtggtgcggaacctcgtgttccacctgaagaagggttacatgattgtcaagtgccggggccagcaggagatccaggaccagctgagcctgtccgaagccctgcagagagagaagatcttctttgagaaccacccatatttcagggatctgctggaggaaggaaaggccacggttccctgcctggcagaaaaacttaccagcgagctcatcacacatatctgtaaatctctgcccctgttagaaaatcaaatcaaggagactcaccagagaataacagaggagctacaaaagtatggtgtcgacataccggaagacgaaaatgaaaaaatgttcttcctgatagataaagttaatgcctttaatcaggacatcactgctctcatgcaaggagaggaaactgtaggggaggaagacattcggctgtttaccagactccgacacgagttccacaaatggagtacaataattgaaaacaattttcaagaaggccataaaattttgagtagaaaaatccagaaatttgaaaatcagtatcgtggtagagagctgccaggctttgtgaattacaggacatttgagacaatcgtgaaacagcaaatcaaggcactggaagagccggctgtggatatgctacacaccgtgacggatatggtccggcttgctttcacagatgtttcgataaaaaattttgaagagttttttaacctccacagaaccgccaagtccaaaattgaagacattagagcagaacaagagagagaaggtgagaagctgatccgcctccacttccagatggaacagattgtctactgccaggaccaggtatacaggggtgcattgcagaaggtcagagagaaggagctggaagaagaaaagaagaagaaatcctgggattttggggctttccagtccagctcggcaacagactcttccatggaggagatctttcagcacctgatggcctatcaccaggaggccagcaagcgcatctccagccacatccctttgatcatccagttcttcatgctccagacgtacggccagcagcttcagaaggccatgctgcagctcctgcaggacaaggacacctacagctggctcctgaaggagcggagcgacaccagcgacaagcggaagttcctgaaggagcggcttgcacggctgacgcaggctcggcgccggcttgcccagttccccggttaaccacactctgtccagccccgtagacgtgcacgcacactgtctgcccccgttcccgggtagccactggactgacgacttgagtgctcagtagtcagactggatagtccgtctctgcttatccgttagccgtggtgatttagcaggaagctgtgagagcagtttggtttctagcatgaagacagagccccaccctcagatgcacatgagctggcgggattgaaggatgctgtcttcgtactgggaaagggattttcagccctcagaatcgctccaccttgcagctctccccttctctgtattcctagaaactgacacatgctgaacatcacagcttatttcctcatttttataatgtcccttcacaaacccagtgttttaggagcatgagtgccgtgtgtgtgcgtcctgtcggagccctgtctcctctctctgtaataaactcatttctagcagaca

SEQ ID NO: 277119 - DNA, 2663 bp, Artificial Sequence
  derived and/or modified sequence
tttcttcgcggcgcggggcggggctgggcgcggggtgaaagaggcgaagcgagagcggaggccgcactccagcactgcgcagggaccggaattctgtggccacactgcgaggagatcggttctgggtcggaggctacaggaagactcccactccctgaaatctggagtgaagaacgccgccatccagccaccattccaagcttactttgcaaagaaggaagatggttgtttccgaagtggacatcgcaaaagctgatccagctgctgcatcccaccctctattactgaatggagatgctactgtggcccagaaaaatccaggctcggtggctgagaacaacctgtgcagccagtatgaggagaaggtgcgcccctgcatcgacctcattgactccctgcgggctctaggtgtggagcaggacctggccctgccagccatcgccgtcatcggggaccagagctcgggcaagagctccgtgttggaggcactgtcaggagttgcccttcccagaggcagcgggatcgtgaccagatgcccgctggtgctgaaactgaagaaacttgtgaacgaagataagtggagaggcaaggtcagttaccaggactacgagattgagatttcggatgcttcagaggtagaaaaggaaattaataaagcccagaatgccatcgccggggaaggaatgggaatcagtcatgagctaatcaccctggagatcagctcccgagatgtcccggatctgactctaatagaccttcctggcataaccagagtggctgtgggcaatcagcctgctgacattgggtataagatcaagacactcatcaagaagtacatccagaggcaggagacaatcagcctggtggtggtccccagtaatgtggacatcgccaccacagaggctctcagcatggcccaggaggtggaccccgagggagacaggaccatcggaatcttgacgaagcctgatctggtggacaaaggaactgaagacaaggttgtggacgtggtgcggaacctcgtgttccacctgaagaagggttacatgattgtcaagtgccggggccagcaggagatccaggaccagctgagcctgtccgaagccctgcagagagagaagatcttctttgagaaccacccatatttcagggatctgctggaggaaggaaaggccacggttccctgcctggcagaaaaacttaccagcgagctcatcacacatatctgtaaatctctgcccctgttagaaaatcaaatcaaggagactcaccagagaataacagaggagctacaaaagtatggtgtcgacataccggaagacgaaaatgaaaaaatgttcttcctgatagataaagttaatgcctttaatcaggacatcactgctctcatgcaaggagaggaaactgtaggggaggaagacattcggctgtttaccagactccgacacgagttccacaaatggagtacaataattgaaaacaattttcaagaaggccataaaattttgagtagaaaaatccagaaatttgaaaatcagtatcgtggtagagagctgccaggctttgtgaattacaggacatttgagacaatcgtgaaacagcaaatcaaggcactggaagagccggctgtggatatgctacacaccgtgacggatatggtccggcttgctttcacagatgtttcgataaaaaattttgaagagttttttaacctccacagaaccgccaagtccaaaattgaagacattagagcagaacaagagagagaaggtgagaagctgatccgcctccacttccagatggaacagattgtctactgccaggaccaggtatacaggggtgcattgcagaaggtcagagagaaggagctggaagaagaaaagaagaagaaatcctgggattttggggctttccagtccagctcggcaacagactcttccatggaggagatctttcagcacctgatggcctatcaccaggaggccagcaagcgcatctccagccacatccctttgatcatccagttcttcatgctccagacgtacggccagcagcttcagaaggccatgctgcagctcctgcaggacaaggacacctacagctggctcctgaaggagcggagcgacaccagcgacaagcggaagttcctgaaggagcggcttgcacggctgacgcaggctcggcgccggcttgcccagttccccggttaaccacactctgtccagccccgtagacgtgcacgcacactgtctgcccccgttcccgggtagccactggactgacgacttgagtgctcagtagtcagactggatagtccgtctctgcttatccgttagccgtggtgatttagcaggaagctgtgagagcagtttggtttctagcatgaagacagagccccaccctcagatgcacatgagctggcgggattgaaggatgctgtcttcgtactgggaaagggattttcagccctcagaatcgctccaccttgcagctctccccttctctgtattcctagaaactgacacatgctgaacatcacagcttatttcctcatttttataatgtcccttcacaaacccagtgttttaggagcatgagtgccgtgtgtgtgcgtcctgtcggagccctgtctcctctctctgtaataaactcatttctagcag

SEQ ID NO: 277120 - DNA, 1989 bp, Artificial Sequence
  derived and/or modified sequence
atggtggtgagcgaggtggacatcgccaaggccgaccccgccgccgcctctcatccgctcctgttaaacggggacgccaccgtggcccagaagaatccaggctcggtcgccgaaaacaacctgtgctcacagtacgaggaaaaggtcaggccttgcattgacctgatcgattcgctgcgggccctcggagtcgagcaggatcttgcgctgccagccattgctgtcatcggcgaccagagcagtggcaaatcaagcgtgttggaggccctgagcggggtggcactgccacgtgggtccggcattgttaccaggtgtcccctggttctgaagctcaaaaaattagtgaacgaagataaatggcgaggcaaggtcagctatcaagactatgagattgagatttccgatgcctccgaggttgagaaggagatcaataaggctcagaatgcaattgctggcgaggggatggggatttctcacgagcttattaccctggagatctcatcaagagatgtgcctgaccttactctaattgatctcccaggcataacccgggtagccgtgggaaaccagcccgccgacatcggttataagattaaaactttaatcaaaaagtacattcaacggcaggagactatttcactcgttgtggtcccctcaaatgtagatatagcaactactgaagccctgagcatggcccaagaggtcgatcccgaaggagaccgaacaattggcattctgactaaacccgatctagttgataagggcaccgaggataaggtggtggacgtggtccggaatctcgttttccatctgaaaaaaggctacatgatagtaaagtgcagaggccagcaggagattcaagaccagctttccctgagcgaagccctgcagcgcgagaagattttctttgaaaatcatccctatttccgtgacctgctggaggaaggcaaagccaccgttccatgtctggcagaaaaactcacctctgagttgatcactcacatttgtaagtccctgcctctgctggagaatcagatcaaagaaactcaccagcgcattaccgaggaactccagaaatacggggtggacatcccagaggacgaaaatgagaaaatgttcttcctgattgataaagtgaacgccttcaatcaagacataaccgctctgatgcagggggaggaaactgtcggcgaagaggacataagattgttcacacgactccggcatgaatttcataagtggtctactatcattgagaataattttcaggagggtcacaagattctgtcaagaaaaatacagaaatttgagaaccaataccggggtcgtgaattgccagggttcgtcaactaccgcacctttgagacaatagtcaaacagcaaattaaggcgctcgaggagcctgctgtcgatatgttgcacacagtcaccgatatggtcaggttggccttcaccgacgtctccattaagaacttcgaagagtttttcaacctgcatagaaccgctaagagtaagatcgaagacatcagggctgagcaggaacgagaaggagaaaagctcatacgattgcactttcaaatggaacagattgtgtattgccaggaccaggtatatcggggggctctccaaaaagtaagagaaaaggagttggaggaggaaaagaagaaaaagtcttgggattttggtgccttccagtccagctcagctactgacagcagtatggaggaaatattccagcacctgatggcatatcaccaggaagcctcaaagagaatctcctctcatatccctttaatcatccaattcttcatgcttcagacatatggtcagcagcttcagaaggccatgcttcaactgctgcaggataaggatacctattcttggctcctgaaagagcgctccgatacatcagataagcggaaattcctgaaagaacgtctggcaagactcacccaggcaagacgaagattggcccagttcccaggatag

SEQ ID NO: 277121 - DNA, 1989 bp, Artificial Sequence
  derived and/or modified sequence
atggtggtgagcgaggtggacatcgccaaggccgaccccgccgccgctagtcatccgttgcttctgaatggtgatgccaccgtcgcccagaaaaatcccggtagcgtagccgagaacaacctctgctcacagtatgaggagaaagtacggccatgcatcgacctgatcgactccctgcgcgcactgggagtggaacaggatcttgccctcccagcgatcgccgtcatcggggaccagagttctggaaaaagttccgtattggaggccctcagcggggtcgcacttcctcgtggcagtggtattgtgacacggtgtccactcgtgctcaagttgaaaaaacttgtcaatgaggacaaatggcgtggcaaagtctcttaccaggactacgaaattgaaatatcagacgcaagcgaagtcgagaaagagataaacaaagcccaaaacgccattgccggcgagggcatgggtattagccatgaactgattactctggagatatcctctagagacgtacccgatctcaccctgatcgacctgccagggatcacaagagtggccgtaggaaaccagccggcagacattgggtataaaatcaaaacgctcatcaagaaatatatccagcggcaggagacaatatctctcgtggtagttccctccaatgttgacattgctactacagaagctctctcgatggcacaggaggttgatcccgagggcgaccgcacaatcgggattcttacgaagccggacttagtcgataagggcactgaagacaaagtggtcgacgtcgtgaggaatctggttttccacctcaaaaagggctatatgattgtgaagtgtaggggacagcaggagattcaagatcagttaagcttgtcagaggccctgcagcgcgagaagatcttttttgagaaccacccttattttcgggatcttctcgaagagggcaaggccaccgtcccgtgcttagccgaaaaactaacatcggaactcatcacccatatctgtaaatccctgccactgctcgagaatcagatcaaggagacccaccagaggattaccgaggaactgcagaaatacggagtcgacatccctgaggacgaaaacgagaaaatgtttttcctcatcgacaaggtgaatgccttcaatcaggacatcaccgctctgatgcagggcgaggaaaccgttggggaggaggacatacgcctgtttactaggcttagacacgagtttcataaatggagcacgataatcgagaataatttccaagagggccacaaaatcctgtcccggaaaatacagaagttcgagaatcagtatcggggaagggaactccctggcttcgttaattatcggaccttcgagacaatcgttaagcagcagataaaggccttagaagaaccagctgttgacatgctgcacaccgtcaccgatatggtgaggcttgccttcaccgacgtatctattaaaaacttcgaagagttcttcaacctgcatcgaacagccaaatctaaaatcgaggatataagagctgagcaggaacgtgaaggtgaaaaactgatcagactgcattttcaaatggaacagattgtgtactgtcaggaccaggtgtataggggggcactccaaaaggtaagagaaaaagaactagaagaggagaaaaagaagaagagctgggactttggtgcttttcaatcatctagtgccacagacagcagtatggaagagatattccagcacctgatggcgtaccaccaggaagcttctaaacggatttccagtcatatccccctcattatacagttctttatgctgcagacctacgggcaacaactgcaaaaggctatgctacaattgttacaagacaaagacacttactcttggctactcaaagagaggagcgacacttccgacaagagaaaattcttaaaggaaaggctcgcccggctgacccaggcccgcaggcggctggcccagttccccgggtag

SEQ ID NO: 277122 - DNA, 81 bp, Artificial Sequence
  derived and/or modified sequence
atggtggtgagcgaggtggacatcgccaaggccgaccccgccgccgctagccacccattgttgctaaatggcgatgcctag

SEQ ID NO: 277123 - DNA, 108 bp, Artificial Sequence
  derived and/or modified sequence
atggtggtgagcgaggtggacatcgccaaggccgaccccgccgccgcctcgcacccacttctgcttaacggggatgcaactgtggcccaaaagaaccccggttcctag

SEQ ID NO: 277124 - DNA, 1989 bp, Artificial Sequence
  derived and/or modified sequence
atggtggtgagcgaggtggacatcgccaaggccgaccccgccgccgcttcccacccgctcttgctgaatggcgacgctactgtggcacaaaagaacccgggcagcgtggctgagaacaatctgtgttcccagtacgaagaaaaagtgaggccctgtatagacttgattgacagtctgagagcgcttggcgtcgagcaagatctcgccctccccgccattgctgttattggggaccagtcaagtgggaaatcttctgtgctcgaagcgctttcgggggtggcccttccacgcggaagcgggatcgtgactcgctgccccctagtgttgaagctaaagaagttagttaacgaagataaatggagagggaaagtttcttaccaggactatgagatcgagatcagcgacgcatctgaggtggagaaggaaattaacaaagctcagaacgctatcgctggcgaagggatgggaatcagccacgaacttatcaccctcgagatctcgtcccgagacgtcccagacttaaccctcatcgatctgccagggataacacgggtcgccgtgggcaaccaacccgctgacattggctacaagataaaaaccctcattaaaaaatacattcagagacaggagactataagtcttgtggtggtgcccagcaatgtagatatcgcaacgacggaggctctgtctatggctcaggaggtcgatcccgagggcgataggactattggaatacttacgaagccggaccttgttgacaaaggtaccgaagataaggttgttgatgttgttcgaaacctggtttttcacttgaaaaagggctacatgatcgtcaagtgtcgggggcaacaggaaatccaggatcaactctctctctctgaagcactgcagagggagaaaatttttttcgagaaccacccatacttccgggatttgcttgaggaagggaaggctaccgtgccgtgtctggcagagaagctgactagcgaacttatcacccacatttgtaaaagcctcccgcttctggaaaatcagattaaggagacgcatcaaagaatcaccgaagagctgcagaaatacggtgtggacattcccgaggatgagaatgaaaaaatgttcttcctaatcgacaaggtaaacgcctttaatcaagatataaccgccctgatgcagggcgaggaaactgtgggcgaagaagacattcggctgtttacaagactgagacacgagttccataagtggtcaactataattgaaaataactttcaggagggtcataagattttaagtcggaaaatccagaagttcgagaaccagtaccgcggacgggaactgcctggcttcgtgaactatagaaccttcgaaaccattgtgaagcaacaaattaaagccctcgaagagccagcagtagatatgctccacacagtcacagacatggtgcgattggccttcaccgacgtctctattaaaaactttgaggagttttttaacctgcaccgcactgctaagagtaagatagaggatatccgagccgaacaggaacgcgagggagaaaagctcattaggctgcacttccagatggaacagattgtgtactgccaggaccaggtgtatcgcggagctctgcaaaaagtcagggagaaagaactggaggaagaaaaaaagaagaagtcctgggacttcggcgcattccagtcgtcctccgcgacggacagcagtatggaggagatatttcagcaccttatggcttatcatcaggaggcaagcaagcggatatcaagccacataccactaattatacaatttttcatgctccagacatacggccagcagttacaaaaggctatgttgcagctattgcaggataaggatacctactcatggctactgaaagaacgaagtgatacttcagacaaacgtaaatttctgaaagagcggctggccaggcttacgcaggcccggcgacgtctggctcagttccccggctag

SEQ ID NO: 277125 - DNA, 1989 bp, Artificial Sequence
  derived and/or modified sequence
atggtggtgtccgaagtggacatcgctaaagccgatccagctgcagcatcacacccattactgctcaatggcgacgctaccgttgcacaaaagaatccaggctcagtggcagagaacaacttatgctcccagtacgaggagaaagtgcggccttgcattgaccttatcgacagtctgcgggcactgggtgtcgagcaagatctcgccctgcctgccatagcagttattggcgatcagtcgtccggaaaatctagcgttctagaagccctcagtggtgtcgcactgcctcggggatccgggatcgtgacacgctgcccactagtactgaagttaaaaaagctggtaaatgaagataagtggcgtggaaaggtgtcttaccaggactacgaaattgagatttccgacgcttcagaagtcgagaaggagatcaacaaggcccaaaacgccattgcaggtgaaggtatgggtatttctcatgaactaatcaccctggaaatttcttccagggatgtgccggaccttaccttaatcgatctcccagggatcaccagggtggctgttggaaatcagcctgccgacatcggctacaaaattaaaacactgatcaagaaatatatacagcggcaggaaacaatctcactggtggtggtgcccagcaacgtcgacatcgccacaacagaggcgctgtccatggcgcaggaggttgacccagagggcgaccggacaatcggcatcctgacgaaacccgacctggtggacaaggggacagaggataaggtggtggatgtggttcgcaatttggtgttccatctgaagaagggctacatgattgttaaatgtcgtggccagcaggagatccaggaccagctctctctatcagaggccctgcagagggagaaaatcttcttcgagaaccacccttacttccgcgacctcctggaggagggcaaggctaccgtcccctgcctggctgagaagctcacgtccgagcttatcactcatatttgtaaatctctccccctcctggaaaatcaaattaaagaaactcaccagcgtattacagaagaactccagaagtacggcgtggacatcccagaagatgaaaacgaaaagatgttctttttgattgacaaggtaaatgcgttcaatcaggatatcaccgcactgatgcagggcgaagaaacagtgggagaggaggacattcgattatttacccggcttaggcatgaatttcacaagtggagtaccattattgagaacaattttcaagaaggccacaagattctgtctcggaaaatccaaaaatttgaaaatcagtatcggggtcgagagttgcccggtttcgttaattaccggacatttgagacaatcgtcaaacagcaaattaaagcgctcgaagagcctgcggttgatatgctgcacaccgttaccgatatggtgaggttggccttcactgatgtatccatcaagaacttcgaggagttttttaatctacaccggacggccaaaagtaagatcgaagacatacgagccgagcaagagcgggagggagagaagctcatcaggctgcatttccagatggaacagattgtttactgccaggatcaggtgtataggggagcgctgcagaaagtgagggagaaggagcttgaggaggaaaagaagaagaaatcttgggattttggtgctttccagtcttcttccgccactgattcatcgatggaggagattttccagcatctgatggcataccatcaggaggcgagtaagcggatctcctcccatatacctctgatcatacagttcttcatgcttcagacgtatggacagcagctacagaaggccatgctccagctgctccaggataaagacacttattcctggctgctcaaggagcgttccgatacatctgacaaacggaagtttctcaaggagcgcctcgcgcgactcactcaggcaaggaggaggctggcccagttccctggctag

SEQ ID NO: 277126 - DNA, 1989 bp, Artificial Sequence
  derived and/or modified sequence
atggtggtgagtgaggtcgatattgccaaagccgatccagcagcagcaagccatcccctgttattgaatggcgatgccactgtggctcagaaaaacccagggtctgtggccgaaaacaacctctgcagtcaatatgaggaaaaggtgcggccatgcatcgacctgatcgactccctccgggctctgggcgtcgagcaagatttggcattgccggctattgccgtgataggggatcagagctcaggtaagagcagtgtcctggaggcgttatcgggagtggctcttccaagaggatccggaatcgtgaccaggtgtccactggtgctcaagcttaaaaagctggtgaacgaagacaagtggagaggcaaggtgtcctatcaggactacgagattgagatttcagacgcgagcgaggtggaaaaagaaatcaacaaagcccagaatgccattgccggtgaagggatgggcatttcccatgagctgatcacacttgagatctctagtcgggatgttcctgacttaactctgattgatctgccaggtatcacaagggtcgccgttggtaaccagcccgcagacatcggctacaaaattaagactttaatcaagaaatatatccagcgccaagagaccatcagcctggtcgtggtcccttccaatgtcgacatagcaacaactgaagccctgtctatggcccaagaggtggaccccgaaggagaccgcactatcggcattctaactaagcccgatctggtcgataagggaacagaggacaaagtggtggacgtggttcgcaacttggtcttccacttgaaaaagggctatatgattgttaagtgccgtggccagcaggaaatccaggatcaattatcgctgagtgaagctctccaaagggagaagatcttttttgagaaccacccatacttcagggatctgctggaggagggtaaagccaccgtgccctgcctagcggaaaaactgacctctgagctgattactcacatttgtaagtcactaccacttctggaaaatcagattaaagagacacaccagcgaattaccgaggagctgcagaagtacggagtcgacatccctgaagatgagaatgagaagatgttctttttaattgacaaagtgaacgcgtttaaccaggatattactgccctgatgcagggcgaagagaccgtcggggaagaggatattaggctatttaccaggttacgtcatgaattccataaatggtctaccattatcgagaacaatttccaggaaggccataaaatcctgtctcgcaagatccagaagtttgagaatcagtatcgcggaagagagttgcctggctttgtgaactatcgcacatttgagacaatcgttaaacaacagatcaaggcattggaagagcccgctgtggatatgctccacaccgtaaccgatatggtgagactggcatttaccgacgtaagcatcaagaactttgaagagttcttcaacctacacaggaccgccaaatctaagatcgaagacatacgggctgaacaagaaagggaaggagaaaaactgattcgtctgcattttcagatggaacagatcgtttattgccaggatcaggtctaccgcggagccctccagaaagtgcgtgagaaagaactagaggaggaaaaaaaaaagaagagctgggatttcggagcctttcagagctctagtgccaccgactctagtatggaagagatttttcaacatctgatggcctaccatcaggaggcatccaagcgtatctcttctcacatccctctgatcatccagttttttatgctgcagacctatgggcagcagcttcagaaagccatgctccaacttcttcaagataaagacacttatagctggttactcaaggaacggtcagacacaagcgataagcgtaagtttctcaaggaaaggttggccagattgacacaggctcggcgtcgattagctcagttcccagggtag

SEQ ID NO: 277127 - DNA, 81 bp, Artificial Sequence
  derived and/or modified sequence
atggtggtatccgaagtcgatattgctaaagccgaccctgccgcagcctctcatccattgctgttgaacggtgacgcttag

SEQ ID NO: 277128 - DNA, 108 bp, Artificial Sequence
  derived and/or modified sequence
atggttgtttccgaagtggatattgccaaagccgaccccgctgccgcaagccatccgctgctattgaatggtgacgcaaccgtagctcagaagaaccccggttcctag

SEQ ID NO: 277129 - DNA, 1989 bp, Artificial Sequence
  derived and/or modified sequence
atggtggtgtccgaggtggatatcgctaaggcagacccggcagctgcctctcatccgttactcctgaacggtgacgccaccgtcgcccagaaaaaccccggatcagtggcagaaaacaacctgtgctcacagtacgaagaaaaagtccgtccatgcattgacctgatcgacagcctcagagccctgggagtcgagcaggacctcgccctcccagccatcgccgtcattggagatcaatcttccggcaaatcctcagtcttggaagcactatcaggtgtggctttgccacgcggaagcggaatcgtgactagatgcccgctggtactcaaactgaaaaaactggtaaacgaggataagtggagagggaaagtcagttatcaggactatgaaatcgagatttcggacgcctccgaggtggagaaagaaataaataaggcccaaaatgcaattgccggagaagggatggggatcagccacgagctgatcactctggagatttcaagtcgagacgtacctgaccttactctgattgatctgcctggcatcacaagggtcgccgtcggaaatcagccagcagacataggatataaaattaagacccttatcaagaagtacatccagcggcaggagaccatttctctggtcgtggtgccatctaatgtagatatcgcaacgacggaggcattgagcatggcccaagaggttgatccggaaggcgaccggacgatcggtatccttaccaaacctgatctggtcgacaagggcaccgaggacaaggttgtcgacgttgtgagaaacttagtgttccatttgaagaaaggatacatgatcgtgaagtgccggggtcagcaggagatacaagaccagctaagcctcagcgaggcgcttcagagagagaaaatcttttttgaaaaccacccttactttagggatctgctggaagagggcaaagctaccgttccatgcctcgcagagaagctgacctccgagctaatcacacatatctgtaagagcctcccccttttggagaaccagataaaagagacccaccagcgcattacggaggagctgcaaaaatacggtgtggatatccccgaggatgaaaacgagaagatgttcttcctaattgacaaagtgaacgcttttaaccaagatatcaccgccctgatgcagggagaggagactgttggcgaggaggacattaggctgtttactcgtctccgccacgaatttcacaagtggtccactataattgagaataatttccaggagggacacaaaattctatcacgaaaaatccagaagtttgagaaccagtatcgcggtcgggagctgcccggtttcgttaactatagaacttttgaaacgatcgtcaagcagcagattaaagccctagaggagccagctgttgatatgttgcatactgtcacggacatggttaggctcgccttcactgacgtcagcattaagaacttcgaggagtttttcaacttgcatcgcacagccaaatcaaagattgaggatatacgagccgagcaagagcgcgaaggggaaaagctgattcgcctccactttcagatggagcagatcgtatactgccaagaccaagtgtacagaggtgcccttcaaaaggtgcgggagaaagaacttgaagaggagaagaaaaagaaatcatgggacttcggcgctttccagagcagtagcgctacagattcatcaatggaagaaatctttcagcatttgatggcctatcaccaggaagcctccaaaagaattagctcccacatcccactgattatacagtttttcatgctgcagacctacggccagcaactccaaaaggctatgctccagctcctgcaggacaaagatacgtattcctggctcctgaaagagcggtctgacacgagtgataagagaaagttcttgaaggagaggctagctagactgactcaggctaggcgtagacttgcccagtttcctgggtag

SEQ ID NO: 277130 - DNA, 1989 bp, Artificial Sequence
  derived and/or modified sequence
atggtggtgagcgaggtggacatcgccaaggccgaccccgccgccgccagccaccccctgctgctgaacggcgacgccaccgtggcccagaagaaccccggcagcgtggccgagaacaacctgtgcagccagtacgaggagaaggtgagaccctgcatcgacctgatcgacagcctgagagccctgggcgtggagcaggacctggccctgcccgccatcgccgtgatcggcgaccagagcagcggcaagagcagcgtgctggaggccctgagcggcgtggccctgcccagaggcagcggcatcgtgaccagatgccccctggtgctgaagctgaagaagctggtgaacgaggacaagtggagaggcaaggtgagctaccaggactacgagatcgagatcagcgacgccagcgaggtggagaaggagatcaacaaggcccagaacgccatcgccggcgagggcatgggcatcagccacgagctgatcaccctggagatcagcagcagagacgtgcccgacctgaccctgatcgacctgcccggcatcaccagagtggccgtgggcaaccagcccgccgacatcggctacaagatcaagaccctgatcaagaagtacatccagagacaggagaccatcagcctggtggtggtgcccagcaacgtggacatcgccaccaccgaggccctgagcatggcccaggaggtggaccccgagggcgacagaaccatcggcatcctgaccaagcccgacctggtggacaagggcaccgaggacaaggtggtggacgtggtgagaaacctggtgttccacctgaagaagggctacatgatcgtgaagtgcagaggccagcaggagatccaggaccagctgagcctgagcgaggccctgcagagagagaagatcttcttcgagaaccacccctacttcagagacctgctggaggagggcaaggccaccgtgccctgcctggccgagaagctgaccagcgagctgatcacccacatctgcaagagcctgcccctgctggagaaccagatcaaggagacccaccagagaatcaccgaggagctgcagaagtacggcgtggacatccccgaggacgagaacgagaagatgttcttcctgatcgacaaggtgaacgccttcaaccaggacatcaccgccctgatgcagggcgaggagaccgtgggcgaggaggacatcagactgttcaccagactgagacacgagttccacaagtggagcaccatcatcgagaacaacttccaggagggccacaagatcctgagcagaaagatccagaagttcgagaaccagtacagaggcagagagctgcccggcttcgtgaactacagaaccttcgagaccatcgtgaagcagcagatcaaggccctggaggagcccgccgtggacatgctgcacaccgtgaccgacatggtgagactggccttcaccgacgtgagcatcaagaacttcgaggagttcttcaacctgcacagaaccgccaagagcaagatcgaggacatcagagccgagcaggagagagagggcgagaagctgatcagactgcacttccagatggagcagatcgtgtactgccaggaccaggtgtacagaggcgccctgcagaaggtgagagagaaggagctggaggaggagaagaagaagaagagctgggacttcggcgccttccagagcagcagcgccaccgacagcagcatggaggagatcttccagcacctgatggcctaccaccaggaggccagcaagagaatcagcagccacatccccctgatcatccagttcttcatgctgcagacctacggccagcagctgcagaaggccatgctgcagctgctgcaggacaaggacacctacagctggctgctgaaggagagaagcgacaccagcgacaagagaaagttcctgaaggagagactggccagactgacccaggccagaagaagactggcccagttccccggctag

SEQ ID NO: 277131 - DNA, 81 bp, Artificial Sequence
  derived and/or modified sequence
atggtggtgagcgaggtggacatcgccaaggccgaccccgccgccgccagccaccccctgctgctgaacggcgacgcctag

SEQ ID NO: 277132 - DNA, 108 bp, Artificial Sequence
  derived and/or modified sequence
atggtggtgagcgaggtggacatcgccaaggccgaccccgccgccgccagccaccccctgctgctgaacggcgacgccaccgtggcccagaagaaccccggcagctag

SEQ ID NO: 277133 - DNA, 312 bp, Artificial Sequence
  derived and/or modified sequence
atgaagctgaagagcctgttcggcgagatcaccttcaccttcggcatcagcaaggagaagctgaagatcctggacgacctgaccctgctgcccctgctggtgaagcagtacaagatgctgtggagctacaagctgcccggcagcggcatcgtgatctggagcaccttccacgccgtgatggacagcgagtggagaagacagaacgccgagctgaacctgatcaccaacaagcacttcctgaagaacctgcagagcaagcacctggacgtgaagatcctgaagaccaagaacaagctggtggagggcatctag

SEQ ID NO: 277134 - protein, 1078 aa, Artificial Sequence
  derived and/or modified sequence
MAQFPTPFGGSLDIWAITVEERAKHDQQFHSLKPISGFITGDQARNFFFQSGLPQPVLAQIWALADMNNDGRMDQVEFSIAMKLIKLKLQGYQLPSALPPVMKQQPVAISSAPAFGMGGIASMPPLTAVAPVPMGSIPVVGMSPTLVSSVPTAAVPPLANGAPPVIQPLPAFAHPAATLPKSSSFSRSGPGSQLNTKLQKAQSFDVASVPPVAEWAVPQSSRLKYRQLFNSHDKTMSGHLTGPQARTILMQSSLPQAQLASIWNLSDIDQDGKLTAEEFILAMHLIDVAMSGQPLPPVLPPEYIPPSFRRVRSGSGISVISSTSVDQRLPEEPVLEDEQQQLEKKLPVTFEDKKRENFERGNLELEKRRQALLEQQRKEQERLAQLERAEQERKERERQEQERKRQLELEKQLEKQRELERQREEERRKEIERREAAKRELERQRQLEWERNRRQELLNQRNKEQEDIVVLKAKKKTLEFELEALNDKKHQLEGKLQDIRCRLTTQRQEIESTNKSRELRIAEITHLQQQLQESQQMLGRLIPEKQILNDQLKQVQQNSLHRDSLVTLKRALEAKELARQHLRDQLDEVEKETRSKLQEIDIFNNQLKELREIHNKQQLQKQKSMEAERLKQKEQERKIIELEKQKEEAQRRAQERDKQWLEHVQQEDEHQRPRKLHEEEKLKREESVKKKDGEEKGKQEAQDKLGRLFHQHQEPAKPAVQAPWSTAEKGPLTISAQENVKVVYYRALYPFESRSHDEITIQPGDIVMVDESQTGEPGWLGGELKGKTGWFPANYAEKIPENEVPAPVKPVTDSTSAPAPKLALRETPAPLAVTSSEPSTTPNNWADFSSTWPTSTNEKPETDNWDAWAAQPSLTVPSAGQLRQRSAFTPATATGSSPSPVLGQGEKVEGLQAQALYPWRAKKDNHLNFNKNDVITVLEQQDMWWFGEVQGQKGWFPKSYVKLISGPIRKSTSMDSGSSESPASLKRVASPAAKPVVSGEEFIAMYTYESSEQGDLTFQQGDVILVTKKDGDWWTGTVGDKAGVFPSNYVRLKDSEGSGTAGKTGSLGKKPGPSCNVK

SEQ ID NO: 277135 - protein, 1015 aa, Artificial Sequence
  derived and/or modified sequence
MAQFPTPFGGSLDIWAITVEERAKHDQQFHSLKPISGFITGDQARNFFFQSGLPQPVLAQIWALADMNNDGRMDQVEFSIAMKLIKLKLQGYQLPSALPPVMKQQPVAISSAPAFGMGGIASMPPLTAVAPVPMGSIPVVGMSPTLVSSVPTAAVPPLANGAPPVIQPLPAFAHPAATLPKSSSFSRSGPGSQLNTKLQKAQSFDVASVPPVAEWAVPQSSRLKYRQLFNSHDKTMSGHLTGPQARTILMQSSLPQAQLASIWNLSDIDQDGKLTAEEFILAMHLIDVAMSGQPLPPVLPPEYIPPSFRRVRSGSGISVISSTSVDQRLPEEPVLEDEQQQLEKKLPVTFEDKKRENFERGNLELEKRRQALLEQQRKEQERLAQLERAEQERKERERQEQERKRQLELEKQLEKQRELERQREEERRKEIERREAAKRELERQRQLEWERNRRQELLNQRNKEQEDIVVLKAKKKTLEFELEALNDKKHQLEGKLQDIRCRLTTQRQEIESTNKSRELRIAEITHLQQQLQESQQMLGRLIPEKQILNDQLKQVQQNSLHRDSLVTLKRALEAKELARQHLRDQLDEVEKETRSKLQEIDIFNNQLKELREIHNKQQLQKQKSMEAERLKQKEQERKIIELEKQKEEAQRRAQERDKQWLEHVQQEDEHQRPRKLHEEEKLKREESVKKKDGEEKGKQEAQDKLGRLFHQHQEPAKPAVQAPWSTAEKGPLTISAQENVKVVYYRALYPFESRSHDEITIQPGDIVMVDESQTGEPGWLGGELKGKTGWFPANYAEKIPENEVPAPVKPVTDSTSAPAPKLALRETPAPLAVTSSEPSTTPNNWADFSSTWPTSTNEKPETDNWDAWAAQPSLTVPSAGQLRQRSAFTPATATGSSPSPVLGQGEKVEGLQAQALYPWRAKKDNHLNFNKNDVITVLEQQDMWWFGEVQGQKGWFPKSYVKLISGPIRKSTSMDSGSSESPASLKRVASPAAKPVVSGEGLWNCWENREFRKKT

SEQ ID NO: 277136 - protein, 1215 aa, Artificial Sequence
  derived and/or modified sequence
MAQFPTPFGGSLDIWAITVEERAKHDQQFHSLKPISGFITGDQARNFFFQSGLPQPVLAQIWALADMNNDGRMDQVEFSIAMKLIKLKLQGYQLPSALPPVMKQQPVAISSAPAFGMGGIASMPPLTAVAPVPMGSIPVVGMSPTLVSSVPTAAVPPLANGAPPVIQPLPAFAHPAATLPKSSSFSRSGPGSQLNTKLQKAQSFDVASVPPVAEWAVPQSSRLKYRQLFNSHDKTMSGHLTGPQARTILMQSSLPQAQLASIWNLSDIDQDGKLTAEEFILAMHLIDVAMSGQPLPPVLPPEYIPPSFRRVRSGSGISVISSTSVDQRLPEEPVLEDEQQQLEKKLPVTFEDKKRENFERGNLELEKRRQALLEQQRKEQERLAQLERAEQERKERERQEQERKRQLELEKQLEKQRELERQREEERRKEIERREAAKRELERQRQLEWERNRRQELLNQRNKEQEDIVVLKAKKKTLEFELEALNDKKHQLEGKLQDIRCRLTTQRQEIESTNKSRELRIAEITHLQQQLQESQQMLGRLIPEKQILNDQLKQVQQNSLHRDSLVTLKRALEAKELARQHLRDQLDEVEKETRSKLQEIDIFNNQLKELREIHNKQQLQKQKSMEAERLKQKEQERKIIELEKQKEEAQRRAQERDKQWLEHVQQEDEHQRPRKLHEEEKLKREESVKKKDGEEKGKQEAQDKLGRLFHQHQEPAKPAVQAPWSTAEKGPLTISAQENVKVVYYRALYPFESRSHDEITIQPGDIVMVDESQTGEPGWLGGELKGKTGWFPANYAEKIPENEVPAPVKPVTDSTSAPAPKLALRETPAPLAVTSSEPSTTPNNWADFSSTWPTSTNEKPETDNWDAWAAQPSLTVPSAGQLRQRSAFTPATATGSSPSPVLGQGEKVEGLQAQALYPWRAKKDNHLNFNKNDVITVLEQQDMWWFGEVQGQKGWFPKSYVKLISGPIRKSTSMDSGSSESPASLKRVASPAAKPVVSGEEFIAMYTYESSEQGDLTFQQGDVILVTKKDGDWWTGTVGDKAGVFPSNYVRLKDSEGSGTAGKTGSLGKKPEIAQVIASYTATGPEQLTLAPGQLILIRKKNPGGWWEGELQARGKKRQIGWFPANYVKLLSPGTSKITPTEPPKSTALAAVCQVIGMYDYTAQNDDELAFNKGQIINVLNKEDPDWWKGEVNGQVGLFPSNYVKLTTDMDPSQQ

SEQ ID NO: 277137 - protein, 1716 aa, Artificial Sequence
  derived and/or modified sequence
MAQFPTPFGGSLDIWAITVEERAKHDQQFHSLKPISGFITGDQARNFFFQSGLPQPVLAQIWALADMNNDGRMDQVEFSIAMKLIKLKLQGYQLPSALPPVMKQQPVAISSAPAFGMGGIASMPPLTAVAPVPMGSIPVVGMSPTLVSSVPTAAVPPLANGAPPVIQPLPAFAHPAATLPKSSSFSRSGPGSQLNTKLQKAQSFDVASVPPVAEWAVPQSSRLKYRQLFNSHDKTMSGHLTGPQARTILMQSSLPQAQLASIWNLSDIDQDGKLTAEEFILAMHLIDVAMSGQPLPPVLPPEYIPPSFRRVRSGSGISVISSTSVDQRLPEEPVLEDEQQQLEKKLPVTFEDKKRENFERGNLELEKRRQALLEQQRKEQERLAQLERAEQERKERERQEQERKRQLELEKQLEKQRELERQREEERRKEIERREAAKRELERQRQLEWERNRRQELLNQRNKEQEDIVVLKAKKKTLEFELEALNDKKHQLEGKLQDIRCRLTTQRQEIESTNKSRELRIAEITHLQQQLQESQQMLGRLIPEKQILNDQLKQVQQNSLHRDSLVTLKRALEAKELARQHLRDQLDEVEKETRSKLQEIDIFNNQLKELREIHNKQQLQKQKSMEAERLKQKEQERKIIELEKQKEEAQRRAQERDKQWLEHVQQEDEHQRPRKLHEEEKLKREESVKKKDGEEKGKQEAQDKLGRLFHQHQEPAKPAVQAPWSTAEKGPLTISAQENVKVVYYRALYPFESRSHDEITIQPGDIVMVDESQTGEPGWLGGELKGKTGWFPANYAEKIPENEVPAPVKPVTDSTSAPAPKLALRETPAPLAVTSSEPSTTPNNWADFSSTWPTSTNEKPETDNWDAWAAQPSLTVPSAGQLRQRSAFTPATATGSSPSPVLGQGEKVEGLQAQALYPWRAKKDNHLNFNKNDVITVLEQQDMWWFGEVQGQKGWFPKSYVKLISGPIRKSTSMDSGSSESPASLKRVASPAAKPVVSGEEFIAMYTYESSEQGDLTFQQGDVILVTKKDGDWWTGTVGDKAGVFPSNYVRLKDSEGSGTAGKTGSLGKKPEIAQVIASYTATGPEQLTLAPGQLILIRKKNPGGWWEGELQARGKKRQIGWFPANYVKLLSPGTSKITPTEPPKSTALAAVCQVIGMYDYTAQNDDELAFNKGQIINVLNKEDPDWWKGEVNGQVGLFPSNYVKLTTDMDPSQQWCSDLHLLDMLTPTERKRQGYIHELIVTEENYVNDLQLVTEIFQKPLMESELLTEKEVAMIFVNWKELIMCNIKLLKALRVRKKMSGEKMPVKMIGDILSAQLPHMQPYIRFCSRQLNGAALIQQKTDEAPDFKEFVKRLAMDPRCKGMPLSSFILKPMQRVTRYPLIIKNILENTPENHPDHSHLKHALEKAEELCSQVNEGVREKENSDRLEWIQAHVQCEGLSEQLVFNSVTNCLGPRKFLHSGKLYKAKSNKELYGFLFNDFLLLTQITKPLGSSGTDKVFSPKSNLQYKMYKTPIFLNEVLVKLPTDPSGDEPIFHISHIDRVYTLRAESINERTAWVQKIKAASELYIETEKKKREKAYLVRSQRATGIGRLMVNVVEGIELKPCRSHGKSNPYCEVTMGSQCHITKTIQDTLNPKWNSNCQFFIRDLEQEVLCITVFERDQFSPDDFLGRTEIRVADIKKDQGSKGPVTKCLLLHEVPTGEIVVRLDLQLFDEP

SEQ ID NO: 277138 - protein, 1660 aa, Artificial Sequence
  derived and/or modified sequence
MAQFPTPFGGSLDIWAITVEERAKHDQQFHSLKPISGFITGDQARNFFFQSGLPQPVLAQIWALADMNNDGRMDQVEFSIAMKLIKLKLQGYQLPSALPPVMKQQPVAISSAPAFGMGGIASMPPLTAVAPVPMGSIPVVGMSPTLVSSVPTAAVPPLANGAPPVIQPLPAFAHPAATLPKSSSFSRSGPGSQLNTKLQKAQSFDVASVPPVAEWAVPQSSRLKYRQLFNSHDKTMSGHLTGPQARTILMQSSLPQAQLASIWNLSDIDQDGKLTAEEFILAMHLIDVAMSGQPLPPVLPPEYIPPSFRRVRSGSGISVISSTSVDQRLPEEPVLEDEQQQLEKKLPVTFEDKKRENFERGNLELEKRRQALLEQQRKEQERLAQLERAEQERKERERQEQERKRQLELEKQLEKQRELERQREEERRKEIERREAAKRELERQRQLEWERNRRQELLNQRNKEQEDIVVLKAKKKTLEFELEALNDKKHQLEGKLQDIRCRLTTQRQEIESTNKSRELRIAEITHLQQQLQESQQMLGRLIPEKQILNDQLKQVQQNSLHRDSLVTLKRALEAKELARQHLRDQLDEVEKETRSKLQEIDIFNNQLKELREIHNKQQLQKQKSMEAERLKQKEQERKIIELEKQKEEAQRRAQERDKQWLEHVQQEDEHQRPRKLHEEEKLKREESVKKKDGEEKGKQEAQDKLGRLFHQHQEPAKPAVQAPWSTAEKGPLTISAQENVKVVYYRALYPFESRSHDEITIQPGDIVMVDESQTGEPGWLGGELKGKTGWFPANYAEKIPENEVPAPVKPVTDSTSAPAPKLALRETPAPLAVTSSEPSTTPNNWADFSSTWPTSTNEKPETDNWDAWAAQPSLTVPSAGQLRQRSAFTPATATGSSPSPVLGQGEKVEGLQAQALYPWRAKKDNHLNFNKNDVITVLEQQDMWWFGEVQGQKGWFPKSYVKLISGPIRKSTSMDSGSSESPASLKRVASPAAKPVVSGEEFIAMYTYESSEQGDLTFQQGDVILVTKKDGDWWTGTVGDKAGVFPSNYVRLKDSEGSGTAGKTGSLGKKPEIAQVIASYTATGPEQLTLAPGQLILIRKKNPGGWWEGELQARGKKRQIGWFPANYVKLLSPGTSKITPTEPPKSTALAAVCQVIGMYDYTAQNDDELAFNKGQIINVLNKEDPDWWKGEVNGQVGLFPSNYVKLTTDMDPSQQWCSDLHLLDMLTPTERKRQGYIHELIVTEENYVNDLQLVTEIFQKPLMESELLTEKEVAMIFVNWKELIMCNIKLLKALRVRKKMSGEKMPVKMIGDILSAQLPHMQPYIRFCSRQLNGAALIQQKTDEAPDFKEFVKRLAMDPRCKGMPLSSFILKPMQRVTRYPLIIKNQLVFNSVTNCLGPRKFLHSGKLYKAKSNKELYGFLFNDFLLLTQITKPLGSSGTDKVFSPKSNLQYKMYKTPIFLNEVLVKLPTDPSGDEPIFHISHIDRVYTLRAESINERTAWVQKIKAASELYIETEKKKREKAYLVRSQRATGIGRLMVNVVEGIELKPCRSHGKSNPYCEVTMGSQCHITKTIQDTLNPKWNSNCQFFIRDLEQEVLCITVFERDQFSPDDFLGRTEIRVADIKKDQGSKGPVTKCLLLHEVPTGEIVVRLDLQLFDEP

SEQ ID NO: 277139 - DNA, 954 bp, Artificial Sequence
  derived and/or modified sequence
taacccctgatggagtcagagctcctcacagaaaaagaggtggccatgatcttcgtcaactggaaggaactgatcatgtgtaacataaagctcctcaaggctctccgggtgaggaaaaaaatgtcaggggagaaaatgcccgtgaagatgatcggcgacatactgtcggcgcagctgcctcacatgcaaccctacattcggttttgctcccgacagctgaacggagctgccctgatccagcagaagactgacgaagcgccagactttaaggaattcgtgaaacggttggcgatggatcctcggtgcaaagggatgcctctgtcatcgttcatactgaaacctatgcaacgggtgactcggtaccctctcattatcaagaatcagctggtgtttaacagcgtgacgaactgcctcgggccccggaagtttttgcacagtgggaagctgtataaggctaagtccaacaaggaactgtacgggttcttgtttaatgactttctcttattaacccagatcaccaagcctctgggctcatccgggacagacaaggtgttttcacccaagagtaacctgcagtataaaatgtacaaaacacccatctttttgaacgaggtgctggtgaagctgcccactgatccgtctggtgacgagccgatttttcacatcagtcacattgatcgagtgtatacactaagggctgaatcaattaatgagcgcacagcgtgggtccagaagattaaggcagcttcagagttatatatcgagacagagaagaaaaagcgcgagaaagcctatttagtcagatctcagcgggcaactggaatcggccgacttatggtaaacgtcgttgagggcattgagttgaagccctgccgctcccacgggaagtctaatccctactgtgaggtgacaatgggcagtcagtgccatatcacaaagacaattcaggactag

SEQ ID NO: 277140 - DNA, 3237 bp, Artificial Sequence
  derived and/or modified sequence
atggcccaatttccaaccccctttggaggaagcctcgacatttgggccattacagttgaggaaagggccaaacacgatcaacagtttcacagcctgaagccgatttcgggcttcattacaggcgaccaagctaggaacttctttttccagagcggactgccacagcctgtgctcgctcagatctgggcactggctgacatgaacaacgatggtcgaatggatcaggtggagttttcgatcgcaatgaagctgatcaaactcaaactgcaggggtatcagttgccctccgccctgcctcctgtgatgaaacagcagccagtggctatatctagtgcacccgcattcgggatgggaggaatcgccagcatgccacctctgaccgccgttgcgccagttccgatgggctctattccagtggtgggtatgagcccaaccctagtctcctcagtaccgactgccgcagtgcccccgctcgccaatggtgcaccccccgtgattcagcctctgcccgcctttgcccatcccgccgctacactgccaaagtctagcagcttttcccgcagcgggcccggatctcagctcaacaccaaattacagaaagcccaaagcttcgacgtggcctctgtacctccggttgccgaatgggccgtgccacagagcagccgattgaagtaccggcagctcttcaactctcacgataaaactatgtccggccacctgactggcccacaggcccgaaccatccttatgcagtccagtttaccacaggcgcaattggcaagcatttggaatttgtccgatatcgaccaggacggtaaacttactgctgaggagtttattttagctatgcatctgattgacgtcgccatgtcagggcaacctcttccacccgtacttccaccagaatacatcccaccatccttccggagggtcagatccggatctgggatatctgtgatatctagcaccagcgtggaccagcggcttccagaggaacccgtcctggaggacgagcagcagcagctggaaaaaaaactacctgtcacttttgaggataaaaagcgtgagaatttcgagcgagggaacctggaactcgagaagcgtcggcaggcattgctggaacagcagcggaaggagcaggagaggcttgctcaattggaaagagctgagcaagagcgcaaggagcgggagcgccaggaacaggagagaaagcggcagttagagttagagaaacagcttgagaaacagagagagctagagagacagagagaagaggagcggcggaaagagatagagaggagagaagcagcgaagagggagctggagcgccagaggcagctggagtgggagaggaatagacgccaggagctgctaaaccagagaaataaagagcaggaagacatcgtcgtgctgaaggctaaaaaaaagactctcgaatttgaactggaagcactcaacgataaaaaacatcagctcgaaggaaagttgcaagatataagatgtagactaactactcagcggcaagagattgagagcacaaacaagagcagggagctacgcattgctgagattacccatctccagcagcaactgcaggagtcccaacaaatgctcgggaggctgatccctgagaagcagatcctgaacgaccagctgaagcaggtccagcagaactctctgcacagagacagcctggttaccctcaagagggccctggaagccaaagagctggcgagacaacatctcagagaccagcttgacgaagtggaaaaggagactcggagcaaactgcaggagatcgatatattcaataatcaattaaaggaactgcgcgaaatacacaacaagcagcaactccagaaacaaaagtctatggaggccgagcggcttaagcagaaagagcaggaaagaaaaattatagagctggagaaacaaaaggaggaagcccagaggcgggctcaggagcgggacaagcagtggctcgagcatgtgcagcaggaagacgaacaccagcgacctcgtaaactgcacgaagaggaaaagcttaagcgggaagaatccgtcaaaaaaaaggacggggaagaaaaaggcaaacaggaggctcaggataagcttgggcggctgttccatcagcatcaggagcccgctaaacccgctgtccaagctccctggtccacagcggaaaaaggccctctgaccatcagcgcccaggagaatgtgaaggtcgtttactatagggctctttacccctttgagtcgcgaagtcacgatgagataaccattcaacctggagatattgtcatggtcgacgagtcgcagaccggcgaacccggttggttgggtggggagctcaagggaaaaactggatggttcccagctaactacgccgaaaaaatacctgagaacgaagtacctgccccggtcaagcctgttaccgactccaccagcgcacccgctcccaagcttgcgctcagggaaaccccggcgccccttgcagtgacctcctctgaaccctcaaccacgcccaataattgggccgattttagctccacctggccgactagcacaaacgagaagcctgagacagataattgggatgcctgggcagcccagccatccctgactgtccccagcgcaggccaactcagacaacggtccgcatttaccccagccaccgctacagggagcagtccatccccggtcctcggtcagggagagaaggtggaaggcctacaggctcaggctttgtatccgtggcgtgccaagaaggataaccacttaaactttaataagaacgatgtcattacggttcttgagcaacaggatatgtggtggttcggggaggttcagggccagaaggggtggtttcccaaatcatacgtgaagctaatcagcggccccattcgaaagtccaccagcatggatagcgggagctctgagtctcctgccagtctgaaacgagttgcatcacctgcagctaagcccgttgtttctggggaggaattcattgccatgtacacctatgaatcatctgaacagggcgacttaacatttcagcagggagacgtgattcttgttacgaagaaggatggcgactggtggaccggaaccgtgggcgataaagccggcgtcttcccaagcaactatgtgagactaaaggattccgaaggaagtggcaccgcaggcaaaaccgggtctctgggaaagaagcccggcccttcatgcaacgtcaaatag

SEQ ID NO: 277141 - DNA, 3048 bp, Artificial Sequence
  derived and/or modified sequence
atggctcagtttcctaccccattcgggggtagcttggacatatgggctatcaccgtcgaagagcgggccaagcatgatcagcaatttcacagtctcaagccgatttccggtttcataacaggagatcaagctaggaactttttctttcagagcgggttgccccagccggttctagcacagatctgggccctggcagacatgaacaacgatggccgtatggaccaagttgaattctcaatcgctatgaagctgataaagctgaagctccagggataccagcttcctagcgcactgcctccagtaatgaagcagcaaccggtggccatcagttcggcaccggcattcggtatgggtggcatcgccagtatgccccctctgactgccgtggcccccgtgccaatgggtagcatccctgtagtggggatgtcacctacgcttgtgagcagcgtgccgaccgcggccgtgcctcctctcgccaatggagccccccctgtgatccagcctcttcccgctttcgctcatcccgccgcaacactgccaaaaagttcatcctttagtagatccgggcctggctctcagctgaacacaaaactgcagaaggcccagtcttttgatgttgcctccgtgccccccgtcgctgaatgggcagtaccacagtccagccggctgaaatacagacagctgttcaactcgcacgataaaacaatgtccggccatctcaccggtccacaggcccgtacaatcctcatgcagtcctctttgccccaggcccaactggccagcatctggaacctgtctgacatcgaccaggacggcaagctgactgccgaagaattcatattagccatgcatcttattgacgtcgctatgagcggccagcccctccccccagtgctcccacccgagtacatcccaccatcgttcagaagggtccggtcagggtccggcataagcgtgatcagcagcacatccgttgatcaaagactgcccgaggaaccagtgttagaggatgaacagcaacagctggaaaagaagctacccgttacctttgaagataagaagcgggagaattttgaacggggaaatcttgagctcgagaagaggcgacaggctctccttgaacaacagaggaaagagcaggaaaggctggcgcaattggagcgggctgaacaggaacgcaaggagcgagagagacaggaacaggagcggaaacgacagcttgagttggaaaaacagttggagaaacagcgggaactggaacgtcagagggaggaagaaagaaggaaggagattgaaagacgcgaggcagccaaaagagagctggagagacagcgccagttggaatgggaaagaaatagacgtcaggagttgctcaaccagagaaacaaagagcaggaggacatcgtagttctgaaggccaagaaaaaaaccctggaatttgagttggaagcactgaacgacaagaagcatcagctggagggcaaactacaggacattcgttgcaggctgactacccagagacaggagatcgagagtaccaataagtcacgcgagttacgcatcgcagagattacacatctgcagcagcagctacaagagagccagcaaatgctgggacgcctaatcccagagaaacaaatcctgaacgatcagctgaaacaggtgcaacagaactcattgcatagggatagcctagtcacacttaaaagagcactcgaagccaaagagctggcccgacagcatctgagagatcagttagacgaggtggagaaagaaacccgctccaagcttcaggaaatcgatatttttaataaccaactgaaagaattgcgggagatccacaacaaacagcagctgcaaaaacaaaagtctatggaagctgagaggttaaagcagaaagaacaagagcggaagataatcgaactcgagaaacaaaaagaggaggctcagcggcgcgcgcaggaaagggataaacaatggctggaacatgtgcagcaggaggacgagcatcaacgcccaaggaaacttcatgaggaagagaaactcaagcgggaggaaagtgttaaaaaaaaagacggtgaagagaagggcaagcaggaggctcaggacaagctagggcgactgtttcaccagcaccaggaaccagccaagcccgccgtgcaggccccctggagcacagctgagaaaggaccactcaccatctccgctcaggaaaatgtcaaggtggtgtactacagggctctttatcccttcgagtctcgcagccatgatgaaatcactatccagcctggggatatcgtgatggtcgatgagagccaaacgggtgagcctgggtggttaggcggcgaactgaaaggaaagacagggtggttccctgccaattatgccgagaaaatcccagaaaacgaagtgcccgctcctgtgaaacctgtaacagactcaactagtgccccggcccctaagctcgccctccgagaaacccccgccccactcgctgtgacttcaagcgagccctccacgacaccgaataattgggccgatttttcctccacctggccgacttccaccaacgagaagccggaaacggataattgggacgcctgggcagcacagcccagtctcacagtcccctcggccgggcaactgcgccagcggtccgccttcacaccagctaccgccaccggctcctcaccaagccccgttttggggcaaggtgaaaaagtcgaagggcttcaagcccaggccctgtacccatggagggccaagaaggacaaccacctcaacttcaataaaaatgacgtgataaccgtgctggaacagcaggacatgtggtggttcggcgaggtgcagggccagaagggctggttccctaagagctatgtgaagctcatctcggggcccattcgaaagtccacgtcgatggattctggctcctcagagagtccagcatcccttaagcgagtagccagccccgccgcaaaaccagtcgtgtccggagaaggcctgtggaactgctgggagaatcgtgaattcagaaagaagacttag

SEQ ID NO: 277142 - DNA, 3648 bp, Artificial Sequence
  derived and/or modified sequence
atggcccagtttccaaccccatttggggggtccctagatatttgggcaataacagtggaggaacgggccaagcatgaccagcagtttcactccctaaaaccaatttccggttttattacaggagatcaggccaggaatttcttcttccaaagtggcctgccccagccagtgctggcacagatttgggccctcgcagacatgaacaatgacggtaggatggatcaggttgagttctccatcgccatgaagctgatcaaactgaagttgcagggatatcagctgccctctgcactaccccccgtgatgaagcaacagccagtggctatcagctccgcgcccgccttcggcatgggtgggattgcatccatgccaccactgacagctgtggccccagtcccaatggggtctattcccgtggtaggaatgtctcctacgctggtgtcaagtgtgccgaccgccgccgtcccacctctggctaatggcgctccaccagtaatacagcccctcccagctttcgcccaccctgccgccaccctccctaagtcctcctcgttctcgcgtagtggccccggctcacagctaaatacaaagctgcagaaggctcagtcattcgatgtggcttcggtgccacctgtggccgaatgggcggtaccgcagtcgagtagactcaagtacaggcaactgttcaacagccacgataaaacaatgtctgggcacttaactggtcctcaagcacggacaatcctgatgcagagctccctgcctcaggctcagttggcttctatctggaacctgtcagacattgatcaggacggaaagctgaccgcagaagaatttatactggctatgcacctgatcgatgtggctatgtctggacaaccactgccacctgtgctgccgccggagtacattccccccagttttagaagggtcaggtcaggatccgggatctcagtgatttctagcacgtctgtcgaccagcgcctccctgaggagccagttctagaagatgaacagcagcagctggagaaaaaacttcctgtgactttcgaagacaaaaagcgggagaattttgagaggggaaatttggaactcgagaagcggagacaggctcttcttgagcagcaacggaaggaacaagaaagactggcacagctggagagagccgagcaggaaaggaaggagagggagcggcaagagcaggagcgaaaaaggcaactggagctagagaaacagttagagaaacaacgcgaacttgaaagacagagagaggaggagcgtaggaaagaaattgagcgccgtgaagccgcaaagcgggagctggagcgtcagagacaacttgagtgggagcgaaatagacggcaggaactcttgaatcagcgcaataaggagcaggaagacatcgtggtgctgaaagccaagaagaagactctcgagtttgaactggaggcactcaacgataagaaacatcaattggaaggcaagctccaggatatacggtgtcgattgactacacagcggcaggagatcgagtcaactaataaatctagagaactgagaatagcagagataacacacctccagcaacagctccaggagagccagcagatgctcgggagactgatacccgagaagcagatattgaacgatcagctgaagcaggtccagcagaattccctgcaccgggattccttggtgacgctcaaaagagccctggaggccaaggagttagccaggcagcatctccgcgaccagctcgacgaagtcgagaaggagactagatcgaagctgcaggaaattgacatctttaataatcaactgaaggaactccgggaaattcacaacaaacagcagcttcaaaaacagaaatctatggaagccgagaggttgaagcagaaggagcaggaaagaaagatcatcgagcttgaaaagcagaaggaagaggcacagagacgagcgcaggaacgcgacaaacagtggctggagcatgtgcagcaggaggacgagcaccagaggcctcggaaattgcacgaggaagagaagctcaagcgtgaggaatctgtcaaaaagaaagatggagaagaaaaggggaagcaggaagcccaggacaaattgggtcgtcttttccaccagcaccaggagcctgccaaaccagcggtgcaggctccctggtccacagctgagaagggtcccttgacgatttctgcccaagaaaacgttaaggtggtgtactacagagcgctgtatcctttcgagagccggagtcatgatgagattacaatccagcccggtgatatagtgatggtcgatgagagccagacaggggaacccggctggctcggaggtgagctcaagggcaaaaccggatggtttcctgctaactatgccgagaaaatacccgagaatgaggtgccggccccagtgaaacccgtgacggattccaccagcgcacccgcccctaaactagctttgcgcgagactccggcacccctggccgtcacgtcctcagaaccgagtacgacaccaaacaactgggcggacttttcttcaacgtggccgacttctaccaatgaaaagcccgagaccgataactgggacgcatgggcagcacagccttctctgacggtacccagcgcaggccagcttcgccaacgctccgccttcactccagctacagcaacaggaagttcaccatcacctgtccttggccagggagagaaagttgaaggtctccaggcacaggcactatacccatggagagccaaaaaagataaccatttgaactttaacaaaaatgacgtgattactgtgctggaacagcaagatatgtggtggttcggggaggtccaagggcagaaaggatggttcccaaagagctatgttaaactaatatccggccctatcagaaagtctacctccatggactccgggagctccgagtcccccgcaagccttaagcgcgtggcctccccggccgccaagcccgtagtcagcggggaagagttcattgccatgtatacatatgaatcatctgaacagggcgatttgacattccagcagggcgatgtgattctggtaactaagaaagacggggactggtggactggcacagttggagacaaggccggcgttttccctagcaactatgtgagactcaaagactccgagggatcagggaccgctgggaaaaccggatcgcttggtaaaaagcccgagattgcccaggtgattgcatcctataccgcaaccgggccagaacagctcaccctggcgcccggacaactcattcttattaggaaaaagaaccctggcggctggtgggaaggtgagctccaagcgcgcggtaagaaacgtcagatcgggtggtttcctgctaactacgttaaactgttgtccccgggtacgtcaaagataaccccaactgagcccccaaagtctactgctttggccgcagtttgtcaggtgatcggtatgtacgattacactgcacaaaatgacgacgagctggctttcaacaaggggcagataattaatgtgctgaacaaagaggatcctgactggtggaagggggaggtaaatggccaggtggggctgtttccatctaattatgtgaagctcaccaccgacatggacccaagtcagcagtag

SEQ ID NO: 277143 - DNA, 3537 bp, Artificial Sequence
  derived and/or modified sequence
atggcccagtttccgactccctttggcggatcactcgacatatgggcaatcacagtggaagaaagggcaaaacatgaccagcagttccacagtctgaaacccatctccggattcattacaggagaccaggcgagaaactttttctttcagtccggcctaccacagccagtgttagctcagatatgggccctggcagacatgaacaacgatggccgtatggaccaggtcgaattcagcattgcgatgaaactgattaaactgaagttgcagggatatcagctgcctagtgccctgcctccagtcatgaagcagcagcccgttgccatctcgagtgcccctgcctttgcagccgtgccacccctcgctaacggcgctccccctgtgattcagccgctcccggcatttgcacacccggccgctacactgccaaagagttcctccttcagtcgctcaggccccgggtctcagctgaacacaaaattacagaaagcgcagtccttcgacgtggcatccgtgccacccgtggccgagtgggccgtgccccagtctagtcgtctcaagtacaggcaactctttaattctcacgataaaacgatgtccgggcatttaacagggccccaagcaagaactatactgatgcagtcttcactgccacaggcccagttggcctccatctggaacctgagcgatatcgatcaggatggtaagttaacagctgaagaattcattcttgccatgcacttgattgatgttgccatgtccggccagccgctacctcctgtgcttcccccagagtacattcctccatccttccgccgagtccggtcgggctctgggatctccgtcatctctagcaccagcgtcgaccaacgactgcctgaggagccagtgctcgaggatgagcaacaacagctggaaaaaaagctgcctgtgacattcgaggataaaaagcgggaaaactttgagagagggaatctggaactcgagaaaaggaggcaggcattactggaacagcagcgaaaggaacaagagcgtctggcgcagcttgagcgagccgagcaggagagaaaggagcgggagaggcaggagcaagagcgcaaaagacagctggagctggagaagcaactcgagaaacagcgagagctcgagaggcagcgcgaggaggaacggagaaaagaaattgagcgacgtgaggctgcgaaaagagagcttgagcgtcagcgccagctggagtgggagcgcaatagaagacaggagctgctgaaccagcggaataaggaacaggaggatatcgtcgtcttgaaagctaagaagaaaacactcgagtttgaactcgaggccctaaatgacaaaaaacaccagcttgagggaaagctccaggatatcaggtgtaggctcactacccagaggcaggaaattgaatctactaacaaatcccgcgaactgcgcattgctgaaatcacacatctacagcaacagttgcaggagtctcagcagatgttaggcaggcttattcctgagaagcagatcttgaacgatcaattaaaacaagtgcagcagaatagcctgcatcgggacagcctagtgacattgaaaagagccctggaagccaaggaactggcacgccagcacctcagggaccagctggatgaggtcgaaaaagagacccgctccaagctccaggagatcgatatttttaacaatcagctgaaagagttgcgtgaaatacacaacaagcaacagttacagaagcagaagtccatggaagcagaaaggcttaagcagaaggagcaggaacgcaagatcattgaactcgaaaaacaaaaggaggaagctcaaagacgggcccaagagagagataaacaatggttggagcacgtgcaacaggaagatgaacatcagagacctcgtaaacttcatgaggaggagaaactgaagagggaagaaagcgtgaaaaagaaggacggagaggaaaagggcaaacaggaagcacaggacaagcttgggcggctttttcaccaacaccaggaacccgccaagcctgccgtacaagccccctggagtactgcagaaaaagggccactgaccatttccgctcaggaaaatgttaaggtcgtgtactaccgcgccttgtacccttttgaatcccggagtcatgatgagataaccatacagccgggcgacatcgtgatggtcgatgagagccagaccggcgaacctggctggctgggcggtgagctgaaaggtaagaccggctggtttcccgcaaattacgctgagaaaataccggagaacgaagtgccagcgcctgtgaaaccagtgacagattccactagtgccccggcgcctaaacttgccttaagggagacccccgcaccactggccgttacctctagcgaacccagtaccacacccaataattgggctgacttcagctcgacatggcctacttctactaatgaaaaacccgaaaccgacaactgggacgcctgggccgctcagccgtcactaactgtgcctagcgctggtcagcttcggcaacggagcgcctttacacccgcaaccgcaaccggctcgtctcctagcccagtgctgggacagggcgaaaaagtggaaggcttacaagcccaagccctgtacccttggcgggccaaaaaggataatcacctgaattttaacaaaaacgatgttatcacagtactggagcagcaggacatgtggtggtttggagaagtccaggggcagaaaggatggtttcccaagtcatatgtgaaactgatcagtggaccaattcgaaagagcacaagtatggatagtgggagttcagaatcccctgcaagtctgaagagagtggcgtccccagcagccaaacccgtggtgagcggggaggaattcatcgctatgtatacctacgagtccagcgagcagggggacctgacttttcagcagggggacgtgattctcgtgacaaagaaggatggcgattggtggactggcactgtgggggacaaggccggcgtgtttccaagtaactatgtgcgcctaaaggactccgaaggaagcgggaccgcaggaaagactgggtcactggggaaaaagcctgagatagctcaagtgatagccagctatacggcaaccgggcccgaacagttgacactggctcccgggcagctgattctgatacggaaaaagaatccaggggggtggtgggaaggcgagctccaggcacgcggcaagaagaggcaaatcggttggtttcccgccaattacgtgaaacttctgagtcctggaacaagtaagattacacccaccgagcctccaaagtctactgctctggccgcagtctgccaagtgatcggtatgtatgactatacagcgcagaacgatgacgaattggcatttaataaaggccagattattaacgtccttaacaaggaagacccagactggtggaagggggaagtcaatgggcaggtgggcttgttcccttcgaattacgttaaactcacaacagatatggacccttcccagcagtag

SEQ ID NO: 277144 - DNA, 5151 bp, Artificial Sequence
  derived and/or modified sequence
atggctcagttcccgacccccttcggaggctcattggacatatgggctattactgtcgaagagcgtgctaagcatgaccagcagtttcacagtctgaaacctatctcgggttttatcacaggtgatcaggcacgaaacttcttctttcagtctggactccctcagcctgtgctggcccagatctgggctcttgccgatatgaacaacgatggaaggatggaccaagtggagttcagtatcgccatgaaactgattaaactcaagttgcaaggatatcagttgccaagtgctttgccccctgttatgaaacaacagcccgtagctattagttctgctcccgcgttcggtatgggcggcatcgcctccatgccaccactgaccgctgttgcaccagtccctatgggttctattcccgtggtcgggatgtctccaacattggtgtccagtgtgcccacagctgccgtacctccactggcaaacggcgccccaccagtgatacagccattgcctgcatttgcgcatcccgctgctaccttgccaaagagttctagttttagtcgttctggaccggggtcccagctgaacacgaaattgcagaaggcccagtcatttgatgtagccagcgttcctcccgttgcagaatgggcagtccctcagagctccaggctgaaataccgccagctgttcaattcccatgataaaacaatgagtggacatctgacagggcctcaggcgcggactatcctcatgcaaagcagcctgcctcaagctcaactcgcctcgatctggaatctgtctgatattgaccaggacggcaaactgactgccgaggaatttatcttggcgatgcatttgattgacgtggccatgagtggacagccacttccacctgtcctgccacccgaatatattcctccctcttttagacgcgtccgtagtggtagtggcatcagcgtgatctcctcaacatccgtggaccagcgtctgcctgaggagccagttctagaggacgaacaacagcaactcgagaagaagcttcccgtcacgtttgaagacaagaagcgggagaactttgagagggggaacctggagctcgagaagagaaggcaggctcttctggaacagcaaaggaaggagcaggaacgccttgcccagctggagcgagctgaacaagaacggaaggagcgtgagcggcaggagcaggaacgaaaaaggcaattggagcttgagaagcaactcgagaagcagagagaactggagcgacagcgcgaggaggaacgaaggaaggaaattgaaagaagagaggccgctaagcgggaattagagagacagagacagttagagtgggagcggaataggaggcaggaactgctaaaccaaagaaacaaggagcaggaggatattgttgttctgaaggccaaaaaaaagactctggaatttgaactggaggctcttaacgacaagaaacatcagctggaagggaaactccaagatatcagatgccgtcttacgacccaacgccaggagattgagtcaacaaataaaagtcgcgaactaagaattgctgaaatcacccacctgcagcagcagctgcaagagagccagcaaatgctcggacgactgattccggagaaacagattctgaatgatcagctgaagcaggtgcagcagaacagcctgcatagggatagccttgtcactctcaagagagcattggaagcgaaggagctcgctcgacagcatttgcgagaccagctggatgaagtcgaaaaggagacgcgctctaaattgcaggaaatcgacatatttaacaaccagttaaaggaactgcgagagatccataataagcagcaacttcagaaacagaaatccatggaggccgaacggctgaagcagaaggaacaggaaaggaagatcattgagctcgagaaacagaaagaggaggctcagagacgggcccaggaaagagataagcagtggcttgagcatgtgcaacaggaagatgagcaccagcggcccagaaagctgcacgaagaggagaagcttaagcgagaggagtctgtcaagaaaaaggacggcgaagaaaagggtaagcaagaggctcaagacaaactgggccgactgttccaccagcaccaggaacctgccaagcccgctgtgcaggctccctggtctactgctgagaaggggcctctgactataagtgcccaagagaatgtcaaggtcgtctactatcgtgcgctgtaccctttcgagtctaggagtcatgatgagatcactatacagccaggggacatcgtgatggttgacgaatctcaaaccggggaacctgggtggcttgggggagaacttaaaggtaagactggatggtttccagcaaattacgccgaaaagatacctgagaatgaagtgcccgccccagtgaagccagtgacagactccacctccgcgcccgcccccaagctagcactcagagagacaccagctcccctggcagtgacttcctcagaaccttccacaacacccaataattgggcagacttctccagcacctggcctactagcactaacgagaagcctgagaccgataactgggatgcctgggcggcccagccctccctaactgtgccgagcgccggacagctcagacaaagatccgcattcactcctgctacagccactggtagctcaccttctccagtgttgggtcagggtgaaaaagtggagggtctgcaggcccaggctttgtacccctggcgtgctaagaaagataaccatttgaactttaataaaaatgatgtaatcactgtcttagagcagcaagatatgtggtggtttggcgaagtgcaaggccaaaaaggatggtttccaaaatcttacgtaaagctcatatctggaccaatccgcaagtctacttcaatggacagcggttcctcggaatcacctgcctccttgaagagggtcgcaagcccagctgcaaagcctgtcgtttctggcgaggagtttattgccatgtatacctatgaatcctctgaacaaggcgatttgacattccagcagggcgatgtaatcctcgtaacgaagaaggatggagactggtggacagggacagtgggcgataaggcgggggtgttcccttccaattacgtgcgcctaaaggatagcgaggggtctggcactgctggcaagacgggaagcctaggtaagaagcccgaaatcgcacaggtgatagccagctataccgccacaggccctgagcaactgaccctggctccgggtcaactcatcctgatccggaaaaagaatcctggcggctggtgggagggggaactccaagccagagggaaaaagcgccagatcgggtggtttcccgctaattatgtgaaattgctgtcacctgggaccagcaagattacccctacagaaccccccaagtctaccgcactggccgctgtctgccaggtcattggcatgtacgattacactgctcagaatgacgatgaactcgcattcaataagggacagattattaacgtccttaacaaggaagatccagactggtggaagggcgaagtcaatggtcaggtgggtttgtttcctagcaattatgtgaaactcacaactgatatggatccgagccaacaatggtgctctgacctgcatctgctggacatgcttactcctactgagaggaagcgacagggatatatacacgagcttatagtaaccgaggaaaattacgtgaatgacctccaattagttactgagatcttccaaaaacccctcatggagtcggagctgcttactgagaaagaggtggctatgatattcgtgaattggaaggagctcattatgtgcaatatcaagttactcaaggcactgcgcgtgaggaaaaagatgtcgggtgaaaagatgccggtaaaaatgatcggcgatatcctgagcgctcagctccctcacatgcagccatatatacgattttgctctcggcagctcaatggtgccgccttgattcagcagaaaaccgacgaagctcctgactttaaagagttcgtaaagagactagctatggatccaagatgtaagggcatgcccctcagttccttcatactaaagcctatgcagcgagtgactagatacccgctgatcatcaagaacatcctcgaaaatacacctgaaaatcaccctgaccacagccatctcaaacacgcccttgaaaaagcagaggaactgtgctcacaagtgaatgaaggtgtgagagagaaggagaatagcgaccgattagaatggattcaagcccacgtccagtgtgaaggacttagcgagcaactagtctttaattctgtgaccaattgtctgggaccacggaaatttcttcattctgggaagttgtacaaggccaaatcgaacaaagaattatatggatttctcttcaatgactttctcctgcttacccaaattaccaagcctctgggctccagcggaacggataaggtatttagcccaaagtccaacctccagtacaagatgtataagacaccaatttttctgaacgaagtgttagtgaaactgcctactgatcctagcggggatgagcctatattccatatctcgcacatcgacagagtgtacacacttcgagcagagtcgattaatgagaggacggcctgggtgcagaaaatcaaggccgcttctgagctctatattgaaaccgagaaaaagaagcgtgaaaaggcttacctggttcgatctcagcgagctacaggcattggacgccttatggtgaatgtggtcgaaggaatcgagttgaaaccctgccggtcccacgggaagtcaaatccctactgcgaagtaacgatgggctcccagtgtcatatcacgaagaccatccaagacacgctcaatcctaaatggaattctaattgtcagttcttcatcagggatctcgaacaggaggtgctctgcatcactgtgtttgaaagggaccagttcagcccagatgatttcttgggcagaactgaaattagggtggctgatattaaaaaggaccagggctccaaaggccctgtgaccaaatgtctgctcctccacgaagtgccaactggcgaaattgtggtgcgcctggacctgcagctgttcgatgagccgtag

SEQ ID NO: 277145 - DNA, 4983 bp, Artificial Sequence
  derived and/or modified sequence
atggcgcagttcccgaccccattcgggggatctctggacatttgggctattaccgtggaagaaagggctaaacacgaccaacagtttcacagccttaagcctatttccgggttcattactggagaccaggctcgtaactttttcttccagtccggcttgccacagccggtgcttgctcagatttgggctttagctgatatgaacaatgatggccgcatggaccaggtggagtttagcatcgctatgaagcttatcaagcttaagctccaaggttatcagctgccctcagcactcccgcctgtgatgaagcagcagccggtggcaatcagttcagctccagcatttggaatgggaggaatcgcgtcaatgcctccattgactgcagtcgctcctgtacccatgggatctatccccgtagtcggcatgagtcccacgctcgtctcgagcgttccgacagctgctgtgccacccctggccaatggcgcaccccctgtgatccaacccctgccagcattcgcccacccggcggcaaccttgcccaaatcgtcctctttttccagatctggcccaggatctcaactgaatacaaagcttcaaaaggcccagtctttcgacgtggcctcggtcccgccggtggctgagtgggccgtgccgcagtcatcgcgtctgaagtatcgccaactgtttaactcacacgacaagactatgagcggtcatcttactggcccgcaagctcggactatactgatgcagagctctctccctcaggcacagctggctagtatatggaacctgagtgacattgatcaagacgggaaactcaccgctgaagaatttattctggccatgcatctaatcgacgtagccatgtccggccaacctctgcctcctgtgctgcctcctgaatatatccccccttcattccggcgcgtgcgatcaggaagtggcatcagcgtcatcagcagtacctctgtcgaccagaggttgcccgaagagccagttctggaggatgagcaacagcagttggagaaaaagctccccgtgacctttgaggacaagaaaagggagaattttgaacgcggaaatctcgagttagagaagcgccgccaagcactgttagaacagcagcggaaggagcaggaaagactcgctcagcttgagcgggctgaacaggagcgtaaagagagggagaggcaggagcaagagcgcaagaggcaactggagctcgaaaagcagcttgagaagcagcgcgaactcgaacgacaacgggaggaagaaagacgcaaggaaatagaaagacgggaagcagccaagcgcgagctcgaacgccagcggcagttagagtgggaacggaaccgtcgtcaagagctcctgaatcagcgcaacaaagaacaggaggatatagtagtcctgaaggcaaaaaagaaaaccctggagttcgagctcgaggccctcaatgacaaaaagcaccagcttgaaggcaagctgcaggatatcaggtgccgcctgaccacacagcggcaggagattgagagtactaataagtccagggagctgcggatagcggagattacccatctgcagcaacaactgcaggagagtcagcaaatgctcgggcggttgattcctgaaaagcagatcctgaacgaccagttgaaacaggtgcaacagaacagcctgcacagggactctctcgtcacactgaagcgagccctggaagctaaggagcttgctcggcagcaccttagggaccaactggatgaggtcgagaaagagacaagatctaagctccaggaaattgacatatttaacaatcagctaaaggagttgcgtgaaattcacaacaaacagcagcttcagaaacagaaatccatggaggctgagaggctcaagcagaaggagcaggagcggaagattattgagctggaaaaacagaaagaggaggcacagcgcagggcacaggagcgggacaagcaatggctcgagcacgtgcaacaggaagacgagcatcagagaccccggaaattgcatgaggaagagaagctgaaaagggaagaatccgtcaaaaagaaggacggagaagaaaagggtaagcaggaggcccaagataagctggggcgtctgttccaccagcaccaggaacccgccaagcccgcagtccaggccccatggagcactgccgagaaggggccgctgactatctccgcacaggaaaacgtgaaagtggtgtactatagagcactgtacccattcgagtcccgatctcacgacgagatcactatccagccaggggacattgtgatggtagacgagtcccagaccggagaacctggatggcttggtggagaactgaaggggaaaactgggtggttcccagccaattacgccgagaagatccccgagaatgaggtccccgccccagttaaacccgtcaccgactcgaccagcgctcccgcaccaaaactagcactacgcgagactcctgcgcctctggctgtcacatctagcgagccttcaaccacacccaataattgggcagatttctccagtacatggcccactagtactaatgagaaacccgagaccgacaactgggacgcctgggccgcccagccaagtctgactgtcccttctgctggccagctgaggcagaggagtgccttcacacctgctacggcaaccggaagctctcccagccccgtcctgggccagggcgaaaaagtagaaggccttcaggcccaagccctctatccatggcgggccaagaaggataatcacttgaatttcaataagaacgacgttatcacggtgcttgaacagcaggatatgtggtggtttggcgaggtccagggacagaagggctggtttcccaaaagctatgtcaagctaatatccgggcccatcagaaaaagtacttctatggactcagggtcatcagagagtcccgcctcacttaaacgagtggcttcccccgcagccaaacctgtcgtttctggggaggagtttattgcgatgtatacttacgagagtagtgaacagggagaccttacctttcagcagggagatgtcatcctggtcactaagaaggatggagactggtggactggcacagtgggagataaggcgggcgtattcccttccaactatgtgcggctgaaagatagcgagggttctggtacagccggaaagacaggtagtctgggaaagaaaccggagatcgcacaggtgatcgccagctatacagccaccggaccggaacaacttaccctggcacccggccagctgatacttattagaaaaaaaaatcccggtggctggtgggagggcgagctacaagctcgaggaaagaaacgacagatcggctggtttccagcgaactatgtcaagttattgtccccaggaacaagtaaaatcaccccaaccgagccaccgaagagcacggctctggcagccgtgtgccaagtaataggaatgtacgactatactgcgcagaatgatgacgaactggccttcaataaaggccagattatcaatgtgttgaataaagaggaccccgattggtggaagggagaggttaacggacaggtagggttgtttcccagcaattacgtaaaattaacaactgacatggatcctagccagcaatggtgcagcgaccttcatttgctcgacatgctcacccccacagaacggaagcggcagggatatattcacgaattaattgtcactgaagaaaattacgtgaatgatctccagctggtgaccgagatatttcaaaagcccctgatggagtccgagcttctgactgagaaggaggtggccatgatttttgtgaattggaaggagctcattatgtgtaacatcaagctgctaaaggccttgcgggtacgaaagaagatgagcggcgagaaaatgcccgtcaaaatgattggtgacatcctgtctgctcagctaccccacatgcagccttatatccgattctgctcacgccagctgaacggggctgctttgatccaacaaaagaccgatgaagctcccgattttaaagagttcgtaaagcgactggcaatggatcctcgatgtaaagggatgcctctgtcgtctttcatcctgaaacccatgcagcgcgtcacgcggtacccactgatcattaaaaaccagctcgtattcaattcagtaacaaactgcctcggcccccggaaatttctgcactccggtaaactttacaaggctaagtcaaataaggagctttacgggtttcttttcaacgactttctacttctgactcagatcacgaagcctctcggctcttctggcaccgacaaggtattctctccgaaatccaacctccagtataaaatgtataagacccccatcttcctgaatgaggtcttggtgaagctgccgaccgatcccagcggcgatgagcctatcttccatatttctcacatcgatagagtgtatactctaagggcggaatcaattaacgagcgcaccgcatgggtgcagaaaatcaaggctgcttcagaactctacatcgaaacagaaaagaagaaacgggaaaaggcatatctggttagaagccagcgggcaacggggatcggaaggttgatggttaacgtcgttgagggcatagaacttaagccatgccgatcgcacggtaagagcaatccatattgtgaggtgaccatgggctcacagtgccatattaccaaaactatccaggatacactgaatccgaagtggaatagcaattgtcagttctttatcagggacctggagcaagaggtgctctgcattaccgtgttcgaacgtgatcagtttagtcctgacgactttcttgggcgaacagaaatccgtgtggcagacataaaaaaggatcaaggaagcaaagggccggtgaccaaatgtcttctgctgcacgaagtgccaacaggcgagattgtcgtccgcttggacctacagctttttgacgagccctag

SEQ ID NO: 277146 - DNA, 949 bp, Artificial Sequence
  derived and/or modified sequence
acccctgatggagtctgagctgctgacagaaaaagaggttgctatgatttttgtgaactggaaggagctgattatgtgtaatatcaaactactaaaagcgctgagagtccgcaagaagatgtccggggagaagatgcctgtgaagatgattggagacatcctgagcgcacagctgccgcacatgcagccctacatccgcttctgcagccgccagctcaacggggctgccctgatccagcagaagacggatgaggccccagacttcaaggagttcgtcaaaagattggcaatggatcctcggtgtaaagggatgccactctctagttttatactgaagcctatgcaacgggtaacaagatacccactgatcattaaaaatcaacttgtgttcaattcagtgaccaattgcttggggccgcgcaaatttctgcacagtgggaagctctacaaggccaagagcaacaaggagctgtatggcttccttttcaacgacttcctcctgctgactcagatcacgaagcctttggggtcttctggcaccgacaaagtcttcagccccaaatcaaacctgcagtataaaatgtataaaacacctattttcctaaatgaggttctagtaaaattacccaccgacccttctggagacgagcccatcttccacatctcccacattgaccgcgtctatactctccgagcagaaagcataaatgaaaggactgcctgggtgcagaaaatcaaagctgcttctgaactctacatagagactgagaaaaagaagcgcgagaaagcgtacctggtccgttcccaaagggcaacaggcattggaaggttgatggtgaacgtggttgaaggcatcgagttgaaaccctgtcggtcacatggaaagagcaacccgtactgtgaggtgaccatgggttcccagtgccacatcaccaagacgatccaggac

SEQ ID NO: 277147 - DNA, 3505 bp, Artificial Sequence
  derived and/or modified sequence
gagcgagggagggagcgaaggaggtagagaagagtggaggcgccaggggagggagcgtagcttggttgctccgtagtacggcggctcgcgaggaagaatcccgagcgggctccgggacggacagagaggcgggcggggatggtgtgcggggctgcggctcctgcgtccctcccagcggcgcgtgagcggcactgatttgtccctggggcggcagcgcggacccgcccggagatgaggcgtcgattagcaaggtaaaagtaacagaaccatggctcagtttccaacaccttttggtggcagcctggatatctgggccataactgtagaggaaagagcgaagcatgatcagcagttccatagtttaaagccaatatctggattcattactggtgatcaagctagaaactttttttttcaatctgggttacctcaacctgttttagcacagatatgggcactagctgacatgaataatgatggaagaatggatcaagtggagttttccatagctatgaaacttatcaaactgaagctacaaggatatcagctaccctctgcacttccccctgtcatgaaacagcaaccagttgctatttctagcgcaccagcatttggtatgggaggtatcgccagcatgccaccgcttacagctgttgctccagtgccaatgggatccattccagttgttggaatgtctccaaccctagtatcttctgttcccacagcagctgtgccccccctggctaacggggctccccctgttatacaacctctgcctgcatttgctcatcctgcagccacattgccaaagagttcttcctttagtagatctggtccagggtcacaactaaacactaaattacaaaaggcacagtcatttgatgtggccagtgtcccaccagtggcagagtgggctgttcctcagtcatcaagactgaaatacaggcaattattcaatagtcatgacaaaactatgagtggacacttaacaggtccccaagcaagaactattcttatgcagtcaagtttaccacaggctcagctggcttcaatatggaatctttctgacattgatcaagatggaaaacttacagcagaggaatttatcctggcaatgcacctcattgatgtagctatgtctggccaaccactgccacctgtcctgcctccagaatacattccaccttcttttagaagagttcgatctggcagtggtatatctgtcataagctcaacatctgtagatcagaggctaccagaggaaccagttttagaagatgaacaacaacaattagaaaagaaattacctgtaacgtttgaagataagaagcgggagaactttgaacgtggcaacctggaactggagaaacgaaggcaagctctcctggaacagcagcgcaaggagcaggagcgcctggcccagctggagcgggcggagcaggagaggaaggagcgtgagcgccaggagcaagagcgcaaaagacaactggaactggagaagcaactggaaaagcagcgggagctagaacggcagagagaggaggagaggaggaaagaaattgagaggcgagaggctgcaaaacgggaacttgaaaggcaacgacaacttgagtgggaacggaatcgaaggcaagaactactaaatcaaagaaacaaagaacaagaggacatagttgtactgaaagcaaagaaaaagactttggaatttgaattagaagctctaaatgataaaaagcatcaactagaagggaaacttcaagatatcagatgtcgattgaccacccaaaggcaagaaattgagagcacaaacaaatctagagagttgagaattgccgaaatcacccatctacagcaacaattacaggaatctcagcaaatgcttggaagacttattccagaaaaacagatactcaatgaccaattaaaacaagttcagcagaacagtttgcacagagattcacttgttacacttaaaagagccttagaagcaaaagaactagctcggcagcacctacgagaccaactggatgaagtggagaaagaaactagatcaaaactacaggagattgatattttcaataatcagctgaaggaactaagagaaatacacaataagcaacaactccagaagcaaaagtccatggaggctgaacgactgaaacagaaagaacaagaacgaaagatcatagaattagaaaaacaaaaagaagaagcccaaagacgagctcaggaaagggacaagcagtggctggagcatgtgcagcaggaggacgagcatcagagaccaagaaaactccacgaagaggaaaaactgaaaagggaggagagtgtcaaaaagaaggatggcgaggaaaaaggcaaacaggaagcacaagacaagctgggtcggcttttccatcaacaccaagaaccagctaagccagctgtccaggcaccctggtccactgcagaaaaaggtccacttaccatttctgcacaggaaaatgtaaaagtggtgtattaccgggcactgtacccctttgaatccagaagccatgatgaaatcactatccagccaggagacatagtcatggtggatgaaagccaaactggagaacccggctggcttggaggagaattaaaaggaaagacagggtggttccctgcaaactatgcagagaaaatcccagaaaatgaggttcccgctccagtgaaaccagtgactgattcaacatctgcccctgcccccaaactggccttgcgtgagacccccgcccctttggcagtaacctcttcagagccctccacgacccctaataactgggccgacttcagctccacgtggcccaccagcacgaatgagaaaccagaaacggataactgggatgcatgggcagcccagccctctctcaccgttccaagtgccggccagttaaggcagaggtccgcctttactccagccacggccactggctcctccccgtctcctgtgctaggccagggtgaaaaggtggaggggctacaagctcaagccctatatccttggagagccaaaaaagacaaccacttaaattttaacaaaaatgatgtcatcaccgtcctggaacagcaagacatgtggtggtttggagaagttcaaggtcagaagggttggttccccaagtcttacgtgaaactcatttcagggcccataaggaagtctacaagcatggattctggttcttcagagagtcctgctagtctaaagcgagtagcctctccagcagccaagccggtcgtttcgggagaagaatttattgccatgtacacttacgagagttctgagcaaggagatttaacctttcagcaaggggatgtgattttggttaccaagaaagatggtgactggtggacaggaacagtgggcgacaaggccggagtcttcccttctaactatgtgaggcttaaagattcagagggctctggaactgctgggaaaacagggagtttaggaaaaaaacctggtccctcctgtaacgtgaaataa

SEQ ID NO: 277148 - DNA, 5408 bp, Artificial Sequence
  derived and/or modified sequence
aggaggtagagaagagtggaggcgccaggggagggagcgtagcttggttgctccgtagtacggcggctcgcgaggaagaatcccgagcgggctccgggacggacagagaggcgggcggggatggtgtgcggggctgcggctcctgcgtccctcccagcggcgcgtgagcggcactgatttgtccctggggcggcagcgcggacccgcccggagatgaggcgtcgattagcaaggtaaaagtaacagaaccatggctcagtttccaacaccttttggtggcagcctggatatctgggccataactgtagaggaaagagcgaagcatgatcagcagttccatagtttaaagccaatatctggattcattactggtgatcaagctagaaactttttttttcaatctgggttacctcaacctgttttagcacagatatgggcactagctgacatgaataatgatggaagaatggatcaagtggagttttccatagctatgaaacttatcaaactgaagctacaaggatatcagctaccctctgcacttccccctgtcatgaaacagcaaccagttgctatttctagcgcaccagcatttggtatgggaggtatcgccagcatgccaccgcttacagctgttgctccagtgccaatgggatccattccagttgttggaatgtctccaaccctagtatcttctgttcccacagcagctgtgccccccctggctaacggggctccccctgttatacaacctctgcctgcatttgctcatcctgcagccacattgccaaagagttcttcctttagtagatctggtccagggtcacaactaaacactaaattacaaaaggcacagtcatttgatgtggccagtgtcccaccagtggcagagtgggctgttcctcagtcatcaagactgaaatacaggcaattattcaatagtcatgacaaaactatgagtggacacttaacaggtccccaagcaagaactattcttatgcagtcaagtttaccacaggctcagctggcttcaatatggaatctttctgacattgatcaagatggaaaacttacagcagaggaatttatcctggcaatgcacctcattgatgtagctatgtctggccaaccactgccacctgtcctgcctccagaatacattccaccttcttttagaagagttcgatctggcagtggtatatctgtcataagctcaacatctgtagatcagaggctaccagaggaaccagttttagaagatgaacaacaacaattagaaaagaaattacctgtaacgtttgaagataagaagcgggagaactttgaacgtggcaacctggaactggagaaacgaaggcaagctctcctggaacagcagcgcaaggagcaggagcgcctggcccagctggagcgggcggagcaggagaggaaggagcgtgagcgccaggagcaagagcgcaaaagacaactggaactggagaagcaactggaaaagcagcgggagctagaacggcagagagaggaggagaggaggaaagaaattgagaggcgagaggctgcaaaacgggaacttgaaaggcaacgacaacttgagtgggaacggaatcgaaggcaagaactactaaatcaaagaaacaaagaacaagaggacatagttgtactgaaagcaaagaaaaagactttggaatttgaattagaagctctaaatgataaaaagcatcaactagaagggaaacttcaagatatcagatgtcgattgaccacccaaaggcaagaaattgagagcacaaacaaatctagagagttgagaattgccgaaatcacccatctacagcaacaattacaggaatctcagcaaatgcttggaagacttattccagaaaaacagatactcaatgaccaattaaaacaagttcagcagaacagtttgcacagagattcacttgttacacttaaaagagccttagaagcaaaagaactagctcggcagcacctacgagaccaactggatgaagtggagaaagaaactagatcaaaactacaggagattgatattttcaataatcagctgaaggaactaagagaaatacacaataagcaacaactccagaagcaaaagtccatggaggctgaacgactgaaacagaaagaacaagaacgaaagatcatagaattagaaaaacaaaaagaagaagcccaaagacgagctcaggaaagggacaagcagtggctggagcatgtgcagcaggaggacgagcatcagagaccaagaaaactccacgaagaggaaaaactgaaaagggaggagagtgtcaaaaagaaggatggcgaggaaaaaggcaaacaggaagcacaagacaagctgggtcggcttttccatcaacaccaagaaccagctaagccagctgtccaggcaccctggtccactgcagaaaaaggtccacttaccatttctgcacaggaaaatgtaaaagtggtgtattaccgggcactgtacccctttgaatccagaagccatgatgaaatcactatccagccaggagacatagtcatggtggatgaaagccaaactggagaacccggctggcttggaggagaattaaaaggaaagacagggtggttccctgcaaactatgcagagaaaatcccagaaaatgaggttcccgctccagtgaaaccagtgactgattcaacatctgcccctgcccccaaactggccttgcgtgagacccccgcccctttggcagtaacctcttcagagccctccacgacccctaataactgggccgacttcagctccacgtggcccaccagcacgaatgagaaaccagaaacggataactgggatgcatgggcagcccagccctctctcaccgttccaagtgccggccagttaaggcagaggtccgcctttactccagccacggccactggctcctccccgtctcctgtgctaggccagggtgaaaaggtggaggggctacaagctcaagccctatatccttggagagccaaaaaagacaaccacttaaattttaacaaaaatgatgtcatcaccgtcctggaacagcaagacatgtggtggtttggagaagttcaaggtcagaagggttggttccccaagtcttacgtgaaactcatttcagggcccataaggaagtctacaagcatggattctggttcttcagagagtcctgctagtctaaagcgagtagcctctccagcagccaagccggtcgtttcgggagaagaatttattgccatgtacacttacgagagttctgagcaaggagatttaacctttcagcaaggggatgtgattttggttaccaagaaagatggtgactggtggacaggaacagtgggcgacaaggccggagtcttcccttctaactatgtgaggcttaaagattcagagggctctggaactgctgggaaaacagggagtttaggaaaaaaacctgaaattgcccaggttattgcctcatacaccgccaccggccccgagcagctcactctcgcccctggtcagctgattttgatccgaaaaaagaacccaggtggatggtgggaaggagagctgcaagcacgtgggaaaaagcgccagataggctggttcccagctaattatgtaaagcttctaagccctgggacgagcaaaatcactccaacagagccacctaagtcaacagcattagcggcagtgtgccaggtgattgggatgtacgactacaccgcgcagaatgacgatgagctggccttcaacaagggccagatcatcaacgtcctcaacaaggaggaccctgactggtggaaaggagaagtcaatggacaagtggggctcttcccatccaattatgtgaagctgaccacagacatggacccaagccagcaatgaatcatatgttgtccatccccccctcaggcttgaaagtcctcaaagagacccactatcccatatcactgcccagagggatgatgggagatgcagccttgatcatgtgacttccagcatgatcacctactgccttctgagtagaagaactcactgcagagcagtttacctcattttaccttagttgcatgtgatcgcaatgtttgagttattacttgcagagataggagcaaaaattacaaaaacacacagggtagtgggtccttttgtggctttcctagttactcaaattgactttcccccacctttgcacaggtgctttcaatagttttaaaattatttttaaatatatattttagctttttaataaacaaaataaataaatgacttctttgctattttggttttgcaaaaagacccactatcaaggaatgctgcatgtgctattaaaaattgttccaaatgtccataaatctgagacttgatgtattttttcattttgtccagtgttaccaactaaattgtgcagtttggggcttttcccccttaccatagaagtgcagaggagttcagtatctctgttttaaagacgtatagaatgagcccaattaaagcgaaggtgtttgtgcttgtttgtgtgtatcagctgtaccttgttgagcatgtaatacatcctgtacataagaaattagttctttccatggcaaagctattaccttgtacgatgctctaatcatattgcatttaattttattttgcacagtgaccttgtagccacatgagaaagcactctgtgtttttgttcggtctcagatttatctggttgagttggtgttttgtttggggtttttaattttgcgtgtttgcatagcataaaatcagtagacaacaccactgaggtcgttacgatcaacgatatccacagtctctttttagtctctgttacatgaagttttattccagttacttttcatggaatgacctattttgaacaagtaattttcttgacaagaaagaatgtatagaagtctccctgcaattaatttccaatgtttacattttttaactagactgtggaatttctacagattaatatgaaatggagctcatggtccgtttgtgtgttagatatgctgtagctgaagccctgtttgtcttttaaacactagttggaagctctcaataaaaatgcctgctgctcacagcacagaaaatggggcagggggagcctcaagcacaatctagctgtcctcctaaagactctgtaatgctcactcccctcgcgttctcccggcgctgtcgggaggctgtgctggtggtcgtgtagaggtccttctcctttcacatggtgcagagagcgaggacctctcctcctcgttcagttgcacttcagtattttcacggatatgaatgtaaaatatataaatatataaacctgcggctttaacaactgtaatacaaccttttgaattagttccgtgtatagataattaaattcttcatacaaaagtta

SEQ ID NO: 277149 - DNA, 3913 bp, Artificial Sequence
  derived and/or modified sequence
acttatgggcggagatggatggtggatggggggcgggggaggcagcggagggagatgaggagataggcgggagcgagggagcgagggagggagcgaaggaggtagagaagagtggaggcgccaggggagggagcgtagcttggttgctccgtagtacggcggctcgcgaggaagaatcccgagcgggctccgggacggacagagaggcgggcggggatggtgtgcggggctgcggctcctgcgtccctcccagcggcgcgtgagcggcactgatttgtccctggggcggcagcgcggacccgcccggagatgaggcgtcgattagcaaggtaaaagtaacagaaccatggctcagtttccaacaccttttggtggcagcctggatatctgggccataactgtagaggaaagagcgaagcatgatcagcagttccatagtttaaagccaatatctggattcattactggtgatcaagctagaaactttttttttcaatctgggttacctcaacctgttttagcacagatatgggcactagctgacatgaataatgatggaagaatggatcaagtggagttttccatagctatgaaacttatcaaactgaagctacaaggatatcagctaccctctgcacttccccctgtcatgaaacagcaaccagttgctatttctagcgcaccagcatttgcagctgtgccccccctggctaacggggctccccctgttatacaacctctgcctgcatttgctcatcctgcagccacattgccaaagagttcttcctttagtagatctggtccagggtcacaactaaacactaaattacaaaaggcacagtcatttgatgtggccagtgtcccaccagtggcagagtgggctgttcctcagtcatcaagactgaaatacaggcaattattcaatagtcatgacaaaactatgagtggacacttaacaggtccccaagcaagaactattcttatgcagtcaagtttaccacaggctcagctggcttcaatatggaatctttctgacattgatcaagatggaaaacttacagcagaggaatttatcctggcaatgcacctcattgatgtagctatgtctggccaaccactgccacctgtcctgcctccagaatacattccaccttcttttagaagagttcgatctggcagtggtatatctgtcataagctcaacatctgtagatcagaggctaccagaggaaccagttttagaagatgaacaacaacaattagaaaagaaattacctgtaacgtttgaagataagaagcgggagaactttgaacgtggcaacctggaactggagaaacgaaggcaagctctcctggaacagcagcgcaaggagcaggagcgcctggcccagctggagcgggcggagcaggagaggaaggagcgtgagcgccaggagcaagagcgcaaaagacaactggaactggagaagcaactggaaaagcagcgggagctagaacggcagagagaggaggagaggaggaaagaaattgagaggcgagaggctgcaaaacgggaacttgaaaggcaacgacaacttgagtgggaacggaatcgaaggcaagaactactaaatcaaagaaacaaagaacaagaggacatagttgtactgaaagcaaagaaaaagactttggaatttgaattagaagctctaaatgataaaaagcatcaactagaagggaaacttcaagatatcagatgtcgattgaccacccaaaggcaagaaattgagagcacaaacaaatctagagagttgagaattgccgaaatcacccatctacagcaacaattacaggaatctcagcaaatgcttggaagacttattccagaaaaacagatactcaatgaccaattaaaacaagttcagcagaacagtttgcacagagattcacttgttacacttaaaagagccttagaagcaaaagaactagctcggcagcacctacgagaccaactggatgaagtggagaaagaaactagatcaaaactacaggagattgatattttcaataatcagctgaaggaactaagagaaatacacaataagcaacaactccagaagcaaaagtccatggaggctgaacgactgaaacagaaagaacaagaacgaaagatcatagaattagaaaaacaaaaagaagaagcccaaagacgagctcaggaaagggacaagcagtggctggagcatgtgcagcaggaggacgagcatcagagaccaagaaaactccacgaagaggaaaaactgaaaagggaggagagtgtcaaaaagaaggatggcgaggaaaaaggcaaacaggaagcacaagacaagctgggtcggcttttccatcaacaccaagaaccagctaagccagctgtccaggcaccctggtccactgcagaaaaaggtccacttaccatttctgcacaggaaaatgtaaaagtggtgtattaccgggcactgtacccctttgaatccagaagccatgatgaaatcactatccagccaggagacatagtcatggtggatgaaagccaaactggagaacccggctggcttggaggagaattaaaaggaaagacagggtggttccctgcaaactatgcagagaaaatcccagaaaatgaggttcccgctccagtgaaaccagtgactgattcaacatctgcccctgcccccaaactggccttgcgtgagacccccgcccctttggcagtaacctcttcagagccctccacgacccctaataactgggccgacttcagctccacgtggcccaccagcacgaatgagaaaccagaaacggataactgggatgcatgggcagcccagccctctctcaccgttccaagtgccggccagttaaggcagaggtccgcctttactccagccacggccactggctcctccccgtctcctgtgctaggccagggtgaaaaggtggaggggctacaagctcaagccctatatccttggagagccaaaaaagacaaccacttaaattttaacaaaaatgatgtcatcaccgtcctggaacagcaagacatgtggtggtttggagaagttcaaggtcagaagggttggttccccaagtcttacgtgaaactcatttcagggcccataaggaagtctacaagcatggattctggttcttcagagagtcctgctagtctaaagcgagtagcctctccagcagccaagccggtcgtttcgggagaagaatttattgccatgtacacttacgagagttctgagcaaggagatttaacctttcagcaaggggatgtgattttggttaccaagaaagatggtgactggtggacaggaacagtgggcgacaaggccggagtcttcccttctaactatgtgaggcttaaagattcagagggctctggaactgctgggaaaacagggagtttaggaaaaaaacctgaaattgcccaggttattgcctcatacaccgccaccggccccgagcagctcactctcgcccctggtcagctgattttgatccgaaaaaagaacccaggtggatggtgggaaggagagctgcaagcacgtgggaaaaagcgccagataggctggttcccagctaattatgtaaagcttctaagccctgggacgagcaaaatcactccaacagagccacctaagtcaacagcattagcggcagtgtgccaggtgattgggatgtacgactacaccgcgcagaatgacgatgagctggccttcaacaagggccagatcatcaacgtcctcaacaaggaggaccctgactggtggaaaggagaagtcaatggacaagtggggctcttcccatccaattatgtgaagctgaccacagacatggacccaagccagcaatgaatcatatgttgtccatccccccctcaggct

SEQ ID NO: 277150 - DNA, 5722 bp, Artificial Sequence
  derived and/or modified sequence
agggagggagcgaaggaggtagagaagagtggaggcgccaggggagggagcgtagcttggttgctccgtagtacggcggctcgcgaggaagaatcccgagcgggctccgggacggacagagaggcgggcggggatggtgtgcggggctgcggctcctgcgtccctcccagcggcgcgtgagcggcactgatttgtccctggggcggcagcgcggacccgcccggagatgaggcgtcgattagcaaggtaaaagtaacagaaccatggctcagtttccaacaccttttggtggcagcctggatatctgggccataactgtagaggaaagagcgaagcatgatcagcagttccatagtttaaagccaatatctggattcattactggtgatcaagctagaaactttttttttcaatctgggttacctcaacctgttttagcacagatatgggcactagctgacatgaataatgatggaagaatggatcaagtggagttttccatagctatgaaacttatcaaactgaagctacaaggatatcagctaccctctgcacttccccctgtcatgaaacagcaaccagttgctatttctagcgcaccagcatttggtatgggaggtatcgccagcatgccaccgcttacagctgttgctccagtgccaatgggatccattccagttgttggaatgtctccaaccctagtatcttctgttcccacagcagctgtgccccccctggctaacggggctccccctgttatacaacctctgcctgcatttgctcatcctgcagccacattgccaaagagttcttcctttagtagatctggtccagggtcacaactaaacactaaattacaaaaggcacagtcatttgatgtggccagtgtcccaccagtggcagagtgggctgttcctcagtcatcaagactgaaatacaggcaattattcaatagtcatgacaaaactatgagtggacacttaacaggtccccaagcaagaactattcttatgcagtcaagtttaccacaggctcagctggcttcaatatggaatctttctgacattgatcaagatggaaaacttacagcagaggaatttatcctggcaatgcacctcattgatgtagctatgtctggccaaccactgccacctgtcctgcctccagaatacattccaccttcttttagaagagttcgatctggcagtggtatatctgtcataagctcaacatctgtagatcagaggctaccagaggaaccagttttagaagatgaacaacaacaattagaaaagaaattacctgtaacgtttgaagataagaagcgggagaactttgaacgtggcaacctggaactggagaaacgaaggcaagctctcctggaacagcagcgcaaggagcaggagcgcctggcccagctggagcgggcggagcaggagaggaaggagcgtgagcgccaggagcaagagcgcaaaagacaactggaactggagaagcaactggaaaagcagcgggagctagaacggcagagagaggaggagaggaggaaagaaattgagaggcgagaggctgcaaaacgggaacttgaaaggcaacgacaacttgagtgggaacggaatcgaaggcaagaactactaaatcaaagaaacaaagaacaagaggacatagttgtactgaaagcaaagaaaaagactttggaatttgaattagaagctctaaatgataaaaagcatcaactagaagggaaacttcaagatatcagatgtcgattgaccacccaaaggcaagaaattgagagcacaaacaaatctagagagttgagaattgccgaaatcacccatctacagcaacaattacaggaatctcagcaaatgcttggaagacttattccagaaaaacagatactcaatgaccaattaaaacaagttcagcagaacagtttgcacagagattcacttgttacacttaaaagagccttagaagcaaaagaactagctcggcagcacctacgagaccaactggatgaagtggagaaagaaactagatcaaaactacaggagattgatattttcaataatcagctgaaggaactaagagaaatacacaataagcaacaactccagaagcaaaagtccatggaggctgaacgactgaaacagaaagaacaagaacgaaagatcatagaattagaaaaacaaaaagaagaagcccaaagacgagctcaggaaagggacaagcagtggctggagcatgtgcagcaggaggacgagcatcagagaccaagaaaactccacgaagaggaaaaactgaaaagggaggagagtgtcaaaaagaaggatggcgaggaaaaaggcaaacaggaagcacaagacaagctgggtcggcttttccatcaacaccaagaaccagctaagccagctgtccaggcaccctggtccactgcagaaaaaggtccacttaccatttctgcacaggaaaatgtaaaagtggtgtattaccgggcactgtacccctttgaatccagaagccatgatgaaatcactatccagccaggagacatagtcatggtggatgaaagccaaactggagaacccggctggcttggaggagaattaaaaggaaagacagggtggttccctgcaaactatgcagagaaaatcccagaaaatgaggttcccgctccagtgaaaccagtgactgattcaacatctgcccctgcccccaaactggccttgcgtgagacccccgcccctttggcagtaacctcttcagagccctccacgacccctaataactgggccgacttcagctccacgtggcccaccagcacgaatgagaaaccagaaacggataactgggatgcatgggcagcccagccctctctcaccgttccaagtgccggccagttaaggcagaggtccgcctttactccagccacggccactggctcctccccgtctcctgtgctaggccagggtgaaaaggtggaggggctacaagctcaagccctatatccttggagagccaaaaaagacaaccacttaaattttaacaaaaatgatgtcatcaccgtcctggaacagcaagacatgtggtggtttggagaagttcaaggtcagaagggttggttccccaagtcttacgtgaaactcatttcagggcccataaggaagtctacaagcatggattctggttcttcagagagtcctgctagtctaaagcgagtagcctctccagcagccaagccggtcgtttcgggagaagaatttattgccatgtacacttacgagagttctgagcaaggagatttaacctttcagcaaggggatgtgattttggttaccaagaaagatggtgactggtggacaggaacagtgggcgacaaggccggagtcttcccttctaactatgtgaggcttaaagattcagagggctctggaactgctgggaaaacagggagtttaggaaaaaaacctgaaattgcccaggttattgcctcatacaccgccaccggccccgagcagctcactctcgcccctggtcagctgattttgatccgaaaaaagaacccaggtggatggtgggaaggagagctgcaagcacgtgggaaaaagcgccagataggctggttcccagctaattatgtaaagcttctaagccctgggacgagcaaaatcactccaacagagccacctaagtcaacagcattagcggcagtgtgccaggtgattgggatgtacgactacaccgcgcagaatgacgatgagctggccttcaacaagggccagatcatcaacgtcctcaacaaggaggaccctgactggtggaaaggagaagtcaatggacaagtggggctcttcccatccaattatgtgaagctgaccacagacatggacccaagccagcaatggtgttcagacttacatctcttggatatgttgaccccaactgaaagaaagcgacaaggatacatccacgagctcattgtcaccgaggagaactatgtgaatgacctgcagctggtcacagagatttttcaaaaacccctgatggagtctgagctgctgacagaaaaagaggttgctatgatttttgtgaactggaaggagctgattatgtgtaatatcaaactactaaaagcgctgagagtccgcaagaagatgtccggggagaagatgcctgtgaagatgattggagacatcctgagcgcacagctgccgcacatgcagccctacatccgcttctgcagccgccagctcaacggggctgccctgatccagcagaagacggatgaggccccagacttcaaggagttcgtcaaaagattggcaatggatcctcggtgtaaagggatgccactctctagttttatactgaagcctatgcaacgggtaacaagatacccactgatcattaaaaatatcctggaaaacacccctgaaaaccacccggaccacagccacttgaagcacgccctggagaaggcggaagagctctgttcccaggtgaacgaaggggtgcgggagaaggagaactctgaccggctggagtggatccaggcccacgtgcagtgtgaaggcctgtctgagcaacttgtgttcaattcagtgaccaattgcttggggccgcgcaaatttctgcacagtgggaagctctacaaggccaagagcaacaaggagctgtatggcttccttttcaacgacttcctcctgctgactcagatcacgaagcctttggggtcttctggcaccgacaaagtcttcagccccaaatcaaacctgcagtataaaatgtataaaacacctattttcctaaatgaggttctagtaaaattacccaccgacccttctggagacgagcccatcttccacatctcccacattgaccgcgtctatactctccgagcagaaagcataaatgaaaggactgcctgggtgcagaaaatcaaagctgcttctgaactctacatagagactgagaaaaagaagcgcgagaaagcgtacctggtccgttcccaaagggcaacaggcattggaaggttgatggtgaacgtggttgaaggcatcgagttgaaaccctgtcggtcacatggaaagagcaacccgtactgtgaggtgaccatgggttcccagtgccacatcaccaagacgatccaggacactctgaaccccaagtggaattccaactgccagttcttcatccgagacctggagcaggaagtcctctgcatcactgtgttcgagagggaccagttctcaccagatgattttttgggtcggacggagatccgtgtggcggacatcaagaaagaccagggctccaaaggtccagttacgaagtgtcttctgctgcacgaagtccccacgggagagattgtggtccgcttggacctgcagttgtttgatgagccgtaggcagcgggctcagggtgtgctcagcagggtcccagcccacggccacacatgctgtctggaaattgtattccttttctaagaaaccaccatttggtattcagtcacagggatatgggatggcaaagacaggcccctcaaagctcctaggaatcattctcgacaatcctccctgccccgaaacaatttcctgtttcatgaaacaaagctgtgttttcctttgtcctcactacaggtctcattatggcttctagggtcgctgaaatcccatagccctcaacagggtgcagctgggagtctagccccttccc

SEQ ID NO: 277151 - DNA, 4992 bp, Artificial Sequence
  derived and/or modified sequence
catggctcagtttccaacaccttttggtggcagcctggatatctgggccataactgtagaggaaagagcgaagcatgatcagcagttccatagtttaaagccaatatctggattcattactggtgatcaagctagaaactttttttttcaatctgggttacctcaacctgttttagcacagatatgggcactagctgacatgaataatgatggaagaatggatcaagtggagttttccatagctatgaaacttatcaaactgaagctacaaggatatcagctaccctctgcacttccccctgtcatgaaacagcaaccagttgctatttctagcgcaccagcatttggtatgggaggtatcgccagcatgccaccgcttacagctgttgctccagtgccaatgggatccattccagttgttggaatgtctccaaccctagtatcttctgttcccacagcagctgtgccccccctggctaacggggctccccctgttatacaacctctgcctgcatttgctcatcctgcagccacattgccaaagagttcttcctttagtagatctggtccagggtcacaactaaacactaaattacaaaaggcacagtcatttgatgtggccagtgtcccaccagtggcagagtgggctgttcctcagtcatcaagactgaaatacaggcaattattcaatagtcatgacaaaactatgagtggacacttaacaggtccccaagcaagaactattcttatgcagtcaagtttaccacaggctcagctggcttcaatatggaatctttctgacattgatcaagatggaaaacttacagcagaggaatttatcctggcaatgcacctcattgatgtagctatgtctggccaaccactgccacctgtcctgcctccagaatacattccaccttcttttagaagagttcgatctggcagtggtatatctgtcataagctcaacatctgtagatcagaggctaccagaggaaccagttttagaagatgaacaacaacaattagaaaagaaattacctgtaacgtttgaagataagaagcgggagaactttgaacgtggcaacctggaactggagaaacgaaggcaagctctcctggaacagcagcgcaaggagcaggagcgcctggcccagctggagcgggcggagcaggagaggaaggagcgtgagcgccaggagcaagagcgcaaaagacaactggaactggagaagcaactggaaaagcagcgggagctagaacggcagagagaggaggagaggaggaaagaaattgagaggcgagaggctgcaaaacgggaacttgaaaggcaacgacaacttgagtgggaacggaatcgaaggcaagaactactaaatcaaagaaacaaagaacaagaggacatagttgtactgaaagcaaagaaaaagactttggaatttgaattagaagctctaaatgataaaaagcatcaactagaagggaaacttcaagatatcagatgtcgattgaccacccaaaggcaagaaattgagagcacaaacaaatctagagagttgagaattgccgaaatcacccatctacagcaacaattacaggaatctcagcaaatgcttggaagacttattccagaaaaacagatactcaatgaccaattaaaacaagttcagcagaacagtttgcacagagattcacttgttacacttaaaagagccttagaagcaaaagaactagctcggcagcacctacgagaccaactggatgaagtggagaaagaaactagatcaaaactacaggagattgatattttcaataatcagctgaaggaactaagagaaatacacaataagcaacaactccagaagcaaaagtccatggaggctgaacgactgaaacagaaagaacaagaacgaaagatcatagaattagaaaaacaaaaagaagaagcccaaagacgagctcaggaaagggacaagcagtggctggagcatgtgcagcaggaggacgagcatcagagaccaagaaaactccacgaagaggaaaaactgaaaagggaggagagtgtcaaaaagaaggatggcgaggaaaaaggcaaacaggaagcacaagacaagctgggtcggcttttccatcaacaccaagaaccagctaagccagctgtccaggcaccctggtccactgcagaaaaaggtccacttaccatttctgcacaggaaaatgtaaaagtggtgtattaccgggcactgtacccctttgaatccagaagccatgatgaaatcactatccagccaggagacatagtcatggtggatgaaagccaaactggagaacccggctggcttggaggagaattaaaaggaaagacagggtggttccctgcaaactatgcagagaaaatcccagaaaatgaggttcccgctccagtgaaaccagtgactgattcaacatctgcccctgcccccaaactggccttgcgtgagacccccgcccctttggcagtaacctcttcagagccctccacgacccctaataactgggccgacttcagctccacgtggcccaccagcacgaatgagaaaccagaaacggataactgggatgcatgggcagcccagccctctctcaccgttccaagtgccggccagttaaggcagaggtccgcctttactccagccacggccactggctcctccccgtctcctgtgctaggccagggtgaaaaggtggaggggctacaagctcaagccctatatccttggagagccaaaaaagacaaccacttaaattttaacaaaaatgatgtcatcaccgtcctggaacagcaagacatgtggtggtttggagaagttcaaggtcagaagggttggttccccaagtcttacgtgaaactcatttcagggcccataaggaagtctacaagcatggattctggttcttcagagagtcctgctagtctaaagcgagtagcctctccagcagccaagccggtcgtttcgggagaagaatttattgccatgtacacttacgagagttctgagcaaggagatttaacctttcagcaaggggatgtgattttggttaccaagaaagatggtgactggtggacaggaacagtgggcgacaaggccggagtcttcccttctaactatgtgaggcttaaagattcagagggctctggaactgctgggaaaacagggagtttaggaaaaaaacctgaaattgcccaggttattgcctcatacaccgccaccggccccgagcagctcactctcgcccctggtcagctgattttgatccgaaaaaagaacccaggtggatggtgggaaggagagctgcaagcacgtgggaaaaagcgccagataggctggttcccagctaattatgtaaagcttctaagccctgggacgagcaaaatcactccaacagagccacctaagtcaacagcattagcggcagtgtgccaggtgattgggatgtacgactacaccgcgcagaatgacgatgagctggccttcaacaagggccagatcatcaacgtcctcaacaaggaggaccctgactggtggaaaggagaagtcaatggacaagtggggctcttcccatccaattatgtgaagctgaccacagacatggacccaagccagcaatggtgttcagacttacatctcttggatatgttgaccccaactgaaagaaagcgacaaggatacatccacgagctcattgtcaccgaggagaactatgtgaatgacctgcagctggtcacagagatttttcaaaaacccctgatggagtctgagctgctgacagaaaaagaggttgctatgatttttgtgaactggaaggagctgattatgtgtaatatcaaactactaaaagcgctgagagtccgcaagaagatgtccggggagaagatgcctgtgaagatgattggagacatcctgagcgcacagctgccgcacatgcagccctacatccgcttctgcagccgccagctcaacggggctgccctgatccagcagaagacggatgaggccccagacttcaaggagttcgtcaaaagattggcaatggatcctcggtgtaaagggatgccactctctagttttatactgaagcctatgcaacgggtaacaagatacccactgatcattaaaaatcaacttgtgttcaattcagtgaccaattgcttggggccgcgcaaatttctgcacagtgggaagctctacaaggccaagagcaacaaggagctgtatggcttccttttcaacgacttcctcctgctgactcagatcacgaagcctttggggtcttctggcaccgacaaagtcttcagccccaaatcaaacctgcagtataaaatgtataaaacacctattttcctaaatgaggttctagtaaaattacccaccgacccttctggagacgagcccatcttccacatctcccacattgaccgcgtctatactctccgagcagaaagcataaatgaaaggactgcctgggtgcagaaaatcaaagctgcttctgaactctacatagagactgagaaaaagaagcgcgagaaagcgtacctggtccgttcccaaagggcaacaggcattggaaggttgatggtgaacgtggttgaaggcatcgagttgaaaccctgtcggtcacatggaaagagcaacccgtactgtgaggtgaccatgggttcccagtgccacatcaccaagacgatccaggacactctgaaccccaagtggaattccaactgccagttcttcatccgagacctggagcaggaagtcctctgcatcactgtgttcgagagggaccagttctcaccagatgattttttgggtcggacggagatccgtgtggcggacatcaagaaagaccagggctccaaaggtccagttacgaagtgtcttctgctgcacgaagtccccacgggagagattgtggtccgcttggacctgcagttgtttgatgagccgtaggcagcggg

SEQ ID NO: 277152 - DNA, 954 bp, Artificial Sequence
  derived and/or modified sequence
tgacccctgatggagagcgagctgctgacagagaaggaggtggccatgatctttgtgaactggaaggagctgatcatgtgcaacatcaagctgctgaaggccctgcgggtgaggaagaagatgtctggagagaagatgcctgtgaagatgattggagacatcctgagcgcccagctgccccacatgcagccctacatccgcttctgcagccggcagctgaatggagctgccctgatccagcagaagacagatgaggccccagacttcaaggagtttgtgaagaggctggccatggacccccgctgcaagggcatgcccctgagcagcttcatcctgaagcccatgcagagggtgacccgctaccccctcatcatcaagaaccagctggtgttcaacagcgtgaccaactgcctgggccccaggaagttcctgcacagcggcaagctgtacaaggccaagagcaacaaggagctgtatggcttcctgttcaatgacttcctgctgctgacccagatcaccaagcccctgggcagcagcggcacagacaaggtgttcagccccaagagcaacctgcagtacaagatgtacaagacccccatcttcctgaatgaggtgctggtgaagctgcccacagaccccagcggagatgagcccatcttccacatcagccacatcgacagagtgtacaccctgcgggcagagagcatcaatgaaagaacagcctgggtgcagaagatcaaggccgccagcgagctgtacatcgagacagagaagaagaagcgggagaaggcctacctggtgcgcagccagagggccactggaattggccgcctgatggtgaatgtggtggagggcatcgagctgaagccctgccgcagccacggcaagagcaacccctactgtgaggtgaccatgggcagccagtgccacatcaccaagaccatccaggactag

SEQ ID NO: 277153 - DNA, 3237 bp, Artificial Sequence
  derived and/or modified sequence
atggcccagttccccaccccatttggaggcagcctggacatctgggccatcaccgtggaggagcgggccaagcatgaccagcagttccacagcctgaagcccatcagcggcttcatcaccggggaccaggccaggaacttcttcttccagagcggcctgccccagcctgtgctggcccagatctgggccctggccgacatgaacaatgatggccgcatggaccaggtggagttcagcatcgccatgaagctgatcaagctgaagctgcagggctaccagctgcccagcgccctgccccctgtgatgaagcagcagcctgtggccatcagcagcgccccagccttcggcatgggcggcatcgcctccatgccacccctgacagctgtggcccctgtgcccatgggcagcatccctgtggtgggcatgagccccaccctggtgtcctctgtgcccacagctgctgtgccccccctggccaacggggcccctcctgtgatccagcccctgcctgcctttgcccaccctgctgccaccctgcccaagagcagcagcttcagccgcagcggccctggcagccagctgaacaccaagctgcagaaggcccagagctttgatgtggcctctgtgccccctgtggccgagtgggccgtgccccagagcagccggctgaagtaccggcagctgttcaacagccatgacaagaccatgagcggccacctgaccggcccccaggcccggaccatcctgatgcagagcagcctgccccaggcccagctggccagcatctggaacctgagtgacatcgaccaggacggcaagctgacagctgaggagttcatcctggccatgcacctgattgatgtggccatgagcggccagcccctgccccctgtgctgcccccagagtacatccccccatccttcagaagagtgcgcagcggcagcggcatcagcgtcatcagcagcacctctgtggaccagaggctgcctgaggagcctgtgctggaggatgagcagcagcagctggagaagaagctgcctgtgacctttgaggacaagaagcgggagaactttgagcggggcaacctggagctggagaagaggcggcaggccctgctggagcagcagaggaaggagcaggagcggctggcccagctggagagagctgagcaggagaggaaggagcgggagcggcaggagcaggagaggaagaggcagctggagctggagaagcagctggagaagcagcgggagctggagcggcagcgggaggaggagaggaggaaggagattgaaagaagagaggccgccaagcgggagctggagcggcagaggcagctggagtgggagaggaacagacggcaggagctgctgaaccagaggaacaaggagcaggaggacatcgtggtgctgaaggccaagaagaagaccctggagtttgagctggaggccctgaatgacaagaagcaccagctggagggcaagctgcaggacatccgctgccgcctgaccacccagaggcaggagattgagagcaccaacaagagccgggagctgagaattgctgagatcacccacctgcagcagcagctgcaggagagccagcagatgctgggccgcctcatccctgagaagcagatcctgaatgaccagctgaagcaggtgcagcagaacagcctgcaccgggacagcctggtgaccctgaagagggccctggaggccaaggagctggcccggcagcacctgcgggaccagctggatgaggtggagaaggagaccaggagcaagctgcaggagattgacatcttcaacaaccagctgaaggagctgcgggagatccacaacaagcagcagctgcagaagcagaagtccatggaggccgagcggctgaagcagaaggagcaggagaggaagatcatcgagctggagaagcagaaggaggaggcccagaggcgggcccaggagcgggacaagcagtggctggagcacgtgcagcaggaggatgagcaccagaggcccaggaagctgcacgaggaggagaagctgaagcgggaggagagcgtgaagaagaaggatggagaggagaagggcaagcaggaggcccaggacaagctgggccgcctcttccaccagcaccaggagcccgccaagccagctgtgcaggccccctggagcacagctgagaagggccccctgaccatcagcgcccaggagaatgtgaaggtggtgtactaccgggccctgtacccctttgagagccgcagccatgatgagatcaccatccagcccggggacatcgtgatggtggatgagagccagacaggagagcccggctggctgggcggggagctgaagggcaagacaggctggttccctgccaactatgcagagaagatcccagaaaatgaggtgcctgcccctgtgaagcctgtgacagacagcaccagcgccccagcccccaagctggccctgcgggagaccccagcccccctggccgtgaccagcagcgagcccagcaccacccccaacaactgggccgacttcagcagcacctggcccaccagcaccaatgagaagccagagacagacaactgggatgcctgggccgcccagcccagcctgactgtgcccagcgctggccagctgcggcagaggtctgccttcaccccagccacagccaccggcagcagccccagccctgtgctgggccagggcgagaaggtggagggcctgcaggcccaggccctgtacccctggagggccaagaaggacaaccacctgaacttcaacaagaatgatgtgatcaccgtgctggagcagcaggacatgtggtggtttggagaggtgcagggccagaagggctggttccccaagagctatgtgaagctgatcagcggccccatcaggaagagcacctccatggacagcggcagcagcgagagccctgccagcctgaagagggtggccagccctgctgccaagcctgtggtgtctggagaggagttcatcgccatgtacacctatgagagcagcgagcagggcgacctgaccttccagcagggagatgtgatcctggtgaccaagaaggatggagactggtggacaggaacagtgggggacaaggccggggtcttccccagcaactacgtgcggctgaaggacagcgagggcagcggcacagctgggaagacaggcagcctgggcaagaagccaggccccagctgcaatgtgaagtag

SEQ ID NO: 277154 - DNA, 3048 bp, Artificial Sequence
  derived and/or modified sequence
atggcccagttccccaccccatttggaggcagcctggacatctgggccatcaccgtggaggagcgggccaagcatgaccagcagttccacagcctgaagcccatcagcggcttcatcaccggggaccaggccaggaacttcttcttccagagcggcctgccccagcctgtgctggcccagatctgggccctggccgacatgaacaatgatggccgcatggaccaggtggagttcagcatcgccatgaagctgatcaagctgaagctgcagggctaccagctgcccagcgccctgccccctgtgatgaagcagcagcctgtggccatcagcagcgccccagccttcggcatgggcggcatcgcctccatgccacccctgacagctgtggcccctgtgcccatgggcagcatccctgtggtgggcatgagccccaccctggtgtcctctgtgcccacagctgctgtgccccccctggccaacggggcccctcctgtgatccagcccctgcctgcctttgcccaccctgctgccaccctgcccaagagcagcagcttcagccgcagcggccctggcagccagctgaacaccaagctgcagaaggcccagagctttgatgtggcctctgtgccccctgtggccgagtgggccgtgccccagagcagccggctgaagtaccggcagctgttcaacagccatgacaagaccatgagcggccacctgaccggcccccaggcccggaccatcctgatgcagagcagcctgccccaggcccagctggccagcatctggaacctgagtgacatcgaccaggacggcaagctgacagctgaggagttcatcctggccatgcacctgattgatgtggccatgagcggccagcccctgccccctgtgctgcccccagagtacatccccccatccttcagaagagtgcgcagcggcagcggcatcagcgtcatcagcagcacctctgtggaccagaggctgcctgaggagcctgtgctggaggatgagcagcagcagctggagaagaagctgcctgtgacctttgaggacaagaagcgggagaactttgagcggggcaacctggagctggagaagaggcggcaggccctgctggagcagcagaggaaggagcaggagcggctggcccagctggagagagctgagcaggagaggaaggagcgggagcggcaggagcaggagaggaagaggcagctggagctggagaagcagctggagaagcagcgggagctggagcggcagcgggaggaggagaggaggaaggagattgaaagaagagaggccgccaagcgggagctggagcggcagaggcagctggagtgggagaggaacagacggcaggagctgctgaaccagaggaacaaggagcaggaggacatcgtggtgctgaaggccaagaagaagaccctggagtttgagctggaggccctgaatgacaagaagcaccagctggagggcaagctgcaggacatccgctgccgcctgaccacccagaggcaggagattgagagcaccaacaagagccgggagctgagaattgctgagatcacccacctgcagcagcagctgcaggagagccagcagatgctgggccgcctcatccctgagaagcagatcctgaatgaccagctgaagcaggtgcagcagaacagcctgcaccgggacagcctggtgaccctgaagagggccctggaggccaaggagctggcccggcagcacctgcgggaccagctggatgaggtggagaaggagaccaggagcaagctgcaggagattgacatcttcaacaaccagctgaaggagctgcgggagatccacaacaagcagcagctgcagaagcagaagtccatggaggccgagcggctgaagcagaaggagcaggagaggaagatcatcgagctggagaagcagaaggaggaggcccagaggcgggcccaggagcgggacaagcagtggctggagcacgtgcagcaggaggatgagcaccagaggcccaggaagctgcacgaggaggagaagctgaagcgggaggagagcgtgaagaagaaggatggagaggagaagggcaagcaggaggcccaggacaagctgggccgcctcttccaccagcaccaggagcccgccaagccagctgtgcaggccccctggagcacagctgagaagggccccctgaccatcagcgcccaggagaatgtgaaggtggtgtactaccgggccctgtacccctttgagagccgcagccatgatgagatcaccatccagcccggggacatcgtgatggtggatgagagccagacaggagagcccggctggctgggcggggagctgaagggcaagacaggctggttccctgccaactatgcagagaagatcccagaaaatgaggtgcctgcccctgtgaagcctgtgacagacagcaccagcgccccagcccccaagctggccctgcgggagaccccagcccccctggccgtgaccagcagcgagcccagcaccacccccaacaactgggccgacttcagcagcacctggcccaccagcaccaatgagaagccagagacagacaactgggatgcctgggccgcccagcccagcctgactgtgcccagcgctggccagctgcggcagaggtctgccttcaccccagccacagccaccggcagcagccccagccctgtgctgggccagggcgagaaggtggagggcctgcaggcccaggccctgtacccctggagggccaagaaggacaaccacctgaacttcaacaagaatgatgtgatcaccgtgctggagcagcaggacatgtggtggtttggagaggtgcagggccagaagggctggttccccaagagctatgtgaagctgatcagcggccccatcaggaagagcacctccatggacagcggcagcagcgagagccctgccagcctgaagagggtggccagccctgctgccaagcctgtggtgtctggagagggcctgtggaactgctgggagaaccgggagttcaggaagaagacctag

SEQ ID NO: 277155 - DNA, 3648 bp, Artificial Sequence
  derived and/or modified sequence
atggcccagttccccaccccatttggaggcagcctggacatctgggccatcaccgtggaggagcgggccaagcatgaccagcagttccacagcctgaagcccatcagcggcttcatcaccggggaccaggccaggaacttcttcttccagagcggcctgccccagcctgtgctggcccagatctgggccctggccgacatgaacaatgatggccgcatggaccaggtggagttcagcatcgccatgaagctgatcaagctgaagctgcagggctaccagctgcccagcgccctgccccctgtgatgaagcagcagcctgtggccatcagcagcgccccagccttcggcatgggcggcatcgcctccatgccacccctgacagctgtggcccctgtgcccatgggcagcatccctgtggtgggcatgagccccaccctggtgtcctctgtgcccacagctgctgtgccccccctggccaacggggcccctcctgtgatccagcccctgcctgcctttgcccaccctgctgccaccctgcccaagagcagcagcttcagccgcagcggccctggcagccagctgaacaccaagctgcagaaggcccagagctttgatgtggcctctgtgccccctgtggccgagtgggccgtgccccagagcagccggctgaagtaccggcagctgttcaacagccatgacaagaccatgagcggccacctgaccggcccccaggcccggaccatcctgatgcagagcagcctgccccaggcccagctggccagcatctggaacctgagtgacatcgaccaggacggcaagctgacagctgaggagttcatcctggccatgcacctgattgatgtggccatgagcggccagcccctgccccctgtgctgcccccagagtacatccccccatccttcagaagagtgcgcagcggcagcggcatcagcgtcatcagcagcacctctgtggaccagaggctgcctgaggagcctgtgctggaggatgagcagcagcagctggagaagaagctgcctgtgacctttgaggacaagaagcgggagaactttgagcggggcaacctggagctggagaagaggcggcaggccctgctggagcagcagaggaaggagcaggagcggctggcccagctggagagagctgagcaggagaggaaggagcgggagcggcaggagcaggagaggaagaggcagctggagctggagaagcagctggagaagcagcgggagctggagcggcagcgggaggaggagaggaggaaggagattgaaagaagagaggccgccaagcgggagctggagcggcagaggcagctggagtgggagaggaacagacggcaggagctgctgaaccagaggaacaaggagcaggaggacatcgtggtgctgaaggccaagaagaagaccctggagtttgagctggaggccctgaatgacaagaagcaccagctggagggcaagctgcaggacatccgctgccgcctgaccacccagaggcaggagattgagagcaccaacaagagccgggagctgagaattgctgagatcacccacctgcagcagcagctgcaggagagccagcagatgctgggccgcctcatccctgagaagcagatcctgaatgaccagctgaagcaggtgcagcagaacagcctgcaccgggacagcctggtgaccctgaagagggccctggaggccaaggagctggcccggcagcacctgcgggaccagctggatgaggtggagaaggagaccaggagcaagctgcaggagattgacatcttcaacaaccagctgaaggagctgcgggagatccacaacaagcagcagctgcagaagcagaagtccatggaggccgagcggctgaagcagaaggagcaggagaggaagatcatcgagctggagaagcagaaggaggaggcccagaggcgggcccaggagcgggacaagcagtggctggagcacgtgcagcaggaggatgagcaccagaggcccaggaagctgcacgaggaggagaagctgaagcgggaggagagcgtgaagaagaaggatggagaggagaagggcaagcaggaggcccaggacaagctgggccgcctcttccaccagcaccaggagcccgccaagccagctgtgcaggccccctggagcacagctgagaagggccccctgaccatcagcgcccaggagaatgtgaaggtggtgtactaccgggccctgtacccctttgagagccgcagccatgatgagatcaccatccagcccggggacatcgtgatggtggatgagagccagacaggagagcccggctggctgggcggggagctgaagggcaagacaggctggttccctgccaactatgcagagaagatcccagaaaatgaggtgcctgcccctgtgaagcctgtgacagacagcaccagcgccccagcccccaagctggccctgcgggagaccccagcccccctggccgtgaccagcagcgagcccagcaccacccccaacaactgggccgacttcagcagcacctggcccaccagcaccaatgagaagccagagacagacaactgggatgcctgggccgcccagcccagcctgactgtgcccagcgctggccagctgcggcagaggtctgccttcaccccagccacagccaccggcagcagccccagccctgtgctgggccagggcgagaaggtggagggcctgcaggcccaggccctgtacccctggagggccaagaaggacaaccacctgaacttcaacaagaatgatgtgatcaccgtgctggagcagcaggacatgtggtggtttggagaggtgcagggccagaagggctggttccccaagagctatgtgaagctgatcagcggccccatcaggaagagcacctccatggacagcggcagcagcgagagccctgccagcctgaagagggtggccagccctgctgccaagcctgtggtgtctggagaggagttcatcgccatgtacacctatgagagcagcgagcagggcgacctgaccttccagcagggagatgtgatcctggtgaccaagaaggatggagactggtggacaggaacagtgggggacaaggccggggtcttccccagcaactacgtgcggctgaaggacagcgagggcagcggcacagctgggaagacaggcagcctgggcaagaagccagaaattgcccaggtgattgccagctacacagccactggacctgagcagctgaccctggcccctggccagctgatcctgatcaggaagaagaaccctgggggctggtgggagggggagctgcaggcccggggcaagaagaggcagatcggctggttccctgccaactacgtgaagctgctgagccctggcaccagcaagatcacccccacagagccccccaagagcacagccctggccgctgtgtgccaggtgattggcatgtatgactacacagcccagaatgatgatgagctggccttcaacaagggccagatcatcaacgtgctgaacaaggaggaccctgactggtggaagggggaggtgaatggccaggtgggcctcttccccagcaactacgtgaagctgaccacagacatggaccccagccagcagtag

SEQ ID NO: 277156 - DNA, 3537 bp, Artificial Sequence
  derived and/or modified sequence
atggcccagttccccaccccatttggaggcagcctggacatctgggccatcaccgtggaggagcgggccaagcatgaccagcagttccacagcctgaagcccatcagcggcttcatcaccggggaccaggccaggaacttcttcttccagagcggcctgccccagcctgtgctggcccagatctgggccctggccgacatgaacaatgatggccgcatggaccaggtggagttcagcatcgccatgaagctgatcaagctgaagctgcagggctaccagctgcccagcgccctgccccctgtgatgaagcagcagcctgtggccatcagcagcgccccagcctttgctgctgtgccccccctggccaatggagcccctcctgtgatccagcccctgcctgcctttgcccaccctgctgccaccctgcccaagagcagcagcttcagccgcagcggccctggcagccagctgaacaccaagctgcagaaggcccagagctttgatgtggcctctgtgccccctgtggccgagtgggccgtgccccagagcagccggctgaagtaccggcagctgttcaacagccatgacaagaccatgagcggccacctgaccggcccccaggcccggaccatcctgatgcagagcagcctgccccaggcccagctggccagcatctggaacctgagtgacatcgaccaggacggcaagctgacagctgaggagttcatcctggccatgcacctgattgatgtggccatgagcggccagcccctgccccctgtgctgcccccagagtacatcccccccagcttccggcgggtgcgcagcggcagcggcatcagcgtcatcagcagcacctctgtggaccagaggctgcctgaggagcctgtgctggaggatgagcagcagcagctggagaagaagctgcctgtgacctttgaggacaagaagagagaaaattttgagcggggcaacctggagctggagaagaggcggcaggccctgctggagcagcagaggaaggagcaggagcggctggcccagctggagcgggcagagcaggagaggaaggagcgggagcggcaggagcaggagaggaagaggcagctggagctggagaagcagctggagaagcagcgggagctggagcggcagcgggaggaggagaggaggaaggagattgaaagaagagaagctgccaagcgggagctggagcggcagaggcagctggagtgggagaggaacagacggcaggagctgctgaaccagaggaacaaggagcaggaggacatcgtggtgctgaaggccaagaagaagaccctggagtttgagctggaggccctgaatgacaagaagcaccagctggagggcaagctgcaggacatccgctgccgcctgaccacccagaggcaggagattgagagcaccaacaagagccgggagctgagaattgctgagatcacccacctgcagcagcagctgcaggagagccagcagatgctgggccgcctcatccctgagaagcagatcctgaatgaccagctgaagcaggtgcagcagaacagcctgcaccgggacagcctggtgaccctgaagagggccctggaggccaaggagctggcccggcagcacctgcgggaccagctggatgaggtggagaaggagaccaggagcaagctgcaggagattgacatcttcaacaaccagctgaaggagctgcgggagatccacaacaagcagcagctgcagaagcagaagtccatggaggccgagcggctgaagcagaaggagcaggagaggaagatcatcgagctggagaagcagaaggaggaggcccagaggcgggcccaggagcgggacaagcagtggctggagcacgtgcagcaggaggatgagcaccagaggcccaggaagctgcacgaggaggagaagctgaagcgggaggagagcgtgaagaagaaggatggagaggagaagggcaagcaggaggcccaggacaagctgggccgcctcttccaccagcaccaggagcccgccaagccagctgtgcaggccccctggagcacagctgagaagggccccctgaccatcagcgcccaggagaatgtgaaggtggtgtactaccgggccctgtacccctttgagagccgcagccatgatgagatcaccatccagcccggggacatcgtgatggtggatgagagccagacaggagagcccggctggctgggcggggagctgaagggcaagacaggctggttccctgccaactatgcagagaagatcccagaaaatgaggtgcctgcccctgtgaagcctgtgacagacagcaccagcgccccagcccccaagctggccctgcgggagaccccagcccccctggccgtgaccagcagcgagcccagcaccacccccaacaactgggccgacttcagcagcacctggcccaccagcaccaatgagaagccagagacagacaactgggatgcctgggccgcccagcccagcctgactgtgcccagcgctggccagctgcggcagaggtctgccttcaccccagccacagccaccggcagcagccccagccctgtgctgggccagggcgagaaggtggagggcctgcaggcccaggccctgtacccctggagggccaagaaggacaaccacctgaacttcaacaagaatgatgtgatcaccgtgctggagcagcaggacatgtggtggtttggagaggtgcagggccagaagggctggttccccaagagctatgtgaagctgatcagcggccccatcaggaagagcacctccatggattctggcagcagcgagagccctgccagcctgaagagggtggccagccctgctgccaagcctgtggtgtctggagaggagttcatcgccatgtacacctatgagagcagcgagcagggcgacctgaccttccagcagggagatgtgatcctggtgaccaagaaggatggagactggtggacaggcaccgtgggggacaaggccggggtcttccccagcaactacgtgcggctgaaggacagcgagggcagcggcacagctgggaagacaggcagcctgggcaagaagccagagatcgcccaggtgattgccagctacacagccaccggccctgagcagctgaccctggcccctggccagctgatcctgatcaggaagaagaaccctgggggctggtgggagggggagctgcaggcccggggcaagaagaggcagatcggctggttccctgccaactacgtgaagctgctgagccctggcaccagcaagatcacccccacagagccccccaagagcacagccctggccgctgtgtgccaggtgattggcatgtatgactacacagcccagaatgatgatgagctggccttcaacaagggccagatcatcaacgtgctgaacaaggaggaccctgactggtggaagggggaggtgaatggccaggtgggcctcttccccagcaactacgtgaagctgaccacagacatggaccccagccagcagtag

SEQ ID NO: 277157 - DNA, 5151 bp, Artificial Sequence
  derived and/or modified sequence
atggcccagttccccaccccatttggaggcagcctggacatctgggccatcaccgtggaggagcgggccaagcatgaccagcagttccacagcctgaagcccatcagcggcttcatcaccggggaccaggccaggaacttcttcttccagagcggcctgccccagcctgtgctggcccagatctgggccctggccgacatgaacaatgatggccgcatggaccaggtggagttcagcatcgccatgaagctgatcaagctgaagctgcagggctaccagctgcccagcgccctgccccctgtgatgaagcagcagcctgtggccatcagcagcgccccagccttcggcatgggcggcatcgcctccatgccacccctgacagctgtggcccctgtgcccatgggcagcatccctgtggtgggcatgagccccaccctggtgtcctctgtgcccacagctgctgtgccccccctggccaacggggcccctcctgtgatccagcccctgcctgcctttgcccaccctgctgccaccctgcccaagagcagcagcttcagccgcagcggccctggcagccagctgaacaccaagctgcagaaggcccagagctttgatgtggcctctgtgccccctgtggccgagtgggccgtgccccagagcagccggctgaagtaccggcagctgttcaacagccatgacaagaccatgagcggccacctgaccggcccccaggcccggaccatcctgatgcagagcagcctgccccaggcccagctggccagcatctggaacctgagtgacatcgaccaggacggcaagctgacagctgaggagttcatcctggccatgcacctgattgatgtggccatgagcggccagcccctgccccctgtgctgcccccagagtacatccccccatccttcagaagagtgcgcagcggcagcggcatcagcgtcatcagcagcacctctgtggaccagaggctgcctgaggagcctgtgctggaggatgagcagcagcagctggagaagaagctgcctgtgacctttgaggacaagaagcgggagaactttgagcggggcaacctggagctggagaagaggcggcaggccctgctggagcagcagaggaaggagcaggagcggctggcccagctggagagagctgagcaggagaggaaggagcgggagcggcaggagcaggagaggaagaggcagctggagctggagaagcagctggagaagcagcgggagctggagcggcagcgggaggaggagaggaggaaggagattgaaagaagagaggccgccaagcgggagctggagcggcagaggcagctggagtgggagaggaacagacggcaggagctgctgaaccagaggaacaaggagcaggaggacatcgtggtgctgaaggccaagaagaagaccctggagtttgagctggaggccctgaatgacaagaagcaccagctggagggcaagctgcaggacatccgctgccgcctgaccacccagaggcaggagattgagagcaccaacaagagccgggagctgagaattgctgagatcacccacctgcagcagcagctgcaggagagccagcagatgctgggccgcctcatccctgagaagcagatcctgaatgaccagctgaagcaggtgcagcagaacagcctgcaccgggacagcctggtgaccctgaagagggccctggaggccaaggagctggcccggcagcacctgcgggaccagctggatgaggtggagaaggagaccaggagcaagctgcaggagattgacatcttcaacaaccagctgaaggagctgcgggagatccacaacaagcagcagctgcagaagcagaagtccatggaggccgagcggctgaagcagaaggagcaggagaggaagatcatcgagctggagaagcagaaggaggaggcccagaggcgggcccaggagcgggacaagcagtggctggagcacgtgcagcaggaggatgagcaccagaggcccaggaagctgcacgaggaggagaagctgaagcgggaggagagcgtgaagaagaaggatggagaggagaagggcaagcaggaggcccaggacaagctgggccgcctcttccaccagcaccaggagcccgccaagccagctgtgcaggccccctggagcacagctgagaagggccccctgaccatcagcgcccaggagaatgtgaaggtggtgtactaccgggccctgtacccctttgagagccgcagccatgatgagatcaccatccagcccggggacatcgtgatggtggatgagagccagacaggagagcccggctggctgggcggggagctgaagggcaagacaggctggttccctgccaactatgcagagaagatcccagaaaatgaggtgcctgcccctgtgaagcctgtgacagacagcaccagcgccccagcccccaagctggccctgcgggagaccccagcccccctggccgtgaccagcagcgagcccagcaccacccccaacaactgggccgacttcagcagcacctggcccaccagcaccaatgagaagccagagacagacaactgggatgcctgggccgcccagcccagcctgactgtgcccagcgctggccagctgcggcagaggtctgccttcaccccagccacagccaccggcagcagccccagccctgtgctgggccagggcgagaaggtggagggcctgcaggcccaggccctgtacccctggagggccaagaaggacaaccacctgaacttcaacaagaatgatgtgatcaccgtgctggagcagcaggacatgtggtggtttggagaggtgcagggccagaagggctggttccccaagagctatgtgaagctgatcagcggccccatcaggaagagcacctccatggacagcggcagcagcgagagccctgccagcctgaagagggtggccagccctgctgccaagcctgtggtgtctggagaggagttcatcgccatgtacacctatgagagcagcgagcagggcgacctgaccttccagcagggagatgtgatcctggtgaccaagaaggatggagactggtggacaggaacagtgggggacaaggccggggtcttccccagcaactacgtgcggctgaaggacagcgagggcagcggcacagctgggaagacaggcagcctgggcaagaagccagaaattgcccaggtgattgccagctacacagccactggacctgagcagctgaccctggcccctggccagctgatcctgatcaggaagaagaaccctgggggctggtgggagggggagctgcaggcccggggcaagaagaggcagatcggctggttccctgccaactacgtgaagctgctgagccctggcaccagcaagatcacccccacagagccccccaagagcacagccctggccgctgtgtgccaggtgattggcatgtatgactacacagcccagaatgatgatgagctggccttcaacaagggccagatcatcaacgtgctgaacaaggaggaccctgactggtggaagggggaggtgaatggccaggtgggcctcttccccagcaactacgtgaagctgaccacagacatggaccccagccagcagtggtgcagcgacctgcacctgctggacatgctgacccccacagagaggaagaggcagggctacatccacgagctgattgtgacagaagaaaattatgtgaatgacctgcagctggtgacagagatcttccagaagcccctgatggagagcgagctgctgacagagaaggaggtggccatgatctttgtgaactggaaggagctgatcatgtgcaacatcaagctgctgaaggccctgcgggtgaggaagaagatgtctggagagaagatgcctgtgaagatgattggagacatcctgagcgcccagctgccccacatgcagccctacatccgcttctgcagccggcagctgaatggagctgccctgatccagcagaagacagatgaggccccagacttcaaggagtttgtgaagaggctggccatggacccccgctgcaagggcatgcccctgagcagcttcatcctgaagcccatgcagagggtgacccgctaccccctcatcatcaagaacatcctggagaacaccccagagaaccacccagaccacagccacctgaagcacgccctggagaaggccgaggagctgtgcagccaggtgaatgaaggagtgcgggagaaggaaaattctgaccggctggagtggatccaggcccacgtgcagtgtgagggcctgtctgagcagctggtgttcaacagcgtgaccaactgcctgggccccaggaagttcctgcacagcggcaagctgtacaaggccaagagcaacaaggagctgtatggcttcctgttcaatgacttcctgctgctgacccagatcaccaagcccctgggcagcagcggcacagacaaggtgttcagccccaagagcaacctgcagtacaagatgtacaagacccccatcttcctgaatgaggtgctggtgaagctgcccacagaccccagcggagatgagcccatcttccacatcagccacatcgacagagtgtacaccctgcgggcagagagcatcaatgaaagaacagcctgggtgcagaagatcaaggccgccagcgagctgtacattgaaacagagaagaagaagcgggagaaggcctacctggtgcgcagccagagggccaccggcatcggccgcctgatggtgaatgtggtggagggcatcgagctgaagccctgccgcagccacggcaagagcaacccctactgtgaggtgaccatgggcagccagtgccacatcaccaagaccatccaggacaccctgaaccccaagtggaacagcaactgccagttcttcatccgggacctggagcaggaggtgctgtgcatcaccgtgtttgagcgggaccagttctccccagatgacttcctgggccgcacagagatccgggtggccgacatcaagaaggaccagggcagcaaaggacctgtgaccaagtgcctgctgctgcacgaggtgcccactggagagatcgtggtgcggctggacctgcagctgtttgatgagccctag

SEQ ID NO: 277158 - DNA, 4983 bp, Artificial Sequence
  derived and/or modified sequence
atggcccagttccccaccccatttggaggcagcctggacatctgggccatcaccgtggaggagcgggccaagcatgaccagcagttccacagcctgaagcccatcagcggcttcatcaccggggaccaggccaggaacttcttcttccagagcggcctgccccagcctgtgctggcccagatctgggccctggccgacatgaacaatgatggccgcatggaccaggtggagttcagcatcgccatgaagctgatcaagctgaagctgcagggctaccagctgcccagcgccctgccccctgtgatgaagcagcagcctgtggccatcagcagcgccccagccttcggcatgggcggcatcgcctccatgccacccctgacagctgtggcccctgtgcccatgggcagcatccctgtggtgggcatgagccccaccctggtgtcctctgtgcccacagctgctgtgccccccctggccaacggggcccctcctgtgatccagcccctgcctgcctttgcccaccctgctgccaccctgcccaagagcagcagcttcagccgcagcggccctggcagccagctgaacaccaagctgcagaaggcccagagctttgatgtggcctctgtgccccctgtggccgagtgggccgtgccccagagcagccggctgaagtaccggcagctgttcaacagccatgacaagaccatgagcggccacctgaccggcccccaggcccggaccatcctgatgcagagcagcctgccccaggcccagctggccagcatctggaacctgagtgacatcgaccaggacggcaagctgacagctgaggagttcatcctggccatgcacctgattgatgtggccatgagcggccagcccctgccccctgtgctgcccccagagtacatccccccatccttcagaagagtgcgcagcggcagcggcatcagcgtcatcagcagcacctctgtggaccagaggctgcctgaggagcctgtgctggaggatgagcagcagcagctggagaagaagctgcctgtgacctttgaggacaagaagcgggagaactttgagcggggcaacctggagctggagaagaggcggcaggccctgctggagcagcagaggaaggagcaggagcggctggcccagctggagagagctgagcaggagaggaaggagcgggagcggcaggagcaggagaggaagaggcagctggagctggagaagcagctggagaagcagcgggagctggagcggcagcgggaggaggagaggaggaaggagattgaaagaagagaggccgccaagcgggagctggagcggcagaggcagctggagtgggagaggaacagacggcaggagctgctgaaccagaggaacaaggagcaggaggacatcgtggtgctgaaggccaagaagaagaccctggagtttgagctggaggccctgaatgacaagaagcaccagctggagggcaagctgcaggacatccgctgccgcctgaccacccagaggcaggagattgagagcaccaacaagagccgggagctgagaattgctgagatcacccacctgcagcagcagctgcaggagagccagcagatgctgggccgcctcatccctgagaagcagatcctgaatgaccagctgaagcaggtgcagcagaacagcctgcaccgggacagcctggtgaccctgaagagggccctggaggccaaggagctggcccggcagcacctgcgggaccagctggatgaggtggagaaggagaccaggagcaagctgcaggagattgacatcttcaacaaccagctgaaggagctgcgggagatccacaacaagcagcagctgcagaagcagaagtccatggaggccgagcggctgaagcagaaggagcaggagaggaagatcatcgagctggagaagcagaaggaggaggcccagaggcgggcccaggagcgggacaagcagtggctggagcacgtgcagcaggaggatgagcaccagaggcccaggaagctgcacgaggaggagaagctgaagcgggaggagagcgtgaagaagaaggatggagaggagaagggcaagcaggaggcccaggacaagctgggccgcctcttccaccagcaccaggagcccgccaagccagctgtgcaggccccctggagcacagctgagaagggccccctgaccatcagcgcccaggagaatgtgaaggtggtgtactaccgggccctgtacccctttgagagccgcagccatgatgagatcaccatccagcccggggacatcgtgatggtggatgagagccagacaggagagcccggctggctgggcggggagctgaagggcaagacaggctggttccctgccaactatgcagagaagatcccagaaaatgaggtgcctgcccctgtgaagcctgtgacagacagcaccagcgccccagcccccaagctggccctgcgggagaccccagcccccctggccgtgaccagcagcgagcccagcaccacccccaacaactgggccgacttcagcagcacctggcccaccagcaccaatgagaagccagagacagacaactgggatgcctgggccgcccagcccagcctgactgtgcccagcgctggccagctgcggcagaggtctgccttcaccccagccacagccaccggcagcagccccagccctgtgctgggccagggcgagaaggtggagggcctgcaggcccaggccctgtacccctggagggccaagaaggacaaccacctgaacttcaacaagaatgatgtgatcaccgtgctggagcagcaggacatgtggtggtttggagaggtgcagggccagaagggctggttccccaagagctatgtgaagctgatcagcggccccatcaggaagagcacctccatggacagcggcagcagcgagagccctgccagcctgaagagggtggccagccctgctgccaagcctgtggtgtctggagaggagttcatcgccatgtacacctatgagagcagcgagcagggcgacctgaccttccagcagggagatgtgatcctggtgaccaagaaggatggagactggtggacaggaacagtgggggacaaggccggggtcttccccagcaactacgtgcggctgaaggacagcgagggcagcggcacagctgggaagacaggcagcctgggcaagaagccagaaattgcccaggtgattgccagctacacagccactggacctgagcagctgaccctggcccctggccagctgatcctgatcaggaagaagaaccctgggggctggtgggagggggagctgcaggcccggggcaagaagaggcagatcggctggttccctgccaactacgtgaagctgctgagccctggcaccagcaagatcacccccacagagccccccaagagcacagccctggccgctgtgtgccaggtgattggcatgtatgactacacagcccagaatgatgatgagctggccttcaacaagggccagatcatcaacgtgctgaacaaggaggaccctgactggtggaagggggaggtgaatggccaggtgggcctcttccccagcaactacgtgaagctgaccacagacatggaccccagccagcagtggtgcagcgacctgcacctgctggacatgctgacccccacagagaggaagaggcagggctacatccacgagctgattgtgacagaagaaaattatgtgaatgacctgcagctggtgacagagatcttccagaagcccctgatggagagcgagctgctgacagagaaggaggtggccatgatctttgtgaactggaaggagctgatcatgtgcaacatcaagctgctgaaggccctgcgggtgaggaagaagatgtctggagagaagatgcctgtgaagatgattggagacatcctgagcgcccagctgccccacatgcagccctacatccgcttctgcagccggcagctgaatggagctgccctgatccagcagaagacagatgaggccccagacttcaaggagtttgtgaagaggctggccatggacccccgctgcaagggcatgcccctgagcagcttcatcctgaagcccatgcagagggtgacccgctaccccctcatcatcaagaaccagctggtgttcaacagcgtgaccaactgcctgggccccaggaagttcctgcacagcggcaagctgtacaaggccaagagcaacaaggagctgtatggcttcctgttcaatgacttcctgctgctgacccagatcaccaagcccctgggcagcagcggcacagacaaggtgttcagccccaagagcaacctgcagtacaagatgtacaagacccccatcttcctgaatgaggtgctggtgaagctgcccacagaccccagcggagatgagcccatcttccacatcagccacatcgacagagtgtacaccctgcgggcagagagcatcaatgaaagaacagcctgggtgcagaagatcaaggccgccagcgagctgtacattgaaacagagaagaagaagcgggagaaggcctacctggtgcgcagccagagggccaccggcatcggccgcctgatggtgaatgtggtggagggcatcgagctgaagccctgccgcagccacggcaagagcaacccctactgtgaggtgaccatgggcagccagtgccacatcaccaagaccatccaggacaccctgaaccccaagtggaacagcaactgccagttcttcatccgggacctggagcaggaggtgctgtgcatcaccgtgtttgagcgggaccagttctccccagatgacttcctgggccgcacagagatccgggtggccgacatcaagaaggaccagggcagcaaaggacctgtgaccaagtgcctgctgctgcacgaggtgcccactggagagatcgtggtgcggctggacctgcagctgtttgatgagccctag

SEQ ID NO: 277159 - DNA, 954 bp, Artificial Sequence
  derived and/or modified sequence
tgacccctgatggagagcgagctgctgaccgagaaggaggtggccatgatattcgtaaattggaaagaactgattatgtgcaacattaaacttcttaaggcattacgagtgcgaaaaaagatgtcaggtgagaagatgccagtcaaaatgattggggacattctctccgcccagctgccgcatatgcagccttacataaggttttgctcacgccagctgaacggagctgcgctcatccagcagaaaacagacgaggcccctgatttcaaggagttcgtcaaacgccttgcgatggacccaagatgcaagggaatgccgctgtccagcttcattctgaaaccgatgcagcgggtgaccagataccctcttatcatcaagaatcagctagtttttaatagcgtgacgaattgcctgggccctagaaagtttttgcacagcggtaagctgtacaaagctaagtcaaacaaggagctctatgggtttttatttaacgactttctgttactgacccagattaccaaaccacttggatcctctggtacggataaggtgttctcccccaagtcaaacctgcagtataaaatgtacaagacacccatttttctgaacgaggtgctcgtcaagcttccaactgatccatcaggagacgagccaattttccacatctcccatatcgatcgggtgtacactttaagggccgaaagtattaatgagcggacagcctgggttcaaaaaatcaaggcggccagtgaactctacatagagaccgaaaagaagaaacgagagaaagcgtacctcgtgcgctctcagagggctactggaattggccggctcatggtcaacgttgttgagggtatcgaattaaagccatgccgctcgcacggcaagtcaaacccttactgcgaagttacgatgggctctcagtgtcacatcaccaaaacaattcaagactag

SEQ ID NO: 277160 - DNA, 3237 bp, Artificial Sequence
  derived and/or modified sequence
atggcccagttccccacccccttcggcggcagcctggacatctgggcaatcaccgtagaggagagagctaagcatgatcagcagtttcacagtcttaagcctatttccggctttattactggtgaccaagcacggaattttttcttccaaagtgggctgccccagcccgtgttggcccaaatttgggctctcgctgacatgaataacgatgggcgtatggaccaggtggagttctcaatagccatgaaactcatcaaattgaaactgcaagggtaccagctgccatctgctctcccacctgtcatgaaacagcagcctgtggcaatttcttcagctcctgcgtttggaatgggcggcatcgccagcatgccaccgttgacggccgtggcgcctgttcccatggggtctatccccgtggtgggcatgagtcccacactggttagttctgtacctactgccgccgtcccccctctggctaacggcgcaccacccgtgatccagccgcttcccgcctttgctcatcctgctgccacactgccgaaatctagtagcttcagtagaagcggacccggaagccagctgaataccaagctgcagaaagcacagagttttgatgttgcgtctgtgcctcccgttgctgagtgggctgtgccacaatcctctaggttaaagtaccgccaactgttcaatagtcacgacaagaccatgagtgggcatctgaccggtccacaggccaggactatccttatgcaatcctccttgcctcaggcacagttggcctcaatttggaatctgtctgatatagatcaagatggtaaactaaccgccgaggagttcatcttggccatgcatctaatcgacgtggctatgtcagggcagcccctgccccctgtcctgccaccagaatatatccctccatcctttagaagagttcggtcgggctcaggcatctctgttatcagtagcacctccgtggaccagcgcctccccgaagagcccgtgctggaggatgagcagcagcaactggagaagaagctgccagttacattcgaggataagaaacgagagaactttgaaagagggaatttagaacttgaaaaaaggagacaggcattactggaacagcaacgaaaggagcaagagcgtctggctcagctcgagagagcggagcaggagaggaaggaaagagaaaggcaggaacaggaacgcaaacggcaattggagctcgaaaagcagttggaaaagcagagggagttagagcgacagagggaggaagagagacgtaaggagatcgagcggagggaggcagctaaaagagaactggaacgacagagacaactggagtgggagaggaaccggcggcaggaactcttgaaccagcggaacaaagagcaggaggacattgtcgtgctaaaggccaagaaaaagacacttgagtttgaactggaggccctgaacgataaaaagcatcaactagaaggtaaactgcaggacattaggtgccgcctcacaacacaacgtcaggaaatcgagtctacaaataagtctcgcgaactgcgaattgctgaaatcacgcatctgcagcaacagttgcaagagtcccaacagatgttagggagattaatccccgagaagcagatcctgaatgaccagcttaaacaggtgcagcagaatagcctgcatcgagacagtttggtgactttaaagcgtgctttagaagcaaaggaactggcccgccaacatttaagggatcaattagacgaagttgaaaaggagaccagaagcaagctgcaggagatcgacattttcaacaaccaacttaaggaactcagagagatacacaataagcagcagctccagaaacagaagtctatggaggccgagagactgaaacaaaaggagcaggagcgaaaaatcatcgaactggagaagcagaaggaagaggctcagcgacgtgctcaggaacgcgataagcagtggctagagcacgttcagcaggaagatgagcaccagcgtccccggaaactccatgaagaggagaagctgaagcgcgaagaatcagtgaagaaaaaggatggcgaagagaaagggaaacaggaggcccaggataagctaggtagattgtttcatcaacatcaagagcctgcgaagccggcagtgcaggccccatggtctacagccgaaaagggaccactgaccatttcggcgcaagaaaacgtgaaagtcgtctattaccgtgccctatacccttttgagtcacgcagccatgacgaaatcactatccaaccaggggatattgttatggttgacgaaagtcaaactggtgagcccggatggttgggaggagagctgaagggcaagaccgggtggttccccgccaactacgcagaaaagatccctgaaaatgaagtccccgcgccagtgaagcctgtgacagactccacatctgcccctgccccaaaactcgccttgagggaaactcctgccccccttgccgttacctcgtctgagccttccacaacacccaataactgggccgacttctcgtctacttggccaacctcaaccaacgagaagccggagaccgacaattgggacgcttgggctgcccagcccagtctcacggtgccctctgctggtcagcttcggcagcgtagcgctttcactccagccaccgcaaccgggtcaagcccttctccagttctagggcaaggggagaaagtcgagggcctgcaggctcaggctctgtatccatggcgcgccaagaaggacaaccacttgaactttaacaaaaacgacgtgattacagtcttagagcagcaggacatgtggtggttcggagaggtgcagggtcaaaagggctggttccctaaatcatatgttaaattgattagcggcccaattcggaagtccacctctatggacagcggttctagcgagagccctgcatccctgaaacgtgttgcaagcccagccgcaaagcccgtcgtcagcggtgaggaatttatcgcaatgtatacttacgaatcttccgagcaaggtgacttaacctttcaacagggagatgtaattttggttacaaaaaaagatggggactggtggacaggcacagtaggcgacaaagccggcgttttccctagcaattacgtgcggttgaaggacagtgaggggtctgggacagcgggcaaaactgggtcattggggaaaaagccgggccccagctgcaatgtcaagtag

SEQ ID NO: 277161 - DNA, 3048 bp, Artificial Sequence
  derived and/or modified sequence
atggcccagttccccacccccttcggcggcagcctggacatctgggccatcaccgtcgaggaacgggctaaacacgaccagcaattccacagcttgaagcccatcagtggctttataactggtgaccaggcccggaattttttctttcagtccggtctccctcagcccgtgctagcccaaatttgggcactcgccgacatgaataacgatggacgcatggaccaggttgaattttcaatcgcaatgaagcttatcaagcttaagttgcagggctaccaactgccttcagccttacctcccgtcatgaagcagcagcccgtagccatctctagcgcccctgctttcgggatgggcggcatagccagcatgccaccccttactgccgtggccccggtgcctatgggaagtatcccagtcgtgggcatgtcaccaacgttagtgagcagtgtccccaccgccgccgtgcccccccttgccaacggcgcccctcccgtgattcagccactgcctgccttcgcccaccctgcggccactctgccaaaatcaagtagctttagccgatccggccccggatcacagctgaatacaaagctccagaaagcacagtcatttgacgtagcctctgtgccccctgtggccgagtgggcagtgccacagtcctcacgcctgaagtaccgccagctgtttaatagccacgacaaaaccatgagcggacacctgacaggtcctcaggccaggaccattttgatgcagtccagcttgccgcaggctcagcttgcttccatttggaatctctccgacattgatcaagacggtaagttgactgcagaggagtttatcctggccatgcacctgatcgacgtggccatgagtggccagcccctcccaccagtgctaccacccgagtatatcccacctagttttcggcgcgttagatcaggcagcggcattagcgtgatatcaagtaccagtgtggaccaaagattacccgaagagcctgtgcttgaagatgaacagcaacagctggagaaaaagttgcctgtgacatttgaagataagaagagggaaaatttcgagagaggcaatttagaactggagaaacggcggcaagcactcttagaacagcagcggaaggagcaggagaggcttgcccagctggaaagagcagaacaagaaagaaaagaacgagaacggcaggaacaggaaaggaagcgacagctcgagctcgaaaaacagctggaaaaacagcgtgaactggagcgccagcgggaggaggaaaggcgaaaagaaatcgaacggagggaagccgccaagcgggaacttgaaaggcaacgtcagttggagtgggagaggaacaggagacaggagttgttgaatcagcgcaacaaggagcaggaggacatcgtcgttctcaaggcaaagaagaagacactggaattcgagctagaagcactgaatgataagaaacaccaactcgagggcaagctgcaagatatcaggtgtcgtttgactactcagcgccaggaaatcgagtccactaacaagtccagagaattgcgaattgcagagataacccacctccagcagcagctacaggaaagccagcagatgctgggccggctgattcctgagaagcagatcctgaatgaccagttgaagcaagtgcaacagaacagccttcaccgtgactctctcgttacactcaaaagggccttagaagcaaaggagctggcgcgtcaacacctgcgtgaccagcttgacgaggtagaaaaggagacgcggtccaagctccaggaaattgacatattcaataaccagctaaaggaactgcgggaaattcacaacaaacagcaacttcagaagcagaaaagcatggaggcagagcgattgaagcagaaggaacaggaacggaagatcattgagctggagaaacagaaagaagaagcacaacgacgggcccaggagagagacaaacagtggctcgaacacgtccagcaagaagatgagcatcaaaggcctcggaagttacacgaggaggaaaaacttaagcgcgaggagtccgtgaagaagaaggacggcgaagagaaggggaaacaagaggctcaggataaactgggacgattgtttcaccaacaccaggaaccggccaaacccgctgtccaagctccctggtccacagccgagaagggccccttgaccattagtgcacaggaaaatgtgaaagttgtttactaccgagctctatacccgttcgaatctaggtcccatgacgagatcaccatccagcctggagacatagtgatggtggatgagtcacagaccggcgaacctgggtggttaggcggagagttaaagggtaaaacaggatggttcccggcgaattacgctgagaaaattccagaaaatgaggtgcccgcacctgtgaagcctgtgactgattccacatcagcgccggcccctaagctcgctctacgggagacacctgcacctttggcggtgacctcctctgagccttctacaacaccaaataattgggctgatttttcctctacatggcctacctcaaccaatgagaagccagaaacagataattgggatgcctgggccgcccagcctagcctcactgttccctccgctggacaactgcgtcagagatcggcgttcacacccgccactgcaacaggctcctcccccagccccgtgttaggacaaggcgaaaaggtggaaggcttgcaggcacaagcgctgtatccgtggagagccaagaaggacaatcacctcaatttcaataagaacgatgttataacggtgcttgaacagcaggacatgtggtggttcggcgaggtccagggccagaagggctggtttccaaaatcatacgtgaagttaatctcgggccccatccggaagagcacctccatggacagcggttcatcagaatctcccgcctctctcaagagggtggctagtcctgcagctaagccagttgtgagcggggaagggctgtggaactgctgggaaaaccgggagtttcgaaaaaagacctag

SEQ ID NO: 277162 - DNA, 3648 bp, Artificial Sequence
  derived and/or modified sequence
atggcccagttccccacccccttcggcggcagcctggacatctgggcaattacggtagaagaacgcgccaagcacgatcagcaatttcacagtttgaagccgatctcgggttttatcactggagatcaggcccgtaactttttttttcagagtggactgccccagccagtgctcgcgcaaatctgggccttggccgatatgaataacgacggacgaatggaccaagtcgagttcagtattgcaatgaaactcatcaagcttaagctgcagggttatcaattgcccagtgcattaccccctgtgatgaagcagcaacccgtggctatttcttccgctcccgcatttggcatgggaggtattgctagcatgccacctctgaccgcagtggcccccgtcccgatgggttccatcccggtcgtgggaatgtcaccgactctggtctcatccgttccaaccgctgccgttccaccactggctaatggagcgccccccgtgatccagcccctgccagcctttgcccaccctgcagcaaccctccctaagtcatccagcttctctaggagtggtccaggctctcaattgaatacgaaactgcagaaggctcaaagcttcgacgtggcgtctgtgccgcccgttgccgaatgggccgtgccccagtccagcaggttgaagtacaggcagctgttcaattctcatgataagacaatgtccggacatcttactggtccccaggcccgcacaatcttgatgcagtcatcattgcctcaggcccagctggcttccatttggaatctgtctgacatagaccaggatggcaaacttacagccgaggaattcattttggctatgcacttaatcgacgtggcaatgtcaggacaacccctacctcccgtgttacctccagaatatattcccccatctttcaggcgagtaagaagtggatcagggatctctgtgattagttccaccagtgtggaccagagactgcctgaggaaccggttctggaagatgaacagcagcagttggaaaagaagctgcctgtcactttcgaagacaagaaacgtgagaacttcgagcgtgggaacctggagctcgaaaaacggaggcaggcactgctcgagcagcagaggaaagagcaagagcgcctcgctcaattggagagggcagaacaggaacggaaagagcgtgagagacaggaacaggaaagaaaacggcagctggagctcgagaaacagctcgaaaagcagcgggaacttgaaagacagcgtgaggaggagcggagaaaagaaattgagaggcgggaggcagctaaacgcgaactggaacgtcagagacagcttgagtgggaaaggaaccgcaggcaggagctgctcaatcagagaaacaaagagcaggaagatatagtcgtgctgaaggcaaagaagaagacactggagttcgagctggaggctcttaatgataaaaaacaccaacttgaaggaaaacttcaagatatccgttgcaggttaacaacgcagagacaggaaatagagtctacaaataagtctagggaactacgcatcgccgaaatcactcacttgcagcaacagttgcaggaatcacagcagatgttgggacgtttaattcctgagaagcagatattgaacgatcagcttaagcaggtgcaacagaattcactccatcgggacagtctggtcaccttgaagcgcgccctcgaagctaaggaactggcccgacaacacttgagagaccagctggatgaagtagagaaagaaaccaggagtaaattacaggaaatagatatttttaataatcaactcaaggaactgagagagattcacaacaagcaacagctgcagaaacagaaatctatggaggctgaaagattaaagcaaaaggaacaggagcggaagataattgagctggagaagcagaaggaggaggcacagcgccgcgcccaggagcgggacaagcaatggcttgagcacgtgcaacaggaggacgagcatcaaagaccccggaagctacatgaggaagaaaaattgaagagagaagagtcggtgaagaaaaaggacggagaggagaagggcaagcaggaggctcaggacaagttgggacggctctttcatcaacaccaggagcccgccaaacccgctgtgcaagccccatggtccacagctgaaaagggtccacttaccatctctgctcaggagaacgttaaggtcgtttattatagagccttgtaccccttcgaatctcgatcccatgacgaaattacaatccagcccggcgacatcgtcatggtggatgagtctcaaactggcgaaccaggatggttaggcggggaacttaagggcaaaaccggatggttcccggcgaattacgctgaaaagatcccagagaacgaggtgcctgcacctgtaaaacccgtgacggacagcactagcgctcccgctcctaaactggctctgcgcgagactccagctccactcgcggtaacctcatccgagcctagtaccacacctaataactgggccgattttagctctacgtggccgacctcaaccaacgagaagccggagacagataactgggacgcttgggctgctcagccctctctgacggtcccttctgccggacaactcagacagaggtccgctttcacgcccgctaccgctactggctcatcaccctcaccggttttaggtcagggagaaaaagtggagggactgcaggcgcaggccctctacccctggcgggcaaagaaagacaatcacctgaattttaacaaaaatgacgtgatcacagtactggaacagcaggatatgtggtggttcggcgaggttcaaggccagaagggctggtttcctaagtcttatgtcaagcttatctccgggcccatacgtaagtcgactagcatggattctggctctagtgagtcgcctgcaagcctcaaacgtgtcgcaagtcccgctgcgaagcctgtagtttccggagaagaattcattgctatgtacacatacgaatcctcggaacagggggacctgaccttccagcagggtgacgtgattctggttacaaaaaaggacggggattggtggactggtaccgtgggggataaagctggcgtcttcccatcaaactatgtcaggctgaaagattccgagggcagcggaacggccgggaagactggatccttagggaaaaagcctgagatcgctcaggttattgcctcatacaccgcgaccggacctgaacagcttaccttagctcccggccaactcattctgattaggaaaaaaaacccaggggggtggtgggagggagaactacaggctagaggaaaaaagcggcagattggctggttccccgccaattatgtgaaacttctctccccaggcaccagcaagataacacctaccgagccccccaaatctactgccctggcggctgtgtgccaagtgatcggtatgtacgattacacagcccagaacgatgatgagcttgcgtttaataaaggtcagattatcaatgttctcaataaggaagaccctgattggtggaagggggaggtaaacggccaggtgggccttttccccagcaattatgtgaagctcaccaccgacatggaccctagtcagcaatag

SEQ ID NO: 277163 - DNA, 3537 bp, Artificial Sequence
  derived and/or modified sequence
atggcccagttccccacccccttcggcggcagcctggacatctgggccatcactgtggaggaacgcgccaagcatgaccaacaattccacagtcttaagcctatctcaggattcattacaggcgaccaggccagaaacttctttttccagagtggtctgccccagccggtgctggcccagatctgggcccttgccgacatgaacaacgacggccgcatggatcaggtggagttctcaatcgccatgaagctgattaaactgaagctgcagggctaccagctgcccagcgcgcttccacccgtcatgaagcaacagccggtcgccatctcgagtgcccccgcctttgcagcagtccctcctctggctaatggggctcctccagtgatacagcctttacccgcctttgcccacccagcggcgacactccctaaatcaagctctttcagccggtcgggccccggaagccagttgaacaccaaattgcagaaagctcaatcctttgacgtggccagtgtgccgcccgtggcagaatgggccgtgccgcagtcttcacgactgaagtataggcaactcttcaactcccacgacaaaacaatgtctggacatctgaccggccctcaggcccgcaccatcctgatgcaatcctccttgccgcaggcccagcttgcgtctatctggaatttgtctgatatcgatcaggacggcaagttgactgctgaggaattcattctggctatgcatctgattgatgtcgcaatgtccggacagcctttgccgccggtattacccccagagtatattccgcctagtttccgacgcgtgagaagtggctctggaatctcggtgattagtagcacatcagtagatcagcgactgcccgaagaaccagtgctggaagatgagcagcaacagctagagaaaaaacttcccgtgacgtttgaggataagaagcgggaaaattttgaacgaggcaacttggaattggaaaagcggagacaagcactgcttgagcagcagcgcaaggagcaggagcgcctggcccagttggaacgagctgagcaagaacgtaaggaaagagaacgccaagaacaggaacgcaagagacaactcgagcttgagaaacagctcgagaagcagcgtgagctagaacggcaacgagaagaggagcggcgtaaggagattgagcgtagggaagccgcgaaaagagaactcgaaaggcagaggcagctcgaatgggaacgcaaccggcgacaggagctcctaaatcagcggaacaaagagcaggaggacatcgtcgtcctgaaggccaagaagaaaacgctcgagttcgagcttgaggcgctgaacgacaagaaacaccagctggaaggcaagctgcaggacatccgttgccgcctcacaactcagcggcaggagatcgagagcaccaataagtcccgcgagctccgcatagctgagattacacacctgcagcagcagttgcaggagagtcaacaaatgctgggacgcctcatccctgaaaaacagatcctgaatgatcagctcaagcaggtgcagcagaactctctacatcgtgactccctggtcactttgaaacgcgccctggaagcgaaggagctcgcgagacagcatctgagagaccagctcgacgaggtggagaaggagacgcggtctaaactgcaggagatcgatattttcaacaaccagctgaaggaattacgagagatacataacaagcagcaactccagaagcaaaagtccatggaggctgagcgcctcaagcagaaggaacaagaaaggaagatcattgaactggaaaagcagaaagaggaggcccagaggagagcgcaggaacgggacaagcaatggctagagcatgtacaacaggaggacgaacaccaacgcccgagaaagctgcacgaggaggaaaagctcaagcgggaagaatcggtgaaaaagaaggatggtgaggagaagggcaagcaggaggcgcaggataaactggggaggttgttccaccagcaccaagaacctgccaagcctgccgtacaggccccttggagtacggcagagaaaggccctctcacaattagcgcgcaggaaaacgtgaaggtggtgtattaccgcgcgctctacccatttgagtctaggagccacgatgaaataaccattcagcccggcgatatagtgatggtggacgaatcacaaactggagagcctggctggctcggcggcgagttaaaaggcaagacagggtggtttcctgccaattacgcagagaaaattcccgaaaacgaagttcccgccccagtgaagcctgtaaccgactctactagcgctcctgccccgaagctggccctcagagaaacccctgctccactggctgtgacaagtagtgagcctagtacaactccaaacaattgggctgacttttcaagtacttggcccacatctaccaatgaaaagcccgaaactgacaattgggacgcctgggccgcccagccaagcctcaccgtcccaagcgcagggcagctgcggcagcgatccgcatttaccccagcaactgctacaggatccagcccgtcacctgtgctcgggcagggagaaaaggtggagggccttcaggcccaggctttgtatccgtggagagctaaaaaggataatcacctgaactttaataagaacgatgtgatcacagtgttggagcagcaggatatgtggtggtttggagaggtgcagggccagaaggggtggtttccaaagagctatgtaaaactcatttctggccccatccgcaagtcaacttcaatggactcaggatcatctgagagccctgccagcctgaaacgggtcgccagcccagccgctaaacctgtggtgtccggggaagaattcatcgctatgtatacatatgagagcagcgaacagggggacctcacgttccagcaaggagatgtcattcttgtgacaaagaaagacggcgactggtggacaggaaccgtaggagacaaagcgggcgtgtttccatcaaattatgtcaggttgaaagattcagaggggtccgggactgctggcaaaacaggtagtctggggaagaagcccgaaattgcccaggtcattgcctcatacaccgcaactggtcctgaacaactgactctcgcacccggtcagctgattttaattcggaaaaaaaaccctggtgggtggtgggaaggcgaattacaggcgaggggaaagaagagacagatcggatggtttccagccaactatgtcaagctgctctctcccggaaccagtaaaattacgccgactgagccccccaagtctaccgcacttgccgccgtgtgtcaggtgattggcatgtacgattatacagcacaaaacgacgatgagctcgccttcaacaaaggccagattatcaacgtgctcaacaaggaggacccagactggtggaagggggaggtcaatgggcaggtgggcctctttccttccaactacgtgaagctgaccaccgacatggacccctctcagcaatag

SEQ ID NO: 277164 - DNA, 5151 bp, Artificial Sequence
  derived and/or modified sequence
atggcccagttccccacccccttcggcggcagcctggacatctgggccattacggtggaagaaagagccaagcatgatcaacagtttcacagcctcaaaccaattagcggtttcatcacgggagaccaggcaaggaatttcttcttccaatctggacttccacagcccgtactcgcccaaatttgggccttagccgatatgaacaatgacggccgcatggaccaggtcgagttcagcattgcaatgaaactgatcaagttgaaacttcagggttaccagctgccctccgctctgccccccgtcatgaaacagcagcctgttgcaatctcttccgctcctgcctttggaatggggggtatcgcatcaatgccgcccctgacagccgttgcccctgtccctatggggtccatcccggttgtgggtatgagccctactttagtcagttcggtacccaccgcagccgtgccaccactcgccaatggggcgccgccagtgatacagcccttacccgcctttgcacaccccgcagcaacacttccgaagtcctcctcattttctagatcaggacctggtagccagctgaacacaaagctgcagaaagctcaaagtttcgatgtggcctcagtgccaccagtcgcagagtgggcggtcccccagagctctcggctcaagtatcgtcagctctttaatagccatgataaaactatgtcagggcacctgacaggcccacaagctagaaccatcctaatgcagtcctccctgcctcaggcccagttggcaagcatctggaacctctctgacatcgaccaggatggtaagctgaccgccgaggagtttatccttgctatgcatctgatcgacgttgctatgagtggacaaccactgcctccagtgctgccccctgaatacattccaccctccttccggagagtcaggtctggatcagggatctccgtcataagtagtacttctgtggaccaaaggctcccagaggagcccgtgctggaagacgagcagcaacaactggaaaagaaactgcccgtcaccttcgaagataaaaagcgggagaattttgagcgcggtaatcttgaacttgagaagcggaggcaagctttgctcgaacagcagcggaaagagcaggaaaggctggctcagctcgagagggctgaacaggagaggaaagagcgagagagacaggagcaggaaaggaagcggcaattagaactggagaagcaacttgagaagcagcgagagctggaacgccagagggaggaagagcggcgcaaggaaatagagaggagagaggccgcaaaaagggaactcgaacgtcagcgccaactcgagtgggaaagaaatcgccgccaggaactgttgaaccagcgcaataaagaacaagaggacatcgtcgtcctgaaggctaagaaaaagacccttgagttcgagttggaggctcttaacgacaaaaagcatcagctagaaggcaaactccaggatattcggtgcagacttacaacccagcgacaggagattgaatccaccaacaagagccgcgagcttagaatcgcggagatcacacacctccaacagcagctccaagaatcccagcagatgctcggccgcctgatccccgaaaaacagatattaaatgaccagctcaagcaagtgcagcagaattcgttgcatagagatagccttgtcacactgaagcgcgccctcgaggccaaagaactagcaaggcagcatttacgagaccagctggatgaggtggaaaaagagacgcgaagcaagctgcaggagatcgacatatttaataaccagctgaaggagctgagagagatccacaataaacagcagttgcaaaaacagaagtctatggaggctgagagactcaagcagaaggaacaagagcgaaagataattgaactggagaagcagaaggaggaagctcagcgcagagcccaagagagagataagcagtggcttgaacacgtgcagcaggaggacgagcatcagaggccccggaaactgcacgaggaggagaagttgaagagagaagagtccgtgaaaaagaaagacggcgaagagaagggcaaacaggaggcccaggataagcttgggaggttgtttcaccagcatcaggagcctgcaaagcccgctgtccaggcaccttggtcaaccgcggagaagggcccactcactatctctgcgcaggaaaatgtcaaggtcgtgtactatcgggctctgtaccctttcgaatctcgatcccacgacgagattactattcagccaggagacatcgttatggtagatgagagccagactggcgagcccggatggctcggcggagaactgaagggcaagactgggtggttccccgcaaactatgccgaaaagataccagaaaatgaagtaccagccccagtgaagcctgtgacagattccaccagcgctccagcacctaaacttgccctgcgagagacacccgccccactcgccgttacatctagtgagccgagtactacccctaacaattgggccgatttcagctctacttggcctacctccacaaacgaaaagccggagacagataactgggacgcgtgggctgcacagcccagtctgacagtccctagcgcaggacagctgcggcagaggtcagcgttcactccagccacagctaccggctcctcgccctcccctgtgcttgggcagggggaaaaggtagaaggcctacaggcacaggctctgtatccttggcgcgcgaaaaaagacaaccacttaaacttcaacaagaacgacgttatcactgtcctggagcagcaagacatgtggtggtttggggaggtgcagggtcagaaaggatggtttcctaaatcctacgtgaagttaatcagtgggccaattcggaagagcaccagcatggactcaggaagcagcgagtcaccggccagccttaagcgggtcgccagtccagctgctaaacccgtcgtgagcggggaggaattcatcgccatgtacacttacgaaagcagtgagcagggcgatctgacctttcagcagggggacgtcatactagttacaaagaaagacggagattggtggacggggacagtcggggataaagctggggtattccctagtaactacgtgcggttgaaagattcggaggggtcagggactgccggcaagacaggctcactaggcaagaagcctgagattgctcaggttatcgcatcatataccgctaccgggccagagcagctgacgcttgcccccgggcagctgatcctgatccggaaaaaaaatcccggaggctggtgggaaggcgaactgcaggcaagagggaaaaagcggcagatcgggtggttcccggccaattacgtgaaattgttgagcccaggcaccagtaaaatcactcctaccgaaccgcctaagtccacagcgcttgcggccgtgtgccaggttattggcatgtacgactatactgcccagaacgatgatgaactcgcgttcaataaagggcagattattaatgtcctcaataaggaagatcccgattggtggaagggcgaggtaaatgggcaggttggcttattccccagcaattacgtgaagctcacgaccgatatggacccctcgcagcagtggtgctctgatctccatttgttggacatgctgacgccaacagaacggaaaagacaggggtacatccacgagctcatcgtaacagaagaaaactacgtgaacgatctgcaactcgtgacggaaatattccagaaaccgcttatggaatccgagttattgactgaaaaagaggttgccatgatttttgtgaactggaaggaactcattatgtgcaatatcaagctgcttaaagctctgcgggtgcggaaaaaaatgtccggcgagaaaatgcctgtgaagatgattggggatatcctgagcgcacagcttccccacatgcagccatacatacgcttctgtagtcggcagctgaatggggccgccctgattcagcaaaagactgatgaggcccccgattttaaggagttcgtcaagcgcttagccatggacccccggtgcaaaggtatgccactgtccagtttcattcttaagccaatgcagcgggttactcggtaccctctcatcattaagaatatccttgagaatactccagaaaaccatccagatcattcacacctgaaacatgctctcgaaaaagccgaagaactctgttcacaggtaaatgaaggcgtccgagagaaagagaattctgacaggctcgagtggattcaagcacacgtccaatgcgaaggcctaagcgagcagctggttttcaattcagtgaccaactgccttgggccgcgcaaatttctgcactccggcaaattgtacaaggcaaagtcaaacaaggaactttatggcttcctgttcaatgactttttgctgctgacccagataacaaaaccacttggaagctctggtacagataaggtgttctctccgaaatcaaatcttcagtacaagatgtacaaaacacctatctttttgaatgaggtactggtgaagttgccaacagaccccagcggggatgagccaatctttcacatctcgcacatcgaccgggtatataccctgagagccgagtcaattaacgaaaggactgcctgggtgcagaaaattaaggctgcttcggaactgtatatagagactgaaaaaaagaagcgggaaaaggcatatctagtacgatcccagagagctaccggaatcggacgcctgatggtgaatgttgtggaggggatcgaattgaaaccttgcagaagtcatgggaagagcaacccttattgtgaggtcactatgggctctcagtgccatatcacaaagacgatccaggatacactaaacccaaaatggaactcaaactgtcagttctttattcgcgacctagaacaggaggttttatgtattacagtcttcgaaagggatcagttttctcctgacgatttcctgggacgaaccgaaatccgagtagcagatatcaaaaaagatcagggctccaagggaccagtgacgaagtgcctgctgctgcacgaggtgcctaccggtgagatagtcgtcagactggatctccagctgttcgatgagccttag

SEQ ID NO: 277165 - DNA, 4983 bp, Artificial Sequence
  derived and/or modified sequence
atggcccagttccccacccccttcggcggcagcctggacatctgggccattaccgtcgaagagagagctaaacacgatcagcagtttcactcccttaaacccattagcggattcataacaggtgaccaagccagaaacttcttttttcagagcggcctgccccagccggtcctggctcaaatttgggccctcgctgatatgaataacgacggacgtatggaccaggtggaattttcgatcgcaatgaaactcatcaaactgaaactccaagggtaccagctgccgtccgccctcccacctgtcatgaagcagcaacctgtggcgattagtagcgcgcccgcatttggcatgggcggcatcgcctcgatgcctcccctgacagcagtcgcccctgtgccaatggggagtatacctgtggtcggtatgtctccgactctggtatcatctgtgcctaccgccgcagtgccccccctcgccaacggggcccctcccgtaatccaacccctaccagcattcgcacaccctgcagcaactttgccgaaaagttcgtccttctcgcggtccggccccggctcccaactgaatactaaacttcagaaggcacaatcatttgacgtggcctcggttccaccagtggccgagtgggccgtgccacagagttcccggttaaagtacagacagctgtttaactcacacgataagacaatgagcggccacctcacaggcccgcaggcaaggacaatccttatgcaatcaagtctgccacaggcacagttggctagtatctggaacctttccgatatagaccaagacggcaagctcacagccgaggaattcatccttgccatgcatttgatcgatgtcgccatgtcaggacagccactcccaccagtgctgccaccagagtatattccaccttctttccgacgcgtacgctcgggctcgggcatatccgtcatatcatctacatccgtggatcaacggctccctgaggagcctgtcttggaggatgagcagcaacaactcgagaagaaactccctgtgacctttgaggataagaagcgggagaatttcgaaagaggaaatctggagctcgagaagcgccgacaagccctgctggagcaacagcgtaaagaacaggaaagacttgcccagcttgagcgcgctgaacaagagcgaaaagagcgggagagacaggagcaggaaaggaaacgccagttggaattagaaaaacagctggagaaacaacgggagctggagcgccaacgtgaggaggagcgccgcaaggagatagagagacgtgaggcagcaaaaagagaactggaacgacagcggcagctcgagtgggaacgcaatcggaggcaggagctgctgaatcagcgaaataaggagcaagaggacatcgtcgtcctgaaagcgaagaaaaagaccctcgaatttgaactggaggccttaaatgacaagaaacatcaactcgagggcaaactccaagatatccggtgccggctgaccacacaacggcaggaaattgaaagtactaataagtctcgcgaacttcgtatcgcagagataactcacctgcagcagcagcttcaggaaagtcaacagatgcttgggaggctgattccagagaaacaaatcctgaatgaccagctgaagcaagtgcagcagaactccttgcacagagacagtctcgtgaccctcaagagagctttagaggcaaaagagttggcaaggcagcacttacgtgaccagctggacgaagtggaaaaggagaccaggagtaaactccaggagatcgacatctttaacaaccagttaaaggaactcagggagatccacaacaagcagcagttgcagaagcagaagtccatggaagccgagcggctgaaacagaaggaacaggagagaaagattattgaactggaaaaacagaaagaagaggcacagaggcgggcccaggagcgagataaacaatggctagaacatgtacagcaggaggacgaacatcagaggcctaggaagctgcacgaggaggagaagctaaaacgcgaagaatctgtgaagaaaaaggatggagaagagaagggaaaacaggaagctcaggataaactgggacggctcttccaccagcatcaggagcctgctaaacccgcagtgcaggctccgtggagcacagccgagaaagggccactgacaatcagcgctcaggagaatgtcaaagtggtctactatagagcattgtatcctttcgagagccgaagtcacgatgagattactattcagcctggagacatcgtgatggtagacgagagccagaccggtgaaccagggtggttgggcggggaattgaaaggcaagactggatggttcccagccaactatgcggagaagatccccgaaaatgaagttcctgcacctgtcaagccggtcactgattccacatccgcacccgctcccaaactcgcactgcgcgagacgcccgcccctctggcagtgacatcaagcgagcccagcactacacccaacaattgggcagatttctcatcaacttggcccacctcaacaaacgaaaaacctgagacggacaactgggatgcctgggccgcgcagccctctcttactgtgccctctgccggacagcttcgccagaggagtgcgttcactccagcgacagcaacaggttccagcccttccccagtactgggacagggcgaaaaggtggagggtttacaggctcaggccctgtatccctggagagccaaaaaggataatcatttaaattttaacaagaacgacgtcattaccgtcctggagcaacaagacatgtggtggtttggggaggtgcaaggacagaaagggtggtttccaaaatcttacgtcaagttgatctccggcccaatacggaagtctacctctatggatagcggaagctctgagtcgcccgcatcactcaagagggttgccagccctgctgcaaagcctgtcgtatcaggcgaagaatttatagccatgtacacctatgaatcttctgaacaaggagacctgaccttccagcagggtgacgtgatattggtcacgaagaaagacggtgattggtggactggcactgttggagataaagccggcgtgttcccctcgaactacgtacgcttaaaggacagcgaggggagcggcacggcaggcaaaaccgggtccctgggtaaaaaacccgagattgctcaggtaattgcttcttacacagccacaggaccggagcagttaactttggccccagggcagttgatactgatcaggaagaagaaccccggggggtggtgggagggggagcttcaggcaagaggcaagaaacgacaaattgggtggtttccagccaactacgtgaagcttctcagcccggggacaagcaagatcacccccactgaacctcccaagagcacagctctggccgctgtgtgccaagtgattggcatgtatgattacaccgctcagaatgatgacgaactcgccttcaacaaggggcagattataaatgtgctgaacaaagaggaccccgattggtggaagggggaagtgaatgggcaggtgggtctttttcccagtaactacgtaaaattaaccacggacatggacccgagccagcagtggtgctccgacctgcaccttctggacatgttgaccccgacggagcgcaagaggcaggggtatatccatgaacttatcgttacagaggaaaactacgttaatgacctgcagctcgtgaccgagatctttcagaagccccttatggagagcgagttactaactgagaaggaagtcgcaatgatcttcgttaattggaaagaactgattatgtgtaatattaagcttttgaaagcacttcgtgtgaggaaaaagatgtcaggcgaaaagatgccagtgaagatgatcggggacatactgtcagctcagctgccacacatgcagccttacataaggttctgctccaggcagctgaatggggctgccctcattcagcagaagactgacgaagcccccgacttcaaagaattcgtgaaaaggctagccatggacccaagatgcaagggaatgccattgagctcttttattctgaagcctatgcaacgcgtgacccggtaccccctgatcatcaagaaccagttagttttcaattccgttacaaactgcctgggccctcggaaatttttgcactcaggtaagctttacaaggccaaaagtaataaggagctctatggcttcttatttaatgactttctactccttacccaaataacgaaacccctcggctcttccggaacagacaaagtgttctctccaaaatcgaacttgcagtacaaaatgtataaaaccccaattttcctaaacgaagttctggtgaagctgcccaccgatccctccggtgatgaacctatcttccatatcagccacatcgaccgcgtctatacgttaagggcggagagtataaacgaaagaaccgcttgggtgcagaaaataaaagctgcgtctgaactgtacattgagaccgaaaaaaaaaagagagaaaaagcctacctggtacggtcacaaagagcaacaggcatcggacgactgatggtaaatgtggtcgagggcattgagctcaaaccatgcagatcgcacggtaaatcaaacccatattgcgaagtcacaatggggtcccagtgccatataactaaaaccatccaagacaccctgaaccctaaatggaacagcaactgtcagttcttcatccgcgatttagaacaggaggtcctgtgtatcacggtgttcgaaagggaccaattctctcccgatgacttcctcggacgaactgaaatcagggtggctgatattaaaaaagaccagggcagtaagggacccgtcactaaatgtctgctattgcacgaggtgccaactggggaaatcgtagtgaggcttgatctgcaactcttcgatgaaccctag

SEQ ID NO: 277166 - DNA, 954 bp, Artificial Sequence
  derived and/or modified sequence
tgaccgttaatggaatcggaactgctcacagaaaaagaggtggcaatgattttcgtaaactggaaggaattaattatgtgtaacattaagctgttgaaggcattacgggtccgcaagaaaatgagcggtgagaagatgcctgtaaagatgatcggagacatactgagtgcacagctaccacatatgcagccttacatcagattctgttctcgacagctgaatggagccgcactcatccagcaaaagaccgatgaggccccagatttcaaagaatttgtcaagcgactcgcgatggatcccagatgtaagggtatgcctctctccagcttcattctcaaacccatgcagagagtgacaaggtatcccctgatcattaagaaccaattagtattcaactccgtcacaaattgtcttgggccacggaagtttctccattccggaaagctctacaaagcgaagtcgaataaggagctgtatggctttctgttcaatgatttcctcctgctgacccagatcacaaaacccctagggtcatcaggaacagacaaagtcttctcaccaaaatctaacctccaatataaaatgtacaaaactcccatttttttgaacgaagtgctagtcaagctccccaccgacccctccggcgacgaaccaatttttcatatctcccacatcgacagagtctacactctgcgggctgaatcaataaacgagagaactgcttgggtgcagaagattaaggcagctagcgaattgtacatcgagacggaaaagaaaaagcgggaaaaggcctacctggtccgtagccaaagggctactggtatcggacgcctgatggttaacgtggttgagggcatcgagctgaaaccatgtcgctcacatggaaagtccaatccttactgcgaggtgaccatgggctcacagtgccatatcacaaagaccatccaagactag

SEQ ID NO: 277167 - DNA, 3237 bp, Artificial Sequence
  derived and/or modified sequence
atggctcagttcccgacaccatttggcggatcactggatatctgggcaattacagtggaggaacgcgcaaagcacgatcagcaattccatagtctgaaaccgatctcagggtttataactggcgaccaggctagaaatttcttctttcagagcgggctcccacaacctgtgttggctcagatctgggccttggccgacatgaataatgatggccgaatggaccaagttgagttttcgatcgcaatgaagctgatcaagttgaaactgcagggctaccagcttcctagcgccctgccaccggtgatgaaacagcagcccgttgctatttcaagtgcccctgccttcggtatggggggtattgctagtatgcctccgttaacagcggtcgccccagtcccaatggggtctattccagtggtgggaatgtctcctacgcttgtgagtagcgtcccaacagccgcagtgccaccactggccaacggtgcaccccctgtgattcagccactcccggctttcgcccacccagctgcgactttgcccaagagcagttccttctctcgttcaggtcccggttcacagctgaacacgaaactgcagaaggcccagagctttgacgtggcctctgttccccctgttgcggagtgggctgtcccccagagtagtcggctgaagtaccgccagctctttaactctcacgataagaccatgtctgggcatctgaccggccctcaggctcgtaccattctgatgcagtcaagcctgccccaggcgcaactggccagtatttggaacctgtcggacattgatcaagacggcaagctgacagcagaggagtttatcctcgccatgcacctgatcgatgtagctatgtctgggcaaccgttacccccagtgctgcctcctgaatatattccgccatcattccgtcgtgtccgtagtgggagcggcatctccgtgataagctcgaccagtgttgaccaacggcttccggaggaacctgtgctggaggacgaacagcagcagctggaaaagaagctccctgtgacatttgaggataagaaacgcgagaacttcgagcgagggaatttggagctcgagaagcgacgacaggcactccttgagcagcagcggaaggagcaggaaagattagcacagcttgagcgagcagagcaggagagaaaggagcgggagaggcaagagcaggaaagaaagcgccagctggagttggaaaagcagctggaaaaacagcgggaacttgagaggcaacgggaagaggagcggagaaaagaaattgagagaagagaagccgcaaagcgcgagttggagagacaacggcaattggagtgggagaggaataggcgacaggagcttttgaaccagaggaacaaagagcaggaggatatcgtcgtgctgaaggcaaagaagaagaccctggagtttgaactggaggctctcaacgacaaaaaacaccaactcgagggcaagttgcaggacatcagatgcagattaaccacgcaaaggcaggagatcgagtcaaccaataaatcacgagaactgcgtatcgccgagatcacccatcttcagcaacagttacaggagagtcagcagatgttgggcagattgattcctgaaaagcagatccttaatgaccaactgaagcaggtccagcagaattcactgcaccgcgattcactcgtgaccctaaagcgggcactcgaagcaaaggagctggccaggcagcacctcagagaccaactagatgaagtggagaaggagacccgatccaaactgcaggaaattgacatttttaataaccagctgaaggagcttcgggagattcacaataagcagcagctccaaaaacagaagtccatggaagcagagcgtctcaaacaaaaggagcaagagaggaagatcattgaactggaaaagcagaaagaagaggctcaacgtcgggcacaggagagagacaagcaatggttggagcacgtccagcaagaggatgagcaccagcggcctaggaaactgcacgaagaagaaaagctgaaacgcgaagaaagcgttaagaagaaggacggggaagagaagggtaagcaggaggctcaagataagcttggtcggttgtttcaccagcaccaggagcctgcgaaacccgcagtgcaggccccatggtccactgctgagaaaggcccactcactatctctgcacaggaaaatgtcaaagttgtgtactatcgggcactgtatccctttgagtcacggagccacgatgaaatcaccatccagcccggagacatcgtgatggtggatgaatctcaaacaggagaacccggatggcttggcggagagctgaaaggtaaaacaggatggttccctgctaactacgcggagaagattccagagaatgaagtccccgctccagtcaaacctgtcaccgactctacatctgccccagcacccaagctcgcacttagggaaaccccagcgccattagcggtgacatcatctgagccctccacaaccccaaacaactgggctgatttttcctcaacatggcccacgtctaccaacgagaaacctgaaaccgataactgggacgcatgggctgcacaaccttcactgacagtgccctctgccggtcagcttagacagcgctcagcttttacccctgccacggctactgggtcttctccctctcccgtactgggccagggggaaaaagtggagggactacaagctcaggccctgtacccctggcgcgctaagaaagataatcatcttaacttcaataaaaatgacgtgattacggttctggaacagcaagacatgtggtggttcggtgaagtacaggggcaaaaggggtggttcccaaaatcttatgtgaaactgattagtggccctatcaggaaaagtacctccatggactctggaagttccgagagccccgcttcgctcaaaagggttgcttctccagccgctaagccagtggtaagcggggaggagttcatagcaatgtatacctatgagtccagtgagcagggagacctgacttttcagcagggtgacgtgatactggtcacgaagaaagatggagactggtggacggggacggtgggcgacaaagccggagtcttcccctctaactacgttaggcttaaagattctgaaggcagcgggaccgccggtaagactgggtctttgggtaaaaaacccggtcctagttgtaatgtgaagtag

SEQ ID NO: 277168 - DNA, 3048 bp, Artificial Sequence
  derived and/or modified sequence
atggcgcaattcccaactccgttcgggggatctctcgacatatgggcaatcactgtggaagagcgcgcaaagcacgaccagcagttccactcactgaaacccatctcaggatttatcacgggggatcaggcccgaaactttttctttcagtctggtctgccgcaaccagtgctcgcgcagatatgggctctcgcagatatgaataatgacggcaggatggatcaggtggagttctcaattgcgatgaaactgattaaacttaagctgcagggctaccagctcccctctgctttgcctcctgtgatgaaacagcagcccgtcgcaatctcctcagccccagctttcggtatggggggaatcgcatcaatgccaccactgaccgctgttgccccagttcccatgggaagcattccggtcgtgggcatgtcccccactctggtttcttccgtacctaccgccgcagtcccgcctctcgctaacggggctccacccgttattcagccccttcctgccttcgctcatcccgctgcaacgctgccaaagtccagctcattctcgagatcaggacccggaagccaactcaacactaaacttcagaaagcccagtccttcgatgttgctagcgtacccccagtggcggagtgggctgtcccccagagcagtagactcaagtatagacagctgtttaattcacatgacaagactatgtctggacatttgacagggcctcaggcccgaacaatcctgatgcagagcagccttccccaggcccagcttgcatcaatatggaacctcagtgacattgaccaggatggtaagctgactgccgaggaatttatattggccatgcatctgatcgatgttgccatgagtggccagccgcttccgccagtactcccgccagagtacattcccccatcttttagaagggtgaggtctgggagcggaattagcgtgatcagttccacatctgtcgatcaacgattgcccgaggagcctgtcctagaagatgagcaacagcagctggaaaagaagctcccagttaccttcgaggataagaaacgggaaaactttgaacgaggcaacctggagctggagaaacgcagacaggcgctacttgagcagcagcgcaaagagcaggaaagactggcgcagctggagcgggctgaacaggagagaaaagagagggagagacaggaacaggaaagaaagagacagctagaattagagaagcagttggaaaaacagagggagctcgagcgacagcgcgaggaggagaggaggaaggagatcgaacgacgagaggcagcaaaaagggaacttgagcggcaaagacagctggagtgggagagaaaccgtaggcaggagttacttaaccagagaaacaaagagcaggaggacatagtcgtgttgaaagcaaagaaaaagacgctggaattcgaactggaagctctgaatgataagaaacaccaattagaaggtaaacttcaagatattcgctgcagactgacgacacaacggcaagagatagagagtactaataaatcacgtgagctgcgcattgccgagatcacccacttgcagcagcaactccaggagagccagcagatgctggggcgacttatccccgagaagcagattcttaatgaccaactgaagcaggtccagcagaattcacttcacagggatagtctggtcacattaaaacgtgccctggaggcaaaggaacttgccagacaacacttaagagatcaactggatgaagtcgagaaagaaaccaggtccaagctgcaggagattgacatttttaacaaccagctgaaggaactccgggaaatccataataaacaacagctccagaagcagaagtcaatggaggccgaacggctgaagcagaaggagcaagagcgcaagattatcgaactcgagaagcagaaggaggaagctcagcgacgggcacaggagagagacaagcagtggctggagcatgtgcagcaggaggatgagcaccagaggccacgcaaactccatgaagaagagaagcttaagagagaggagtctgtgaaaaaaaaagacggagaagagaagggcaaacaggaagcacaggataaattaggaagactgttccaccaacatcaagaaccggctaaaccagctgtacaggcaccctggtcaaccgccgagaagggcccactaaccatcagcgcacaggaaaacgtcaaggtcgtttattaccgagccctctatccattcgaatccaggagccacgatgaaattactatacagcctggtgacattgtgatggtggacgaaagccagaccggtgagcctggatggctgggcggagaattaaaaggaaaaaccggctggttccccgctaattacgcagagaaaatcccggagaacgaagtgcctgccccagtgaaacctgtgacggatagtacctctgccccagcacccaaacttgccttaagggagacccccgcaccacttgccgtcacatctagcgagccttctacgacaccgaataactgggcagatttcagtagcacatggccgacttctaccaatgagaaaccggagaccgataactgggacgcttgggctgctcagccttcactgacagtcccctccgccggtcaactcagacagaggagtgccttcaccccggctactgctacaggctcttcaccctcgcccgttctgggccagggtgagaaagtcgaaggcctacaggcccaggccttatatccctggagagcaaaaaaggataaccacctcaacttcaacaagaatgacgtgattacagttcttgagcagcaagatatgtggtggtttggcgaggtccagggtcaaaagggctggtttccgaagagttatgtcaagctcataagtggacctattcggaagtcaaccagcatggactccggctcttctgagtcccccgcttctctaaagcgggtcgcatcccctgccgctaagcccgtcgtgagcggggaaggtctctggaattgctgggaaaaccgagaatttaggaaaaagacatag

SEQ ID NO: 277169 - DNA, 3648 bp, Artificial Sequence
  derived and/or modified sequence
atggctcaatttccaactccatttggaggttctttagacatctgggccattactgtcgaagaacgtgccaaacacgaccagcagttccattcccttaaacccatatctggatttattactggagatcaggccagaaacttcttcttccagtccggattgccacagcccgtgctggcccaaatctgggctcttgcagacatgaataacgatggacggatggaccaggttgaattttccatcgctatgaagctgatcaagttgaagttgcaaggttatcagctcccttcggcccttccgcctgtcatgaaacagcaacctgtggctataagcagcgcgccagcttttgggatgggagggatcgcttctatgcccccactgactgctgtagcgcctgtccctatgggatccatccccgtggtaggtatgtccccaacactggtgtcctccgttcctaccgctgctgtgccccctcttgccaacggcgctcccccagtgatccagcccctccccgctttcgcacaccctgcagcgactcttcccaagtctagctccttcagtcgctcaggccctggatctcagcttaacacaaagctccagaaagcccagtcattcgatgtggcatctgtgcccccagtggcagagtgggccgtcccacagtctagcagactgaaatacagacaactgttcaactcccacgataaaaccatgtctggacaccttacgggcccacaggctcgcacaattctgatgcagtccagcctgccccaggcccaattggctagtatttggaatctttctgatattgatcaagacggaaaacttacagcggaggagtttattctcgctatgcatctgattgatgtagccatgagtggccagcccctaccccctgtccttcccccagaatatattcctccaagctttagacgcgtgaggagtggcagtggtatctctgtcattagcagtacgagtgtggaccagagactgccagaagagccagttctcgaagatgagcagcagcagcttgaaaaaaaattgcccgttacgtttgaagataaaaagagggaaaactttgagagggggaatcttgagctggagaaacgaagacaggcccttctagagcagcagcgcaaggaacaggaaaggctcgctcagctcgaacgagctgaacaggagagaaaggaaagagaacgacaggagcaggagaggaaacgccagctcgagctggagaaacagctggagaagcaacgggagctggagcgccaacgagaggaggagagacgaaaggagattgaaagacgcgaggccgctaagcgtgagctcgagagacagcggcagctggagtgggagagaaatcgaaggcaggagctccttaaccaaaggaacaaggagcaggaagatatcgttgtgctcaaggctaagaagaaaactctggagtttgaattagaagcactgaacgacaaaaagcaccagctggagggtaagctgcaggatattaggtgccggctcactactcagagacaggaaatcgaaagtacaaataagtctcgggagctgagaattgctgagatcacacatctgcagcaacagctacaagaaagccaacagatgctgggcagactgatccccgagaaacagattctcaatgaccaactaaagcaggtgcaacagaactccctacaccgagacagtctagtgaccctaaaaagggcccttgaggctaaagaactcgccaggcaacacctccgggatcaactcgatgaagtcgagaaagagactcgctccaaattgcaggaaattgacattttcaacaaccagcttaaggagttaagagaaattcacaacaaacagcagttgcagaagcagaagtcaatggaggcagaacggcttaagcaaaaggagcaggagagaaagattattgagttggagaaacagaaggaggaagcacagagacgagcacaggagcgggataagcaatggctggaacacgtacagcaagaggacgaacaccagcggcctcggaagctccacgaggaagaaaaactgaaaagggaagagtccgtcaaaaagaaagatggcgaggagaagggcaagcaggaagcgcaggacaaactcggaaggttgtttcaccagcatcaggaaccagctaaacctgccgtccaggccccatggagcacggccgaaaagggccctttaaccattagtgctcaggagaatgtgaaggtcgtctattaccgagcactgtatcctttcgagtctaggtcacatgatgaaatcacgattcagccaggagatattgttatggtggatgagtctcagacaggagaaccaggttggctgggaggcgagctcaaaggcaaaaccggctggttcccagctaattatgccgaaaagatcccggaaaacgaagtccctgcccctgtcaagccggtcaccgatagcacctctgctccagcgccaaagcttgcactgagggagaccccagccccactggccgtgaccagttctgaaccatcgaccacgccaaacaattgggctgacttctcctccacttggccaaccagcactaatgagaaacctgagacggataactgggacgcatgggccgcacagcctagccttaccgttcccagcgcgggacagctccggcagcgaagtgccttcaccccggctacagccacaggctcctcccctagtccagtgctaggccagggtgagaaggtcgaaggacttcaggcgcaggccctttatccgtggagagccaagaaggacaatcatcttaattttaataagaacgacgtgatcacagtgctggagcaacaggacatgtggtggttcggtgaagtgcaggggcagaaaggatggttccccaaatcgtatgtcaagcttatatccggacccattcgtaagtccaccagtatggatagtggttcctcagagtctccagcgagtctgaaacgagtggccagtccggctgccaagcctgtcgtatcgggagaggagttcatcgccatgtatacatacgagagtagtgagcagggcgatctcaccttccagcagggtgacgttattttagtaaccaaaaaagatggtgactggtggactggcaccgtgggcgataaggctggcgtgttcccatcaaactacgtgcgattaaaggacagtgaaggaagcggcactgcaggaaaaaccggctctctgggcaaaaaacctgaaattgcccaggttatagcatcttacacagccactggacctgaacagctcaccctcgctcctgggcagttgatcttgatcagaaaaaagaacccaggcggatggtgggaaggagaactgcaggctcgcggaaagaagcggcagattgggtggttccccgctaattacgtgaaactgctgagccctggaacatcgaaaattacccctactgaacctcctaagtcgaccgcactggcagcagtgtgtcaggtgattggcatgtatgattacactgcacagaacgacgacgaattggcttttaataagggtcagatcattaacgtcctgaacaaagaagatcccgactggtggaagggcgaagttaatggccaggtaggtctcttcccatccaattacgtcaaattgaccacagacatggacccatcccagcagtag

SEQ ID NO: 277170 - DNA, 3537 bp, Artificial Sequence
  derived and/or modified sequence
atggcgcagtttccaacgccttttggcggttccttggatatctgggctatcacagtggaggaaagagccaagcatgatcagcaatttcattccctgaagccgatcagcgggtttattaccggcgatcaggccagaaatttctttttccagagcggactcccccaaccagtgctggcacagatttgggccctcgccgacatgaataacgacggcaggatggatcaagtggagttctccatcgccatgaagctcatcaaattgaaactgcaagggtaccagctgccctctgcccttcctcccgtgatgaaacagcaaccggttgccatatccagcgccccagcatttgctgctgtcccacccctggctaacggcgctcctcctgtgatccagccgctgcccgcatttgcgcaccctgctgccactctgcccaagagttcctctttctcacgcagtggccctggtagccagctgaatactaagctccagaaggctcagagtttcgatgtggcgtccgtcccgcctgtcgcagaatgggccgttccacagagtagtcggcttaaataccggcaactgttcaatagtcacgataaaaccatgagcgggcaccttaccggccctcaggccaggactattctcatgcaaagcagcttgccacaggcccagctggcctccatctggaacttgagcgacattgatcaggacggcaaattaactgctgaagagttcatccttgcaatgcacttaatagatgtcgcgatgagtggccagccccttcccccagtgctgccaccggaatatatacctcccagttttcggagagtgcgaagtggaagcggaatctccgtaataagctccacttctgttgaccagcggctccccgaggaaccagtactcgaggacgagcagcaacaactggagaagaaattgccagtcaccttcgaggataagaagagagaaaattttgaacggggaaacctggagctcgagaaacgcagacaggccttgctggagcagcagcggaaggagcaggagaggctggctcaattagagcgagctgaacaggaacggaaggaacgggaacgccaggagcaggagcggaaacggcagttggagctggaaaagcagctggaaaaacagcgcgaactcgagagacagcgtgaggaggaacggagaaaggagatagagcgcagagaggccgcaaaaagagaactggaacgccagcgccaattggagtgggagcgcaataggcgccaggaactgctcaatcagcggaacaaggaacaagaggacatagtggtactcaaggcaaagaaaaagaccttagaattcgagctggaagctctgaacgacaaaaagcaccagctagagggcaagcttcaggatattaggtgccggctgaccacacaaagacaggagattgaatcaacaaacaaatcacgagagcttagaatcgccgaaattactcacctccagcaacaattgcaagagtctcagcaaatgctgggtagactgataccagaaaaacaaattctgaacgaccagcttaagcaggtgcaacagaacagcctacaccgggactctttggttacgttgaagcgagcgcttgaggccaaagagctcgcccgacagcacctgcgtgatcagctggacgaggtggagaaagagacccgatctaagctgcaggagatcgacatcttcaacaatcagctgaaggagttgcgagagatacataacaagcagcagctccagaagcagaaatccatggaagctgagcgcctaaaacagaaggaacaagagcgaaagattatagaactggagaagcagaaagaggaggctcaacgaagagcccaggagcgcgacaagcagtggctcgagcacgttcagcaggaggacgagcaccagcggccacgcaagctgcacgaagaagaaaaacttaaacgggaggagtccgtgaagaaaaaagacggtgaggaaaaaggtaagcaggaggcccaggacaaactgggtcgtttatttcatcaacaccaggagcctgccaagccggcagtgcaagcaccgtggtccactgctgagaaaggtccactgacaatatccgcacaggagaatgtgaaagttgtgtactatcgggcactgtaccccttcgaaagccgctcgcatgacgagatcactattcagcctggggatattgtgatggttgatgagagccagaccggtgaaccaggctggctgggaggcgagctgaaaggcaaaactggttggttcccggcaaattacgccgagaagatccctgaaaatgaggttcccgctccagtgaaacctgttactgatagtacatcggcacctgctcctaagctcgctctgagggaaacacccgcacccctcgctgtaacatcttctgaaccctcaaccacccccaacaactgggcagacttctccagcacatggccaacatcaacgaatgaaaaaccagagaccgacaactgggacgcttgggctgcccagccttccctgactgtgccttctgctggacaactccgacaaagatcagcttttactccagccacagcgaccggcagttctccatcgcccgtgttaggtcagggtgagaaagtggagggactccaggctcaggcactgtatccatggcgggctaagaaggacaaccacctcaatttcaataaaaacgatgttatcaccgtgctggaacaacaagacatgtggtggtttggagaggtgcaaggtcagaaggggtggtttcctaaatcatacgtgaagttaatctcggggcctatccgcaaaagtacctctatggactctgggagctccgaaagtccggctagtctaaaacgggtagcgagccctgctgcaaaaccagttgtgagcggcgaggagttcattgccatgtatacttacgaatcaagcgaacagggtgatctgacgtttcagcagggcgacgtgatactagtgaccaaaaaggacggggattggtggactggaaccgtcggtgataaggctggcgtgttccccagcaattacgtgaggctcaaagactccgagggatccgggactgcaggcaaaactggcagtctcggaaaaaagccagagatcgctcaggtcatcgccagctacacagccacggggcctgagcaactcactttagctccaggacagttgatccttattcggaagaagaatcccggaggctggtgggaaggagagctgcaggcccgtgggaagaagcgtcagattgggtggtttcccgctaactacgtgaagctgttgtccccaggcactagtaagatcaccccaaccgaacctccgaaatctacggccctagcagcggtgtgtcaggtcattgggatgtacgattacaccgctcaaaacgatgacgaactggccttcaataagggccagatcattaatgttctgaacaaggaggatcctgactggtggaagggcgaggtgaacggacaggttggtctgtttccatccaattacgttaaactgacaacagacatggatccaagccaacagtag

SEQ ID NO: 277171 - DNA, 5150 bp, Artificial Sequence
  derived and/or modified sequence
atggcgcagttcccaaccccgttcggtgggagtctggacatatgggcgataaccgttgaggagcgggctaagcacgaccagcagttccactccctcaaacccatctctgggttcataactggtgaccaggcccgaaactttttcttccagtcaggactaccacagcccgtcctggctcagatctgggcccttgccgacatgaataacgatggcagaatggaccaggttgaatttagtattgcaatgaaactgattaaactgaaacttcagggttatcaactccccagcgccttacccccagtcatgaaacagcaacctgttgctatcagcagcgcacccgcttttgggatgggcggaattgccagtatgccaccattgactgctgtcgctcccgtgcccatgggatccatcccggtcgtgggaatgtcgcctaccttggtttccagtgtccccactgctgcagtcccgccactagctaatggggctccccctgtgattcagcccctgcctgcatttgcccaccccgcagccaccctgcccaaatcatcttctttcagtcgctctggccctggcagccaacttaacaccaaattgcaaaaagctcagtccttcgacgtcgcctccgtcccacctgtcgcggaatgggccgtgccacagtcgagccgactgaaatatagacagcttttcaatagccacgataaaaccatgagtggccacctcaccgggcctcaagcacggaccatcctcatgcaaagcagtctaccgcaggcgcagctggcatccatctggaatctgagtgacattgatcaggacggaaaactcactgcggaggaattcattctggcgatgcacctcatcgacgtggcgatgagtggccagcccctgcccccagtgctgcccccagaatacatccccccaagctttcgcagagtccggagtgggtccgggatttccgtcataagctcaacaagcgtggatcagagacttcccgaggagcccgtactggaagacgagcaacagcagctagaaaaaaagctccccgtgaccttcgaagacaaaaaaagggaaaacttcgagagaggtaatctcgagctggagaaacgcagacaagccctgttagaacagcagagaaaagagcaggaacgtctggcccagttggagcgtgctgaacaggaacggaaagagagagagaggcaggagcaggagcggaagagacagctggagcttgagaaacagctcgagaagcagagagagcttgagcgccaacgagaggaggagagacgtaaggaaatcgaacgtcgggaggcagcaaaacgtgaattggagcgacagcggcagctggagtgggagcgtaatcgccgtcaagagctgctgaaccagcgcaataaagaacaagaagacattgtggtgctgaaagccaagaagaaaacgctcgaatttgagctcgaggctctgaatgataaaaagcatcagttggagggaaaactgcaggacataaggtgccgactaacgacgcagcgacaggagatcgagagtactaataaatctcgagaattgagaatcgctgaaattactcaccttcagcagcagctgcaggaatcccagcagatgcttggcaggctgataccagagaaacagatcctgaacgaccagctgaagcaagtgcaacaaaactccctgcacagagacagccttgtcaccctgaagcgcgcactggaggcgaaagagctcgctagacagcatctccgcgaccagctcgatgaggtcgagaaggaaacccgctccaagctgcaggaaatagacatttttaacaaccagctgaaggaactccgggagattcacaacaagcagcagttgcagaagcagaagtcaatggaggccgaaaggctgaagcagaaggagcaagaaaggaagatcatcgagctggaaaagcagaaggaggaggcacagcgcagggcacaggagagagacaaacaatggctggagcacgtgcaacaggaagacgaacaccaacgtccacgcaagctgcatgaggaggagaagctcaaacgggaggagtcagttaagaaaaaggatggggaggaaaaggggaaacaagaggctcaggataaacttgggcgtctgttccaccagcaccaggagcccgcaaagcccgctgttcaggctccgtggagcacggccgagaagggccctttgacaatctccgcccaggagaacgttaaagtggtatactatcgggcactgtatcccttcgagtcaaggtcacatgatgagattacgattcaacctggcgacatagtaatggtggatgaaagccagacaggcgagccaggatggctggggggtgagctgaaggggaaaaccggatggtttccagctaactatgcagaaaagattcctgaaaatgaagtcccagcccctgtcaagccagtgaccgactccacaagcgcccctgcgccaaaacttgccttgagggagactcccgcacctctggccgtcacttcaagcgagcctagcaccacccccaataattgggccgacttttcatccacatggcccacatccacaaacgaaaaacccgagaccgataattgggatgcgtgggccgctcaaccttcgctcactgtgcctagtgcgggacagcttcggcagaggtccgcctttacccccgcaaccgctaccggctccagccccagtcctgttctgggccaaggcgagaaggttgaggggttgcaggcccaagctctgtacccatggcgcgctaagaaagataatcatctaaacttcaacaaaaacgatgtcatcacggtgcttgaacagcaggatatgtggtggtttggcgaggttcagggccagaaagggtggttccctaagtcctatgtcaaactgattagcggacctattaggaaaagcacttccatggactccggatcttcagaatcccccgcttcactgaagagggttgcctcgccagctgcaaaacccgttgtgtcgggggaagaattcatcgccatgtacacatacgagagcagtgagcagggagacttgacattccagcagggcgatgtgattctggtgacgaaaaaagacggtgactggtggaccggaactgtcggggacaaagcaggtgtgtttccatcaaattatgttagactgaaagatagcgagggctccggcactgctggaaaaaccggctcgctgggcaaaaagccagagatcgcccaggttattgcatcatacacagcaacaggccctgagcagctcacattagcacccggtcaactcattctgattaggaaaaagaacccagggggatggtgggagggggaattacaggcacgtggtaagaaacggcagatcgggtggtttcctgccaattacgtcaaactactatctccgggtacgagcaaaatcactcccactgaacctccgaagagcactgctctggcagcagtgtgtcaagtgatcggcatgtatgattacaccgcacagaatgatgatgagctggccttcaacaaggggcagatcattaacgttttgaacaaagaggacccagactggtggaaaggcgaagtaaatggacaggtaggtctatttccatccaattacgttaagctgactacagatatggacccatcgcagcagtggtgctctgacttacacttactcgatatgttaacccccacagagcgtaagcggcagggatacattcacgagttgatcgtgacagaggagaattacgttaacgacctacagttggtaaccgaaatattccagaagcccctcatggagagcgaactcctgacagagaaagaggtcgcaatgatcttcgtaaattggaaagagctgataatgtgcaatataaagctgctaaaagctctgcgcgtgaggaaaaagatgagtggagagaaaatgccagtgaaaatgatcggcgacatactgtcagcccagctgccccatatgcagccctacataaggttttgctctagacagttaaacggggcagcacttatccagcaaaaaacggacgaagcaccagactttaaagagttcgttaagcggctcgcgatggaccctagatgcaagggcatgccgctgagtagtttcatcctaaaacctatgcagcgagtcacgcgttacccactgatcatcaagaacatcctggagaacacgcccgagaatcatcccgatcactctcatcttaagcacgcgctagaaaaagctgaggaactgtgttcgcaagtcaacgaaggagtgcgcgaaaaggagaattcagatcgccttgagtggatccaggctcacgtccaatgcgaagggctctctgagcaacttgtgtttaatagtgttaccaattgcctaggtcctcggaagtttttgcattcgggcaagttgtataaagccaagtccaacaaagagctgtatggtttcctgtttaatgattttctcctgctgactcaaatcaccaagcccctcggctctagtggaacagacaaagttttctcacctaagtctaacctccagtacaagatgtacaaaacaccgatatttctcaacgaggtattggtcaagctaccgaccgatcctagtggcgacgagcctatttttcacattagtcacatcgatcgggtctacacacttcgagctgagtcaatcaacgagaggaccgcctgggtgcagaagataaaagccgctagtgagttatatattgaaaccgagaaaaaaaagcgggagaaggcgtatcttgtcagatcacagcgtgcgacagggatcggacgcctgatggtgaacgtagttgagggcatagagttgaaaccctgcagatctcatggaaaatcaaacccctattgcgaggtcaccatgggtagtcagtgccacatcacgaagactatccaagatacgctcaatcccaagtggaactctaattgtcagttcttcatccgggacttagaacaggaggtgttgtgtattaccgtgttcgagcgagatcaattttcccctgatgacttccttggaaggaccgagatacgagtggcagatatcaaaaaggatcaggggagtaaagggcctgtgacaaaatgcctgctcctccatgaggtcccgaccggagaaattgtcgtgaggctggatctccagctgttcgatgaaccata

SEQ ID NO: 277172 - DNA, 4983 bp, Artificial Sequence
  derived and/or modified sequence
atggcccagttcccaaccccgtttgggggtagcctggacatctgggcaattacagtggaggaacgagcgaagcacgatcagcaattccatagcctaaaacccataagcggctttattaccggcgatcaggcacgtaattttttctttcaatccggcctgccccagcccgttctcgcccaaatctgggccttggccgatatgaacaacgatgggaggatggaccaggtagaatttagtattgcaatgaagctaatcaaactgaaactccaggggtaccagttgccaagcgccctgccccctgtcatgaagcaacagcccgtggcaattagctctgcgcctgctttcggtatgggaggtatagctagcatgcctcccctgacggcagttgcacctgtccccatggggtccatccctgttgtgggtatgtcacccactctggtgtcaagcgttccgacggcagcagtgcctccattagcaaatggggcaccaccagtgattcaaccactacccgctttcgcccaccctgccgctacattacctaaatcgagcagtttctctcgcagcgggcctgggtctcagctcaacaccaaacttcagaaggctcaaagttttgatgtggcctcggtacccccagttgccgagtgggccgtgccacaatctagtcggcttaagtacaggcaactatttaatagccacgataaaaccatgtcggggcacttgaccggtccacaggcacggacgatcctaatgcagagctccttgcctcaggcccagctggcttccatctggaatctctccgatattgatcaggacggaaagctcactgctgaagaatttattttagccatgcatttgattgacgtagccatgtcagggcaacctttgccccctgtccttcctccagaatatattcctccatccttccggcgtgtgcgctcggggagcggcatttccgttatttccagcaccagcgtggaccaacgcttaccagaagaaccggtcctcgaggatgaacagcagcagctcgaaaagaagttacccgtaacattcgaggataagaaaagagagaatttcgaacggggaaacctggagctggaaaagcggaggcaggcacttttagagcagcaacggaaggaacaagagcgcttagctcagctggagcgggctgaacaggagcgcaaggaacgtgagcggcaagagcaggagcgaaagcggcagctcgaactagaaaaacagcttgaaaagcagcgggagcttgagagacaacgggaagaggagcggaggaaagagatcgaacggagagaggccgctaaaagagagctggaacggcagagacagttggaatgggagcggaaccggaggcaagagctgctgaaccagaggaataaggagcaggaggatattgtggtgcttaaggcgaagaagaagacactggagtttgagctagaggctctaaacgataaaaaacatcagctcgaaggtaagctccaggatattcgatgcaggttgacaactcagaggcaggaaatagaatcaacaaataaaagcagagagctgcggattgcggagatcacacacctgcagcagcaacttcaggaatctcagcagatgctaggccgtttaatccccgaaaagcagattcttaacgaccagctgaaacaagtgcagcaaaattcactccatcgggactctctggtgactctgaaacgggcattggaggcaaaagagctcgctaggcagcacctgagagaccaactggatgaggtcgagaaagagacgcggtcaaagttacaagagatcgatatctttaacaaccaactcaaagagttgagggagatacacaataagcaacagctccagaagcagaagtctatggaagcggagaggctgaagcagaaggaacaagagagaaaaatcatcgaactggaaaaacagaaagaggaagcacagagacgagcccaggaacgagacaaacagtggttggaacatgtgcagcaggaggacgaacaccagcggcctcgaaaattgcacgaggaggaaaaactgaaaagggaagagtctgtgaaaaagaaggacggggaggagaaagggaagcaagaggctcaggacaagctgggccgactcttccaccagcaccaggaacccgcaaaacctgctgtacaagcaccttggtcgacagcagagaaagggcctctcacgatatccgcgcaagagaatgtgaaagtcgtctattaccgcgcactgtatccgtttgagtccaggtcacacgacgagatcacaattcagccaggagatattgtcatggtcgacgagtctcagactggagaacctggatggttaggcggtgaactcaagggaaaaacgggttggttccctgctaattacgcggagaagataccagagaatgaggtgccagcccctgtgaaacccgtgactgactctacctccgcacctgcgccaaagttggccctgagagagacaccagcaccattggcagtgacctccagcgagcctagcactactcccaataattgggccgacttttcatccacttggccaacatcgaccaatgagaaacccgagactgataattgggatgcctgggcggctcaaccttcactgacggtgcctagcgccggacaacttcggcagcggtccgccttcactccagccacggctacgggctcctcaccatctcctgttctcggccagggggagaaagttgaggggctacaggcccaggccctttacccatggcgggctaaaaaggataatcacctgaatttcaataaaaacgacgtgatcaccgtgttagagcagcaggatatgtggtggttcggagaagtccaagggcaaaagggatggtttcccaagagttacgtgaagcttatttccgggcctattcgtaagtccactagcatggacagcggcagttctgagtctcctgcgtcactcaagagagtcgcttcccctgctgctaagccagtggtgtctggagaagaatttatcgccatgtacacatatgagtcttcagagcagggcgatcttacattccagcaaggtgacgtcatattggttaccaaaaaagacggggattggtggacagggacagtgggagataaggctggcgtgtttccttcgaattacgttagactgaaggattcagaagggtcaggaaccgcgggaaagacgggtagcctcggaaagaagcctgagatcgctcaggtcatcgcgtcttatactgcgacaggccctgagcagctgacattagctccgggacagctcatcctgatccggaagaagaatccgggtggctggtgggagggtgagctgcaggcaagaggtaagaagcgacagattggctggttccccgctaactatgtgaaactcctgagtccaggaactagcaagatcactcccaccgaacctccgaaatcgacagcactggctgctgtgtgccaggtcatcgggatgtatgactacaccgctcagaatgacgatgaactggcctttaacaaaggccagatcataaacgtgctgaacaaggaggatccagactggtggaaaggggaggtgaatgggcaggtgggcctgtttccgagcaactatgtcaagctcaccaccgacatggatccgtctcagcagtggtgctcagatctccacctgcttgacatgctgacaccgacagagaggaaaaggcagggatacatacacgaactgattgtaactgaagaaaattatgtcaatgatctgcagctggtgaccgaaatttttcaaaaacctcttatggagtctgaactgctgactgagaaggaggttgccatgattttcgtcaattggaaggagcttatcatgtgcaatataaaacttctgaaagctctaagagtgagaaagaagatgtctggagagaagatgcccgtcaagatgatcggtgacatcttgagcgcacagcttcctcacatgcagccttatattagattttgtagtaggcagctaaacggcgctgcgctcatccaacaaaagaccgacgaagctccagacttcaaagaattcgtgaaaagactggcaatggatcctcgttgtaagggcatgcccctctcttcattcatcctcaagccaatgcagagggtgacgaggtatcccctgatcattaagaatcagctcgtattcaacagcgtgacgaattgtctgggccctaggaagtttcttcacagcggcaagctctacaaggccaagagcaacaaagaactctacggctttctatttaacgacttcctgctcctgactcaaattacaaaaccactggggtcctcaggcacagataaggtgtttagtcccaaatccaatctccaatataaaatgtacaaaacacccatttttttaaatgaagtattagtaaagctcccaaccgatcccagcggggacgagcctatcttccatatttctcacattgatagggtatataccctccgagctgaatcaatcaacgaaagaaccgcctgggttcagaaaattaaggcggcttccgaactgtatattgagaccgagaagaagaaaagggaaaaggcctacctggtgagatcccagagggccaccggcattggccgattgatggtaaatgttgtcgagggcattgaactaaaaccctgtagaagtcacgggaagtctaatccatactgtgaggtgaccatgggttctcagtgccatataacgaaaacaatccaggatacactgaatccaaaatggaacagcaactgtcagttctttatccgggatctggaacaggaggttctttgcatcactgtgtttgagagagaccagttttcaccagacgatttcctcggacggacagaaattcgggttgccgatataaaaaaagaccagggatccaaaggaccagtcaccaagtgcttgctgttgcacgaagtacccaccggcgagatagtcgtgcgcctggatctgcagctctttgacgagccttag

SEQ ID NO: 277173 - DNA, 954 bp, Artificial Sequence
  derived and/or modified sequence
tgacccctgatggagagcgagctgctgaccgagaaggaggtggccatgatcttcgtgaactggaaggagctgatcatgtgcaacatcaagctgctgaaggccctgagagtgagaaagaagatgagcggcgagaagatgcccgtgaagatgatcggcgacatcctgagcgcccagctgccccacatgcagccctacatcagattctgcagcagacagctgaacggcgccgccctgatccagcagaagaccgacgaggcccccgacttcaaggagttcgtgaagagactggccatggaccccagatgcaagggcatgcccctgagcagcttcatcctgaagcccatgcagagagtgaccagataccccctgatcatcaagaaccagctggtgttcaacagcgtgaccaactgcctgggccccagaaagttcctgcacagcggcaagctgtacaaggccaagagcaacaaggagctgtacggcttcctgttcaacgacttcctgctgctgacccagatcaccaagcccctgggcagcagcggcaccgacaaggtgttcagccccaagagcaacctgcagtacaagatgtacaagacccccatcttcctgaacgaggtgctggtgaagctgcccaccgaccccagcggcgacgagcccatcttccacatcagccacatcgacagagtgtacaccctgagagccgagagcatcaacgagagaaccgcctgggtgcagaagatcaaggccgccagcgagctgtacatcgagaccgagaagaagaagagagagaaggcctacctggtgagaagccagagagccaccggcatcggcagactgatggtgaacgtggtggagggcatcgagctgaagccctgcagaagccacggcaagagcaacccctactgcgaggtgaccatgggcagccagtgccacatcaccaagaccatccaggactag

SEQ ID NO: 277174 - DNA, 3237 bp, Artificial Sequence
  derived and/or modified sequence
atggcccagttccccacccccttcggcggcagcctggacatctgggccatcaccgtggaggagagagccaagcacgaccagcagttccacagcctgaagcccatcagcggcttcatcaccggcgaccaggccagaaacttcttcttccagagcggcctgccccagcccgtgctggcccagatctgggccctggccgacatgaacaacgacggcagaatggaccaggtggagttcagcatcgccatgaagctgatcaagctgaagctgcagggctaccagctgcccagcgccctgccccccgtgatgaagcagcagcccgtggccatcagcagcgcccccgccttcggcatgggcggcatcgccagcatgccccccctgaccgccgtggcccccgtgcccatgggcagcatccccgtggtgggcatgagccccaccctggtgagcagcgtgcccaccgccgccgtgccccccctggccaacggcgccccccccgtgatccagcccctgcccgccttcgcccaccccgccgccaccctgcccaagagcagcagcttcagcagaagcggccccggcagccagctgaacaccaagctgcagaaggcccagagcttcgacgtggccagcgtgccccccgtggccgagtgggccgtgccccagagcagcagactgaagtacagacagctgttcaacagccacgacaagaccatgagcggccacctgaccggcccccaggccagaaccatcctgatgcagagcagcctgccccaggcccagctggccagcatctggaacctgagcgacatcgaccaggacggcaagctgaccgccgaggagttcatcctggccatgcacctgatcgacgtggccatgagcggccagcccctgccccccgtgctgccccccgagtacatcccccccagcttcagaagagtgagaagcggcagcggcatcagcgtgatcagcagcaccagcgtggaccagagactgcccgaggagcccgtgctggaggacgagcagcagcagctggagaagaagctgcccgtgaccttcgaggacaagaagagagagaacttcgagagaggcaacctggagctggagaagagaagacaggccctgctggagcagcagagaaaggagcaggagagactggcccagctggagagagccgagcaggagagaaaggagagagagagacaggagcaggagagaaagagacagctggagctggagaagcagctggagaagcagagagagctggagagacagagagaggaggagagaagaaaggagatcgagagaagagaggccgccaagagagagctggagagacagagacagctggagtgggagagaaacagaagacaggagctgctgaaccagagaaacaaggagcaggaggacatcgtggtgctgaaggccaagaagaagaccctggagttcgagctggaggccctgaacgacaagaagcaccagctggagggcaagctgcaggacatcagatgcagactgaccacccagagacaggagatcgagagcaccaacaagagcagagagctgagaatcgccgagatcacccacctgcagcagcagctgcaggagagccagcagatgctgggcagactgatccccgagaagcagatcctgaacgaccagctgaagcaggtgcagcagaacagcctgcacagagacagcctggtgaccctgaagagagccctggaggccaaggagctggccagacagcacctgagagaccagctggacgaggtggagaaggagaccagaagcaagctgcaggagatcgacatcttcaacaaccagctgaaggagctgagagagatccacaacaagcagcagctgcagaagcagaagagcatggaggccgagagactgaagcagaaggagcaggagagaaagatcatcgagctggagaagcagaaggaggaggcccagagaagagcccaggagagagacaagcagtggctggagcacgtgcagcaggaggacgagcaccagagacccagaaagctgcacgaggaggagaagctgaagagagaggagagcgtgaagaagaaggacggcgaggagaagggcaagcaggaggcccaggacaagctgggcagactgttccaccagcaccaggagcccgccaagcccgccgtgcaggccccctggagcaccgccgagaagggccccctgaccatcagcgcccaggagaacgtgaaggtggtgtactacagagccctgtaccccttcgagagcagaagccacgacgagatcaccatccagcccggcgacatcgtgatggtggacgagagccagaccggcgagcccggctggctgggcggcgagctgaagggcaagaccggctggttccccgccaactacgccgagaagatccccgagaacgaggtgcccgcccccgtgaagcccgtgaccgacagcaccagcgcccccgcccccaagctggccctgagagagacccccgcccccctggccgtgaccagcagcgagcccagcaccacccccaacaactgggccgacttcagcagcacctggcccaccagcaccaacgagaagcccgagaccgacaactgggacgcctgggccgcccagcccagcctgaccgtgcccagcgccggccagctgagacagagaagcgccttcacccccgccaccgccaccggcagcagccccagccccgtgctgggccagggcgagaaggtggagggcctgcaggcccaggccctgtacccctggagagccaagaaggacaaccacctgaacttcaacaagaacgacgtgatcaccgtgctggagcagcaggacatgtggtggttcggcgaggtgcagggccagaagggctggttccccaagagctacgtgaagctgatcagcggccccatcagaaagagcaccagcatggacagcggcagcagcgagagccccgccagcctgaagagagtggccagccccgccgccaagcccgtggtgagcggcgaggagttcatcgccatgtacacctacgagagcagcgagcagggcgacctgaccttccagcagggcgacgtgatcctggtgaccaagaaggacggcgactggtggaccggcaccgtgggcgacaaggccggcgtgttccccagcaactacgtgagactgaaggacagcgagggcagcggcaccgccggcaagaccggcagcctgggcaagaagcccggccccagctgcaacgtgaagtag

SEQ ID NO: 277175 - DNA, 3048 bp, Artificial Sequence
  derived and/or modified sequence
atggcccagttccccacccccttcggcggcagcctggacatctgggccatcaccgtggaggagagagccaagcacgaccagcagttccacagcctgaagcccatcagcggcttcatcaccggcgaccaggccagaaacttcttcttccagagcggcctgccccagcccgtgctggcccagatctgggccctggccgacatgaacaacgacggcagaatggaccaggtggagttcagcatcgccatgaagctgatcaagctgaagctgcagggctaccagctgcccagcgccctgccccccgtgatgaagcagcagcccgtggccatcagcagcgcccccgccttcggcatgggcggcatcgccagcatgccccccctgaccgccgtggcccccgtgcccatgggcagcatccccgtggtgggcatgagccccaccctggtgagcagcgtgcccaccgccgccgtgccccccctggccaacggcgccccccccgtgatccagcccctgcccgccttcgcccaccccgccgccaccctgcccaagagcagcagcttcagcagaagcggccccggcagccagctgaacaccaagctgcagaaggcccagagcttcgacgtggccagcgtgccccccgtggccgagtgggccgtgccccagagcagcagactgaagtacagacagctgttcaacagccacgacaagaccatgagcggccacctgaccggcccccaggccagaaccatcctgatgcagagcagcctgccccaggcccagctggccagcatctggaacctgagcgacatcgaccaggacggcaagctgaccgccgaggagttcatcctggccatgcacctgatcgacgtggccatgagcggccagcccctgccccccgtgctgccccccgagtacatcccccccagcttcagaagagtgagaagcggcagcggcatcagcgtgatcagcagcaccagcgtggaccagagactgcccgaggagcccgtgctggaggacgagcagcagcagctggagaagaagctgcccgtgaccttcgaggacaagaagagagagaacttcgagagaggcaacctggagctggagaagagaagacaggccctgctggagcagcagagaaaggagcaggagagactggcccagctggagagagccgagcaggagagaaaggagagagagagacaggagcaggagagaaagagacagctggagctggagaagcagctggagaagcagagagagctggagagacagagagaggaggagagaagaaaggagatcgagagaagagaggccgccaagagagagctggagagacagagacagctggagtgggagagaaacagaagacaggagctgctgaaccagagaaacaaggagcaggaggacatcgtggtgctgaaggccaagaagaagaccctggagttcgagctggaggccctgaacgacaagaagcaccagctggagggcaagctgcaggacatcagatgcagactgaccacccagagacaggagatcgagagcaccaacaagagcagagagctgagaatcgccgagatcacccacctgcagcagcagctgcaggagagccagcagatgctgggcagactgatccccgagaagcagatcctgaacgaccagctgaagcaggtgcagcagaacagcctgcacagagacagcctggtgaccctgaagagagccctggaggccaaggagctggccagacagcacctgagagaccagctggacgaggtggagaaggagaccagaagcaagctgcaggagatcgacatcttcaacaaccagctgaaggagctgagagagatccacaacaagcagcagctgcagaagcagaagagcatggaggccgagagactgaagcagaaggagcaggagagaaagatcatcgagctggagaagcagaaggaggaggcccagagaagagcccaggagagagacaagcagtggctggagcacgtgcagcaggaggacgagcaccagagacccagaaagctgcacgaggaggagaagctgaagagagaggagagcgtgaagaagaaggacggcgaggagaagggcaagcaggaggcccaggacaagctgggcagactgttccaccagcaccaggagcccgccaagcccgccgtgcaggccccctggagcaccgccgagaagggccccctgaccatcagcgcccaggagaacgtgaaggtggtgtactacagagccctgtaccccttcgagagcagaagccacgacgagatcaccatccagcccggcgacatcgtgatggtggacgagagccagaccggcgagcccggctggctgggcggcgagctgaagggcaagaccggctggttccccgccaactacgccgagaagatccccgagaacgaggtgcccgcccccgtgaagcccgtgaccgacagcaccagcgcccccgcccccaagctggccctgagagagacccccgcccccctggccgtgaccagcagcgagcccagcaccacccccaacaactgggccgacttcagcagcacctggcccaccagcaccaacgagaagcccgagaccgacaactgggacgcctgggccgcccagcccagcctgaccgtgcccagcgccggccagctgagacagagaagcgccttcacccccgccaccgccaccggcagcagccccagccccgtgctgggccagggcgagaaggtggagggcctgcaggcccaggccctgtacccctggagagccaagaaggacaaccacctgaacttcaacaagaacgacgtgatcaccgtgctggagcagcaggacatgtggtggttcggcgaggtgcagggccagaagggctggttccccaagagctacgtgaagctgatcagcggccccatcagaaagagcaccagcatggacagcggcagcagcgagagccccgccagcctgaagagagtggccagccccgccgccaagcccgtggtgagcggcgagggcctgtggaactgctgggagaacagagagttcagaaagaagacctag

SEQ ID NO: 277176 - DNA, 3648 bp, Artificial Sequence
  derived and/or modified sequence
atggcccagttccccacccccttcggcggcagcctggacatctgggccatcaccgtggaggagagagccaagcacgaccagcagttccacagcctgaagcccatcagcggcttcatcaccggcgaccaggccagaaacttcttcttccagagcggcctgccccagcccgtgctggcccagatctgggccctggccgacatgaacaacgacggcagaatggaccaggtggagttcagcatcgccatgaagctgatcaagctgaagctgcagggctaccagctgcccagcgccctgccccccgtgatgaagcagcagcccgtggccatcagcagcgcccccgccttcggcatgggcggcatcgccagcatgccccccctgaccgccgtggcccccgtgcccatgggcagcatccccgtggtgggcatgagccccaccctggtgagcagcgtgcccaccgccgccgtgccccccctggccaacggcgccccccccgtgatccagcccctgcccgccttcgcccaccccgccgccaccctgcccaagagcagcagcttcagcagaagcggccccggcagccagctgaacaccaagctgcagaaggcccagagcttcgacgtggccagcgtgccccccgtggccgagtgggccgtgccccagagcagcagactgaagtacagacagctgttcaacagccacgacaagaccatgagcggccacctgaccggcccccaggccagaaccatcctgatgcagagcagcctgccccaggcccagctggccagcatctggaacctgagcgacatcgaccaggacggcaagctgaccgccgaggagttcatcctggccatgcacctgatcgacgtggccatgagcggccagcccctgccccccgtgctgccccccgagtacatcccccccagcttcagaagagtgagaagcggcagcggcatcagcgtgatcagcagcaccagcgtggaccagagactgcccgaggagcccgtgctggaggacgagcagcagcagctggagaagaagctgcccgtgaccttcgaggacaagaagagagagaacttcgagagaggcaacctggagctggagaagagaagacaggccctgctggagcagcagagaaaggagcaggagagactggcccagctggagagagccgagcaggagagaaaggagagagagagacaggagcaggagagaaagagacagctggagctggagaagcagctggagaagcagagagagctggagagacagagagaggaggagagaagaaaggagatcgagagaagagaggccgccaagagagagctggagagacagagacagctggagtgggagagaaacagaagacaggagctgctgaaccagagaaacaaggagcaggaggacatcgtggtgctgaaggccaagaagaagaccctggagttcgagctggaggccctgaacgacaagaagcaccagctggagggcaagctgcaggacatcagatgcagactgaccacccagagacaggagatcgagagcaccaacaagagcagagagctgagaatcgccgagatcacccacctgcagcagcagctgcaggagagccagcagatgctgggcagactgatccccgagaagcagatcctgaacgaccagctgaagcaggtgcagcagaacagcctgcacagagacagcctggtgaccctgaagagagccctggaggccaaggagctggccagacagcacctgagagaccagctggacgaggtggagaaggagaccagaagcaagctgcaggagatcgacatcttcaacaaccagctgaaggagctgagagagatccacaacaagcagcagctgcagaagcagaagagcatggaggccgagagactgaagcagaaggagcaggagagaaagatcatcgagctggagaagcagaaggaggaggcccagagaagagcccaggagagagacaagcagtggctggagcacgtgcagcaggaggacgagcaccagagacccagaaagctgcacgaggaggagaagctgaagagagaggagagcgtgaagaagaaggacggcgaggagaagggcaagcaggaggcccaggacaagctgggcagactgttccaccagcaccaggagcccgccaagcccgccgtgcaggccccctggagcaccgccgagaagggccccctgaccatcagcgcccaggagaacgtgaaggtggtgtactacagagccctgtaccccttcgagagcagaagccacgacgagatcaccatccagcccggcgacatcgtgatggtggacgagagccagaccggcgagcccggctggctgggcggcgagctgaagggcaagaccggctggttccccgccaactacgccgagaagatccccgagaacgaggtgcccgcccccgtgaagcccgtgaccgacagcaccagcgcccccgcccccaagctggccctgagagagacccccgcccccctggccgtgaccagcagcgagcccagcaccacccccaacaactgggccgacttcagcagcacctggcccaccagcaccaacgagaagcccgagaccgacaactgggacgcctgggccgcccagcccagcctgaccgtgcccagcgccggccagctgagacagagaagcgccttcacccccgccaccgccaccggcagcagccccagccccgtgctgggccagggcgagaaggtggagggcctgcaggcccaggccctgtacccctggagagccaagaaggacaaccacctgaacttcaacaagaacgacgtgatcaccgtgctggagcagcaggacatgtggtggttcggcgaggtgcagggccagaagggctggttccccaagagctacgtgaagctgatcagcggccccatcagaaagagcaccagcatggacagcggcagcagcgagagccccgccagcctgaagagagtggccagccccgccgccaagcccgtggtgagcggcgaggagttcatcgccatgtacacctacgagagcagcgagcagggcgacctgaccttccagcagggcgacgtgatcctggtgaccaagaaggacggcgactggtggaccggcaccgtgggcgacaaggccggcgtgttccccagcaactacgtgagactgaaggacagcgagggcagcggcaccgccggcaagaccggcagcctgggcaagaagcccgagatcgcccaggtgatcgccagctacaccgccaccggccccgagcagctgaccctggcccccggccagctgatcctgatcagaaagaagaaccccggcggctggtgggagggcgagctgcaggccagaggcaagaagagacagatcggctggttccccgccaactacgtgaagctgctgagccccggcaccagcaagatcacccccaccgagccccccaagagcaccgccctggccgccgtgtgccaggtgatcggcatgtacgactacaccgcccagaacgacgacgagctggccttcaacaagggccagatcatcaacgtgctgaacaaggaggaccccgactggtggaagggcgaggtgaacggccaggtgggcctgttccccagcaactacgtgaagctgaccaccgacatggaccccagccagcagtag

SEQ ID NO: 277177 - DNA, 3537 bp, Artificial Sequence
  derived and/or modified sequence
atggcccagttccccacccccttcggcggcagcctggacatctgggccatcaccgtggaggagagagccaagcacgaccagcagttccacagcctgaagcccatcagcggcttcatcaccggcgaccaggccagaaacttcttcttccagagcggcctgccccagcccgtgctggcccagatctgggccctggccgacatgaacaacgacggcagaatggaccaggtggagttcagcatcgccatgaagctgatcaagctgaagctgcagggctaccagctgcccagcgccctgccccccgtgatgaagcagcagcccgtggccatcagcagcgcccccgccttcgccgccgtgccccccctggccaacggcgccccccccgtgatccagcccctgcccgccttcgcccaccccgccgccaccctgcccaagagcagcagcttcagcagaagcggccccggcagccagctgaacaccaagctgcagaaggcccagagcttcgacgtggccagcgtgccccccgtggccgagtgggccgtgccccagagcagcagactgaagtacagacagctgttcaacagccacgacaagaccatgagcggccacctgaccggcccccaggccagaaccatcctgatgcagagcagcctgccccaggcccagctggccagcatctggaacctgagcgacatcgaccaggacggcaagctgaccgccgaggagttcatcctggccatgcacctgatcgacgtggccatgagcggccagcccctgccccccgtgctgccccccgagtacatcccccccagcttcagaagagtgagaagcggcagcggcatcagcgtgatcagcagcaccagcgtggaccagagactgcccgaggagcccgtgctggaggacgagcagcagcagctggagaagaagctgcccgtgaccttcgaggacaagaagagagagaacttcgagagaggcaacctggagctggagaagagaagacaggccctgctggagcagcagagaaaggagcaggagagactggcccagctggagagagccgagcaggagagaaaggagagagagagacaggagcaggagagaaagagacagctggagctggagaagcagctggagaagcagagagagctggagagacagagagaggaggagagaagaaaggagatcgagagaagagaggccgccaagagagagctggagagacagagacagctggagtgggagagaaacagaagacaggagctgctgaaccagagaaacaaggagcaggaggacatcgtggtgctgaaggccaagaagaagaccctggagttcgagctggaggccctgaacgacaagaagcaccagctggagggcaagctgcaggacatcagatgcagactgaccacccagagacaggagatcgagagcaccaacaagagcagagagctgagaatcgccgagatcacccacctgcagcagcagctgcaggagagccagcagatgctgggcagactgatccccgagaagcagatcctgaacgaccagctgaagcaggtgcagcagaacagcctgcacagagacagcctggtgaccctgaagagagccctggaggccaaggagctggccagacagcacctgagagaccagctggacgaggtggagaaggagaccagaagcaagctgcaggagatcgacatcttcaacaaccagctgaaggagctgagagagatccacaacaagcagcagctgcagaagcagaagagcatggaggccgagagactgaagcagaaggagcaggagagaaagatcatcgagctggagaagcagaaggaggaggcccagagaagagcccaggagagagacaagcagtggctggagcacgtgcagcaggaggacgagcaccagagacccagaaagctgcacgaggaggagaagctgaagagagaggagagcgtgaagaagaaggacggcgaggagaagggcaagcaggaggcccaggacaagctgggcagactgttccaccagcaccaggagcccgccaagcccgccgtgcaggccccctggagcaccgccgagaagggccccctgaccatcagcgcccaggagaacgtgaaggtggtgtactacagagccctgtaccccttcgagagcagaagccacgacgagatcaccatccagcccggcgacatcgtgatggtggacgagagccagaccggcgagcccggctggctgggcggcgagctgaagggcaagaccggctggttccccgccaactacgccgagaagatccccgagaacgaggtgcccgcccccgtgaagcccgtgaccgacagcaccagcgcccccgcccccaagctggccctgagagagacccccgcccccctggccgtgaccagcagcgagcccagcaccacccccaacaactgggccgacttcagcagcacctggcccaccagcaccaacgagaagcccgagaccgacaactgggacgcctgggccgcccagcccagcctgaccgtgcccagcgccggccagctgagacagagaagcgccttcacccccgccaccgccaccggcagcagccccagccccgtgctgggccagggcgagaaggtggagggcctgcaggcccaggccctgtacccctggagagccaagaaggacaaccacctgaacttcaacaagaacgacgtgatcaccgtgctggagcagcaggacatgtggtggttcggcgaggtgcagggccagaagggctggttccccaagagctacgtgaagctgatcagcggccccatcagaaagagcaccagcatggacagcggcagcagcgagagccccgccagcctgaagagagtggccagccccgccgccaagcccgtggtgagcggcgaggagttcatcgccatgtacacctacgagagcagcgagcagggcgacctgaccttccagcagggcgacgtgatcctggtgaccaagaaggacggcgactggtggaccggcaccgtgggcgacaaggccggcgtgttccccagcaactacgtgagactgaaggacagcgagggcagcggcaccgccggcaagaccggcagcctgggcaagaagcccgagatcgcccaggtgatcgccagctacaccgccaccggccccgagcagctgaccctggcccccggccagctgatcctgatcagaaagaagaaccccggcggctggtgggagggcgagctgcaggccagaggcaagaagagacagatcggctggttccccgccaactacgtgaagctgctgagccccggcaccagcaagatcacccccaccgagccccccaagagcaccgccctggccgccgtgtgccaggtgatcggcatgtacgactacaccgcccagaacgacgacgagctggccttcaacaagggccagatcatcaacgtgctgaacaaggaggaccccgactggtggaagggcgaggtgaacggccaggtgggcctgttccccagcaactacgtgaagctgaccaccgacatggaccccagccagcagtag

SEQ ID NO: 277178 - DNA, 5151 bp, Artificial Sequence
  derived and/or modified sequence
atggcccagttccccacccccttcggcggcagcctggacatctgggccatcaccgtggaggagagagccaagcacgaccagcagttccacagcctgaagcccatcagcggcttcatcaccggcgaccaggccagaaacttcttcttccagagcggcctgccccagcccgtgctggcccagatctgggccctggccgacatgaacaacgacggcagaatggaccaggtggagttcagcatcgccatgaagctgatcaagctgaagctgcagggctaccagctgcccagcgccctgccccccgtgatgaagcagcagcccgtggccatcagcagcgcccccgccttcggcatgggcggcatcgccagcatgccccccctgaccgccgtggcccccgtgcccatgggcagcatccccgtggtgggcatgagccccaccctggtgagcagcgtgcccaccgccgccgtgccccccctggccaacggcgccccccccgtgatccagcccctgcccgccttcgcccaccccgccgccaccctgcccaagagcagcagcttcagcagaagcggccccggcagccagctgaacaccaagctgcagaaggcccagagcttcgacgtggccagcgtgccccccgtggccgagtgggccgtgccccagagcagcagactgaagtacagacagctgttcaacagccacgacaagaccatgagcggccacctgaccggcccccaggccagaaccatcctgatgcagagcagcctgccccaggcccagctggccagcatctggaacctgagcgacatcgaccaggacggcaagctgaccgccgaggagttcatcctggccatgcacctgatcgacgtggccatgagcggccagcccctgccccccgtgctgccccccgagtacatcccccccagcttcagaagagtgagaagcggcagcggcatcagcgtgatcagcagcaccagcgtggaccagagactgcccgaggagcccgtgctggaggacgagcagcagcagctggagaagaagctgcccgtgaccttcgaggacaagaagagagagaacttcgagagaggcaacctggagctggagaagagaagacaggccctgctggagcagcagagaaaggagcaggagagactggcccagctggagagagccgagcaggagagaaaggagagagagagacaggagcaggagagaaagagacagctggagctggagaagcagctggagaagcagagagagctggagagacagagagaggaggagagaagaaaggagatcgagagaagagaggccgccaagagagagctggagagacagagacagctggagtgggagagaaacagaagacaggagctgctgaaccagagaaacaaggagcaggaggacatcgtggtgctgaaggccaagaagaagaccctggagttcgagctggaggccctgaacgacaagaagcaccagctggagggcaagctgcaggacatcagatgcagactgaccacccagagacaggagatcgagagcaccaacaagagcagagagctgagaatcgccgagatcacccacctgcagcagcagctgcaggagagccagcagatgctgggcagactgatccccgagaagcagatcctgaacgaccagctgaagcaggtgcagcagaacagcctgcacagagacagcctggtgaccctgaagagagccctggaggccaaggagctggccagacagcacctgagagaccagctggacgaggtggagaaggagaccagaagcaagctgcaggagatcgacatcttcaacaaccagctgaaggagctgagagagatccacaacaagcagcagctgcagaagcagaagagcatggaggccgagagactgaagcagaaggagcaggagagaaagatcatcgagctggagaagcagaaggaggaggcccagagaagagcccaggagagagacaagcagtggctggagcacgtgcagcaggaggacgagcaccagagacccagaaagctgcacgaggaggagaagctgaagagagaggagagcgtgaagaagaaggacggcgaggagaagggcaagcaggaggcccaggacaagctgggcagactgttccaccagcaccaggagcccgccaagcccgccgtgcaggccccctggagcaccgccgagaagggccccctgaccatcagcgcccaggagaacgtgaaggtggtgtactacagagccctgtaccccttcgagagcagaagccacgacgagatcaccatccagcccggcgacatcgtgatggtggacgagagccagaccggcgagcccggctggctgggcggcgagctgaagggcaagaccggctggttccccgccaactacgccgagaagatccccgagaacgaggtgcccgcccccgtgaagcccgtgaccgacagcaccagcgcccccgcccccaagctggccctgagagagacccccgcccccctggccgtgaccagcagcgagcccagcaccacccccaacaactgggccgacttcagcagcacctggcccaccagcaccaacgagaagcccgagaccgacaactgggacgcctgggccgcccagcccagcctgaccgtgcccagcgccggccagctgagacagagaagcgccttcacccccgccaccgccaccggcagcagccccagccccgtgctgggccagggcgagaaggtggagggcctgcaggcccaggccctgtacccctggagagccaagaaggacaaccacctgaacttcaacaagaacgacgtgatcaccgtgctggagcagcaggacatgtggtggttcggcgaggtgcagggccagaagggctggttccccaagagctacgtgaagctgatcagcggccccatcagaaagagcaccagcatggacagcggcagcagcgagagccccgccagcctgaagagagtggccagccccgccgccaagcccgtggtgagcggcgaggagttcatcgccatgtacacctacgagagcagcgagcagggcgacctgaccttccagcagggcgacgtgatcctggtgaccaagaaggacggcgactggtggaccggcaccgtgggcgacaaggccggcgtgttccccagcaactacgtgagactgaaggacagcgagggcagcggcaccgccggcaagaccggcagcctgggcaagaagcccgagatcgcccaggtgatcgccagctacaccgccaccggccccgagcagctgaccctggcccccggccagctgatcctgatcagaaagaagaaccccggcggctggtgggagggcgagctgcaggccagaggcaagaagagacagatcggctggttccccgccaactacgtgaagctgctgagccccggcaccagcaagatcacccccaccgagccccccaagagcaccgccctggccgccgtgtgccaggtgatcggcatgtacgactacaccgcccagaacgacgacgagctggccttcaacaagggccagatcatcaacgtgctgaacaaggaggaccccgactggtggaagggcgaggtgaacggccaggtgggcctgttccccagcaactacgtgaagctgaccaccgacatggaccccagccagcagtggtgcagcgacctgcacctgctggacatgctgacccccaccgagagaaagagacagggctacatccacgagctgatcgtgaccgaggagaactacgtgaacgacctgcagctggtgaccgagatcttccagaagcccctgatggagagcgagctgctgaccgagaaggaggtggccatgatcttcgtgaactggaaggagctgatcatgtgcaacatcaagctgctgaaggccctgagagtgagaaagaagatgagcggcgagaagatgcccgtgaagatgatcggcgacatcctgagcgcccagctgccccacatgcagccctacatcagattctgcagcagacagctgaacggcgccgccctgatccagcagaagaccgacgaggcccccgacttcaaggagttcgtgaagagactggccatggaccccagatgcaagggcatgcccctgagcagcttcatcctgaagcccatgcagagagtgaccagataccccctgatcatcaagaacatcctggagaacacccccgagaaccaccccgaccacagccacctgaagcacgccctggagaaggccgaggagctgtgcagccaggtgaacgagggcgtgagagagaaggagaacagcgacagactggagtggatccaggcccacgtgcagtgcgagggcctgagcgagcagctggtgttcaacagcgtgaccaactgcctgggccccagaaagttcctgcacagcggcaagctgtacaaggccaagagcaacaaggagctgtacggcttcctgttcaacgacttcctgctgctgacccagatcaccaagcccctgggcagcagcggcaccgacaaggtgttcagccccaagagcaacctgcagtacaagatgtacaagacccccatcttcctgaacgaggtgctggtgaagctgcccaccgaccccagcggcgacgagcccatcttccacatcagccacatcgacagagtgtacaccctgagagccgagagcatcaacgagagaaccgcctgggtgcagaagatcaaggccgccagcgagctgtacatcgagaccgagaagaagaagagagagaaggcctacctggtgagaagccagagagccaccggcatcggcagactgatggtgaacgtggtggagggcatcgagctgaagccctgcagaagccacggcaagagcaacccctactgcgaggtgaccatgggcagccagtgccacatcaccaagaccatccaggacaccctgaaccccaagtggaacagcaactgccagttcttcatcagagacctggagcaggaggtgctgtgcatcaccgtgttcgagagagaccagttcagccccgacgacttcctgggcagaaccgagatcagagtggccgacatcaagaaggaccagggcagcaagggccccgtgaccaagtgcctgctgctgcacgaggtgcccaccggcgagatcgtggtgagactggacctgcagctgttcgacgagccctag

SEQ ID NO: 277179 - DNA, 4983 bp, Artificial Sequence
  derived and/or modified sequence
atggcccagttccccacccccttcggcggcagcctggacatctgggccatcaccgtggaggagagagccaagcacgaccagcagttccacagcctgaagcccatcagcggcttcatcaccggcgaccaggccagaaacttcttcttccagagcggcctgccccagcccgtgctggcccagatctgggccctggccgacatgaacaacgacggcagaatggaccaggtggagttcagcatcgccatgaagctgatcaagctgaagctgcagggctaccagctgcccagcgccctgccccccgtgatgaagcagcagcccgtggccatcagcagcgcccccgccttcggcatgggcggcatcgccagcatgccccccctgaccgccgtggcccccgtgcccatgggcagcatccccgtggtgggcatgagccccaccctggtgagcagcgtgcccaccgccgccgtgccccccctggccaacggcgccccccccgtgatccagcccctgcccgccttcgcccaccccgccgccaccctgcccaagagcagcagcttcagcagaagcggccccggcagccagctgaacaccaagctgcagaaggcccagagcttcgacgtggccagcgtgccccccgtggccgagtgggccgtgccccagagcagcagactgaagtacagacagctgttcaacagccacgacaagaccatgagcggccacctgaccggcccccaggccagaaccatcctgatgcagagcagcctgccccaggcccagctggccagcatctggaacctgagcgacatcgaccaggacggcaagctgaccgccgaggagttcatcctggccatgcacctgatcgacgtggccatgagcggccagcccctgccccccgtgctgccccccgagtacatcccccccagcttcagaagagtgagaagcggcagcggcatcagcgtgatcagcagcaccagcgtggaccagagactgcccgaggagcccgtgctggaggacgagcagcagcagctggagaagaagctgcccgtgaccttcgaggacaagaagagagagaacttcgagagaggcaacctggagctggagaagagaagacaggccctgctggagcagcagagaaaggagcaggagagactggcccagctggagagagccgagcaggagagaaaggagagagagagacaggagcaggagagaaagagacagctggagctggagaagcagctggagaagcagagagagctggagagacagagagaggaggagagaagaaaggagatcgagagaagagaggccgccaagagagagctggagagacagagacagctggagtgggagagaaacagaagacaggagctgctgaaccagagaaacaaggagcaggaggacatcgtggtgctgaaggccaagaagaagaccctggagttcgagctggaggccctgaacgacaagaagcaccagctggagggcaagctgcaggacatcagatgcagactgaccacccagagacaggagatcgagagcaccaacaagagcagagagctgagaatcgccgagatcacccacctgcagcagcagctgcaggagagccagcagatgctgggcagactgatccccgagaagcagatcctgaacgaccagctgaagcaggtgcagcagaacagcctgcacagagacagcctggtgaccctgaagagagccctggaggccaaggagctggccagacagcacctgagagaccagctggacgaggtggagaaggagaccagaagcaagctgcaggagatcgacatcttcaacaaccagctgaaggagctgagagagatccacaacaagcagcagctgcagaagcagaagagcatggaggccgagagactgaagcagaaggagcaggagagaaagatcatcgagctggagaagcagaaggaggaggcccagagaagagcccaggagagagacaagcagtggctggagcacgtgcagcaggaggacgagcaccagagacccagaaagctgcacgaggaggagaagctgaagagagaggagagcgtgaagaagaaggacggcgaggagaagggcaagcaggaggcccaggacaagctgggcagactgttccaccagcaccaggagcccgccaagcccgccgtgcaggccccctggagcaccgccgagaagggccccctgaccatcagcgcccaggagaacgtgaaggtggtgtactacagagccctgtaccccttcgagagcagaagccacgacgagatcaccatccagcccggcgacatcgtgatggtggacgagagccagaccggcgagcccggctggctgggcggcgagctgaagggcaagaccggctggttccccgccaactacgccgagaagatccccgagaacgaggtgcccgcccccgtgaagcccgtgaccgacagcaccagcgcccccgcccccaagctggccctgagagagacccccgcccccctggccgtgaccagcagcgagcccagcaccacccccaacaactgggccgacttcagcagcacctggcccaccagcaccaacgagaagcccgagaccgacaactgggacgcctgggccgcccagcccagcctgaccgtgcccagcgccggccagctgagacagagaagcgccttcacccccgccaccgccaccggcagcagccccagccccgtgctgggccagggcgagaaggtggagggcctgcaggcccaggccctgtacccctggagagccaagaaggacaaccacctgaacttcaacaagaacgacgtgatcaccgtgctggagcagcaggacatgtggtggttcggcgaggtgcagggccagaagggctggttccccaagagctacgtgaagctgatcagcggccccatcagaaagagcaccagcatggacagcggcagcagcgagagccccgccagcctgaagagagtggccagccccgccgccaagcccgtggtgagcggcgaggagttcatcgccatgtacacctacgagagcagcgagcagggcgacctgaccttccagcagggcgacgtgatcctggtgaccaagaaggacggcgactggtggaccggcaccgtgggcgacaaggccggcgtgttccccagcaactacgtgagactgaaggacagcgagggcagcggcaccgccggcaagaccggcagcctgggcaagaagcccgagatcgcccaggtgatcgccagctacaccgccaccggccccgagcagctgaccctggcccccggccagctgatcctgatcagaaagaagaaccccggcggctggtgggagggcgagctgcaggccagaggcaagaagagacagatcggctggttccccgccaactacgtgaagctgctgagccccggcaccagcaagatcacccccaccgagccccccaagagcaccgccctggccgccgtgtgccaggtgatcggcatgtacgactacaccgcccagaacgacgacgagctggccttcaacaagggccagatcatcaacgtgctgaacaaggaggaccccgactggtggaagggcgaggtgaacggccaggtgggcctgttccccagcaactacgtgaagctgaccaccgacatggaccccagccagcagtggtgcagcgacctgcacctgctggacatgctgacccccaccgagagaaagagacagggctacatccacgagctgatcgtgaccgaggagaactacgtgaacgacctgcagctggtgaccgagatcttccagaagcccctgatggagagcgagctgctgaccgagaaggaggtggccatgatcttcgtgaactggaaggagctgatcatgtgcaacatcaagctgctgaaggccctgagagtgagaaagaagatgagcggcgagaagatgcccgtgaagatgatcggcgacatcctgagcgcccagctgccccacatgcagccctacatcagattctgcagcagacagctgaacggcgccgccctgatccagcagaagaccgacgaggcccccgacttcaaggagttcgtgaagagactggccatggaccccagatgcaagggcatgcccctgagcagcttcatcctgaagcccatgcagagagtgaccagataccccctgatcatcaagaaccagctggtgttcaacagcgtgaccaactgcctgggccccagaaagttcctgcacagcggcaagctgtacaaggccaagagcaacaaggagctgtacggcttcctgttcaacgacttcctgctgctgacccagatcaccaagcccctgggcagcagcggcaccgacaaggtgttcagccccaagagcaacctgcagtacaagatgtacaagacccccatcttcctgaacgaggtgctggtgaagctgcccaccgaccccagcggcgacgagcccatcttccacatcagccacatcgacagagtgtacaccctgagagccgagagcatcaacgagagaaccgcctgggtgcagaagatcaaggccgccagcgagctgtacatcgagaccgagaagaagaagagagagaaggcctacctggtgagaagccagagagccaccggcatcggcagactgatggtgaacgtggtggagggcatcgagctgaagccctgcagaagccacggcaagagcaacccctactgcgaggtgaccatgggcagccagtgccacatcaccaagaccatccaggacaccctgaaccccaagtggaacagcaactgccagttcttcatcagagacctggagcaggaggtgctgtgcatcaccgtgttcgagagagaccagttcagccccgacgacttcctgggcagaaccgagatcagagtggccgacatcaagaaggaccagggcagcaagggccccgtgaccaagtgcctgctgctgcacgaggtgcccaccggcgagatcgtggtgagactggacctgcagctgttcgacgagccctag

SEQ ID NO: 277180 - protein, 1650 aa, Artificial Sequence
  derived and/or modified sequence
MAQFPTPFGGSLDIWAITVEERAKHDQQFHSLKPISGFITGDQARNFFFQSGLPQPVLAQIWALADMNNDGRMDQVEFSIAMKLIKLKLQGYQLPSALPPVMKQQPVAISSAPAFGMGGIASMPPLTAVAPVPMGSIPVVGMSPTLVSSVPTAAVPPLANGAPPVIQPLPAFAHPAATLPKSSSFSRSGPGSQLNTKLQKAQSFDVASVPPVAEWAVPQSSRLKYRQLFNSHDKTMSGHLTGPQARTILMQSSLPQAQLASIWNLSDIDQDGKLTAEEFILAMHLIDVAMSGQPLPPVLPPEYIPPSFRRVRSGSGISVISSTSVDQRLPEEPVLEDEQQQLEKKLPVTFEDKKRENFERGNLELEKRRQALLEQQRKEQERLAQLERAEQERKERERQEQERKRQLELEKQLEKQRELERQREEERRKEIERREAAKRELERQRQLEWERNRRQELLNQRNKEQEDIVVLKAKKKTLEFELEALNDKKHQLEGKLQDIRCRLTTQRQEIESTNKSRELRIAEITHLQQQLQESQQMLGRLIPEKQILNDQLKQVQQNSLHRDSLVTLKRALEAKELARQHLRDQLDEVEKETRSKLQEIDIFNNQLKELREIHNKQQLQKQKSMEAERLKQKEQERKIIELEKQKEEAQRRAQERDKQWLEHVQQEDEHQRPRKLHEEEKLKREESVKKKDGEEKGKQEAQDKLGRLFHQHQEPAKPAVQAPWSTAEKGPLTISAQENVKVVYYRALYPFESRSHDEITIQPGDIVMVIGCWVDESQTGEPGWLGGELKGKTGWFPANYAEKIPENEVPAPVKPVTDSTSAPAPKLALRETPAPLAVTSSEPSTTPNNWADFSSTWPTSTNEKPETDNWDAWAAQPSLTVPSAGQLRQRSAFTPATATGSSPSPVLGQGEKVEGLQAQALYPWRAKKDNHLNFNKNDVITVLEQQDMWWFGEVQGQKGWFPKSYVKLISGPIRKSTSMDSGSSESPASLKRVASPAAKPVVSGEEIAQVIASYTATGPEQLTLAPGQLILIRKKNPGGWWEGELQARGKKRQIGWFPANYVKLLSPGTSKITPTEPPKSTALAAVCQVIGMYDYTAQNDDELAFNKGQIINVLNKEDPDWWKGEVNGQVGLFPSNYVKLTTDMDPSQQWCSDLHLLDMLTPTERKRQGYIHELIVTEENYVNDLQLVTEIFQKPLMESELLTEKEVAMIFVNWKELIMCNIKLLKALRVRKKMSGEKMPVKMIGDILSAQLPHMQPYIRFCSRQLNGAALIQQKTDEAPDFKEFVKRLAMDPRCKGMPLSSFILKPMQRVTRYPLIIKNILENTPENHPDHSHLKHALEKAEELCSQVNEGVREKENSDRLEWIQAHVQCEGLSEQLVFNSVTNCLGPRKFLHSGKLYKAKSNKELYGFLFNDFLLLTQITKPLGSSGTDKVFSPKSNLQYKMYKTPIFLNEVLVKLPTDPSGDEPIFHISHIDRVYTLRAESINERTAWVQKIKAASELYIETEKKKREKAYLVRSQRATGIGRLMVNVVEGIELKPCRSHGKSNPYCEVTMGSQCHITKTIQDTLNPKWNSNCQFFIRDLEQEVLCITVFERDQFSPDDFLGRTEIRVADIKKDQGSKGPVTKCLLLHEVPTGEIVVRLDLQLFDEP

SEQ ID NO: 277181 - protein, 1144 aa, Artificial Sequence
  derived and/or modified sequence
MAQFPTPFGGSLDIWAITVEERAKHDQQFHSLKPISGFITGDQARNFFFQSGLPQPVLAQIWALADMNNDGRMDQVEFSIAMKLIKLKLQGYQLPSALPPVMKQQPVAISSAPAFGMGGIASMPPLTAVAPVPMGSIPVVGMSPTLVSSVPTAAVPPLANGAPPVIQPLPAFAHPAATLPKSSSFSRSGPGSQLNTKLQKAQSFDVASVPPVAEWAVPQSSRLKYRQLFNSHDKTMSGHLTGPQARTILMQSSLPQAQLASIWNLSDIDQDGKLTAEEFILAMHLIDVAMSGQPLPPVLPPEYIPPSFRRVRSGSGISVISSTSVDQRLPEEPVLEDEQQQLEKKLPVTFEDKKRENFERGNLELEKRRQALLEQQRKEQERLAQLERAEQERKERERQEQERKRQLELEKQLEKQRELERQREEERRKEIERREAAKRELERQRQLEWERNRRQELLNQRNKEQEDIVVLKAKKKTLEFELEALNDKKHQLEGKLQDIRCRLTTQRQEIESTNKSRELRIAEITHLQQQLQESQQMLGRLIPEKQILNDQLKQVQQNSLHRDSLVTLKRALEAKELARQHLRDQLDEVEKETRSKLQEIDIFNNQLKELREIHNKQQLQKQKSMEAERLKQKEQERKIIELEKQKEEAQRRAQERDKQWLEHVQQEDEHQRPRKLHEEEKLKREESVKKKDGEEKGKQEAQDKLGRLFHQHQEPAKPAVQAPWSTAEKGPLTISAQENVKVVYYRALYPFESRSHDEITIQPGDIVMVDESQTGEPGWLGGELKGKTGWFPANYAEKIPENEVPAPVKPVTDSTSAPAPKLALRETPAPLAVTSSEPSTTPNNWADFSSTWPTSTNEKPETDNWDAWAAQPSLTVPSAGQLRQRSAFTPATATGSSPSPVLGQGEKVEGLQAQALYPWRAKKDNHLNFNKNDVITVLEQQDMWWFGEVQGQKGWFPKSYVKLISGPIRKSTSMDSGSSESPASLKRVASPAAKPVVSGEEIAQVIASYTATGPEQLTLAPGQLILIRKKNPGGWWEGELQARGKKRQIGWFPANYVKLLSPGTSKITPTEPPKSTALAAVCQVIGMYDYTAQNDDELAFNKGQIINVLNKEDPDWWKGEVNGQVGLFPSNYVKLTTDMDPSQQ

SEQ ID NO: 277182 - protein, 1149 aa, Artificial Sequence
  derived and/or modified sequence
MAQFPTPFGGSLDIWAITVEERAKHDQQFHSLKPISGFITGDQARNFFFQSGLPQPVLAQIWALADMNNDGRMDQVEFSIAMKLIKLKLQGYQLPSALPPVMKQQPVAISSAPAFGMGGIASMPPLTAVAPVPMGSIPVVGMSPTLVSSVPTAAVPPLANGAPPVIQPLPAFAHPAATLPKSSSFSRSGPGSQLNTKLQKAQSFDVASVPPVAEWAVPQSSRLKYRQLFNSHDKTMSGHLTGPQARTILMQSSLPQAQLASIWNLSDIDQDGKLTAEEFILAMHLIDVAMSGQPLPPVLPPEYIPPSFRRVRSGSGISVISSTSVDQRLPEEPVLEDEQQQLEKKLPVTFEDKKRENFERGNLELEKRRQALLEQQRKEQERLAQLERAEQERKERERQEQERKRQLELEKQLEKQRELERQREEERRKEIERREAAKRELERQRQLEWERNRRQELLNQRNKEQEDIVVLKAKKKTLEFELEALNDKKHQLEGKLQDIRCRLTTQRQEIESTNKSRELRIAEITHLQQQLQESQQMLGRLIPEKQILNDQLKQVQQNSLHRDSLVTLKRALEAKELARQHLRDQLDEVEKETRSKLQEIDIFNNQLKELREIHNKQQLQKQKSMEAERLKQKEQERKIIELEKQKEEAQRRAQERDKQWLEHVQQEDEHQRPRKLHEEEKLKREESVKKKDGEEKGKQEAQDKLGRLFHQHQEPAKPAVQAPWSTAEKGPLTISAQENVKVVYYRALYPFESRSHDEITIQPGDIVMVKGEWVDESQTGEPGWLGGELKGKTGWFPANYAEKIPENEVPAPVKPVTDSTSAPAPKLALRETPAPLAVTSSEPSTTPNNWADFSSTWPTSTNEKPETDNWDAWAAQPSLTVPSAGQLRQRSAFTPATATGSSPSPVLGQGEKVEGLQAQALYPWRAKKDNHLNFNKNDVITVLEQQDMWWFGEVQGQKGWFPKSYVKLISGPIRKSTSMDSGSSESPASLKRVASPAAKPVVSGEEIAQVIASYTATGPEQLTLAPGQLILIRKKNPGGWWEGELQARGKKRQIGWFPANYVKLLSPGTSKITPTEPPKSTALAAVCQVIGMYDYTAQNDDELAFNKGQIINVLNKEDPDWWKGEVNGQVGLFPSNYVKLTTDMDPSQQ

SEQ ID NO: 277183 - protein, 1591 aa, Artificial Sequence
  derived and/or modified sequence
MGNAESQHVEHEFYGEKHASLGRKHTSRSLRLSHKTRRTRHASSGKVIHRNSEVSTRSSSTPSIPQSLAENGLEPFSQDGTLEDFGSPIWVDRVDMGLRPVSYTDSSVTPSVDSSIVLTAASVQSMPDTEESRLYGDDATYLAEGGRRQHSYTSNGPTFMETASFKKKRSKSADIWREDSLEFSLSDLSQEHLTSNEEILGSAEEKDCEEARGMETRASPRQLSTCQRANSLGDLYAQKNSGVTANGGPGSKFAGYCRNLVSDIPNLANHKMPPAAAEETPPYSNYNTLPCRKSHCLSEGATNPQISHSNSMQGRRAKTTQDVNAGEGSEFADSGIEGATTDTDLLSRRSNATNSSYSPTTGRAFVGSDSGSSSTGDAARQGVYENFRRELEMSTTNSESLEEAGSAHSDEQSSGTLSSPGQSDILLTAAQGTVRKAGALAVKNFLVHKKNKKVESATRRKWKHYWVSLKGCTLFFYESDGRSGIDHNSIPKHAVWVENSIVQAVPEHPKKDFVFCLSNSLGDAFLFQTTSQTELENWITAIHSACATAVARHHHKEDTLRLLKSEIKKLEQKIDMDEKMKKMGEMQLSSVTDSKKKKTILDQIFVWEQNLEQFQMDLFRFRCYLASLQGGELPNPKRLLAFASRPTKVAMGRLGIFSVSSFHALVAARTGETGVRRRTQAMSRSASKRRSRFSSLWGLDTTSKKKQGRPSINQVFGEGTEAVKKSLEGIFDDIVPDGKREKEVVLPNVHQHNPDCDIWVHEYFTPSWFCLPNNQPALTVVRPGDTARDTLELICKTHQLDHSAHYLRLKFLIENKMQLYVPQPEEDIYELLYKEIEICPKVTQSIHIEKSDTAADTYGFSLSSVEEDGIRRLYVNSVKETGLASKKGLKAGDEILEINNRAADALNSSMLKDFLSQPSLGLLVRTYPELEEGVELLESPPHRVDGPADLGESPLAFLTSNPGHSLCSEQGSSAETAPEETEGPDLESSDETDHSSKSTEQVAAFCRSLHEMNPSDQSPSPQDSTGPQLATMRQLSDADKLRKVICELLETERTYVKDLNCLMERYLKPLQKETFLTQDELDVLFGNLTEMVEFQVEFLKTLEDGVRLVPDLEKLEKVDQFKKVLFSLGGSFLYYADRFKLYSAFCASHTKVPKVLVKAKTDTAFKAFLDAQNPKQQHSSTLESYLIKPIQRILKYPLLLRELFALTDAESEEHYHLDVAIKTMNKVASHINEMQKIHEEFGAVFDQLIAEQTGEKKEVADLSMGDLLLHTTVIWLNPPASLGKWKKEPELAAFVFKTAVVLVYKDGSKQKKKLVGSHRLSIYEDWDPFRFRHMIPTEALQVRALASADAEANAVCEIVHVKSESEGRPERVFHLCCSSPESRKDFLKAVHSILRDKHRRQLLKTESLPSSQQYVPFGGKRLCALKGARPAMSRAVSAPSKSLGRRRRRLARNRFTIDSDAVSASSPEKESQQPPGGGDTDRWVEEQFDLAQYEEQDDIKETDILSDDDEFCESVKGASVDRDLQERLQATSISQRERGRKTLDSHASRMAQLKKQAALSGINGGLESASEEVIWVRREDFAPSRKLNTEI

SEQ ID NO: 277184 - protein, 1071 aa, Artificial Sequence
  derived and/or modified sequence
METASFKKKRSKSADIWREDSLEFSLSDLSQEHLTSNEEILGSAEEKDCEEARGMETRASPRQLSTCQRANSLGDLYAQKNSGVTANGGPGSKFAGYCRNLVSDIPNLANHKMPPAAAEETPPYSNYNTLPCRKSHCLSEGATNPQISHSNSMQGRRAKTTQDVNAGEGSEFADSGIEGATTDTDLLSRRSNATNSSYSPTTGRAFVGSDSGSSSTGDAARQGVYENFRRELEMSTTNSESLEEAGSAHSDEQSSGTLSSPGQSDILLTAAQGTVRKAGALAVKNFLVHKKNKKVESATRRKWKHYWVSLKGCTLFFYESDGRSGIDHNSIPKHAVWVENSIVQAVPEHPKKDFVFCLSNSLGDAFLFQTTSQTELENWITAIHSACATAVARHHHKEDTLRLLKSEIKKLEQKIDMDEKMKKMGEMQLSSVTDSKKKKTILDQIFVWEQNLEQFQMDLFRFRCYLASLQGGELPNPKRLLAFASRPTKVAMGRLGIFSVSSFHALVAARTGETGVRRRTQAMSRSASKRRSRFSSLWGLDTTSKKKQGRPSINQVFGEGTEAVKKSLEGIFDDIVPDGKREKEVVLPNVHQHNPDCDIWVHEYFTPSWFCLPNNQPALTVVRPGDTARDTLELICKTHQLDHSAHYLRLKFLIENKMQLYVPQPEEDIYELLYKEIEICPKVTQSIHIEKSDTAADTYGFSLSSVEEDGIRRLYVNSVKETGLASKKGLKAGDEILEINNRAADALNSSMLKDFLSQPSLGLLVRTYPELEEGVELLESPPHRVDGPADLGESPLAFLTSNPGHSLCSEQGSSAETAPEETEGPDLESSDETDHSSKSTEQVAAFCRSLHEMNPSDQSPSPQDSTGPQLATMRQLSDADKLRKVICELLETERTYVKDLNCLMERYLKPLQKETFLTQDELDVLFGNLTEMVEFQVEFLKTLEDGVRLVPDLEKLEKVDQFKKVLFSLGGSFLYYADRFKLYSAFCAHKSSQGPGESQDRHGFQGILGCPEPEAAALIHAGVVPHQAHPEDPQVPTSAQGAVRPDRCGERGALPPGRGHQDHEQGCQSHQ

SEQ ID NO: 277185 - protein, 225 aa, Artificial Sequence
  derived and/or modified sequence
MGNAESQHVEHEFYGEKHASLGRKHTSRSLRLSHKTRRTRHASSGKVIHRNSEVSTRSSSTPSIPQSLAENGLEPFSQDGTLEDFGSPIWVDRVDMGLRPVSYTDSSVTPSVDSSIVLTAASVQSMPDTEESRLYGDDATYLAEGGRRQHSYTSNGPTFMETASFKKKRSKSADIWREDSLEFSLSDLSQEHLTSNEEILGSAEEKDCEEARGMETRASPRQLST

SEQ ID NO: 277186 - protein, 1531 aa, Artificial Sequence
  derived and/or modified sequence
MGNAESQHVEHEFYGEKHASLGRKHTSRSLRLSHKTRRTRHASSGKVIHRNSEVSTRSSSTPSIPQSLAENGLEPFSQDGTLEDFGSPIWVDRVDMGLRPVSYTDSSVTPSVDSSIVLTAASVQSMPDTEESRLYGDDATYLAEGGRRQHSYTSNGPTFMETASFKKKRSKSADIWREDSLEFSLSDLSQEHLTSNEEILGSAEEKDCEEARGMETRASPRQLSTCQRANSLGDLYAQKNSGVTANGGPGSKFAGYCRNLVSDIPNLANHKMPPAAAEETPPYSNYNTLPCRKSHCLSEGATNPQISHSNSMQGRRAKTTQDVNAGEGSEFADSGIEGATTDTDLLSRRSNATNSSYSPTTGRAFVGSDSGSSSTGDAARQGVYENFRRELEMSTTNSESLEEAGSAHSDEQSSGTLSSPGQSDILLTAAQGTVRKAGALAVKNFLVHKKNKKVESATRRKWKHYWVSLKGCTLFFYESDGRSGIDHNSIPKHAVWVENSIVQAVPEHPKKDFVFCLSNSLGDAFLFQTTSQTELENWITAIHSACATAVARHHHKEDTLRLLKSEIKKLEQKIDMDEKMKKMGEMQLSSVTDSKKKKTILDQIFVWEQNLEQFQMDLFRFRCYLASLQGGELPNPKRLLAFASRPTKVAMGRLGIFSVSSFHALVAARTGETGVRRRTQAMSRSASKRRSRFSSLWGLDTTSKKKQGRPSINQREKEVVLPNVHQHNPDCDIWVHEYFTPSWFCLPNNQPALTVVRPGDTARDTLELICKLYKEIEICPKVTQSIHIEKSDTAADTYGFSLSSVEEDGIRRLYVNSVKETGLASKKGLKAGDEILEINNRAADALNSSMLKDFLSQPSLGLLVRTYPELEEGVELLESPPHRVDGPADLGESPLAFLTSNPGHSLCSEQGSSAETAPEETEGPDLESSDETDHSSKSTEQVAAFCRSLHEMNPSDQSPSPQDSTGPQLATMRQLSDADKLRKVICELLETERTYVKDLNCLMERYLKPLQKETFLTQDELDVLFGNLTEMVEFQVEFLKTLEDGVRLVPDLEKLEKVDQFKKVLFSLGGSFLYYADRFKLYSAFCASHTKVPKVLVKAKTDTAFKAFLDAQNPKQQHSSTLESYLIKPIQRILKYPLLLRELFALTDAESEEHYHLDVAIKTMNKVASHINEMQKIHEEFGAVFDQLIAEQTGEKKEVADLSMGDLLLHTTVIWLNPPASLGKWKKEPELAAFVFKTAVVLVYKDGSKQKKKLVGSHRLSIYEDWDPFRFRHMIPTEALQVRALASADAEANAVCEIVHVKSESEGRPERVFHLCCSSPESRKDFLKAVHSILRDKHRRQLLKTESLPSSQQYVPFGGKRLCALKGARPAMSRAVSAPSKSLGRRRRRLARNRFTIDSDAVSASSPEKESQQPPGGGDTDRWVEEQFDLAQYEEQDDIKETDILSDDDEFCESVKGASVDRDLQERLQATSISQRERGRKTLDSHASRMAQLKKQAALSGINGGLESASEEVIWVRREDFAPSRKLNTEI

SEQ ID NO: 277187 - DNA, 4776 bp, Artificial Sequence
  derived and/or modified sequence
atgggcaacgccgagagccagcacgtggagcacgagttctacggcgagaagcacgccagcctgggcagaaagcacaccagcagaagcctgagactgagccacaagaccagaagaaccagacacgccagcagcggcaaggtgatccacagaaacagcgaggtgagcaccagaagcagcagcacccccagcatcccccagagcctggccgagaacggcctggagcccttcagccaggacggcaccctggaggacttcggcagccccatctgggtggacagagtggacatgggcctgagacccgtgagctacaccgacagcagcgtgacccccagcgtggacagcagcatcgtgctgaccgccgccagcgtgcagagcatgcccgacaccgaggagagcagactgtacggcgacgacgccacctacctggccgagggcggcagaagacagcacagctacaccagcaacggccccaccttcatggagaccgccagcttcaagaagaagagaagcaagagcgccgacatctggagagaggacagcctggagttcagcctgagcgacctgagccaggagcacctgaccagcaacgaggagatcctgggcagcgccgaggagaaggactgcgaggaggccagaggcatggagaccagagccagccccagacagctgagcacctgccagagagccaacagcctgggcgacctgtacgcccagaagaacagcggcgtgaccgccaacggcggccccggcagcaagttcgccggctactgcagaaacctggtgagcgacatccccaacctggccaaccacaagatgccccccgccgccgccgaggagacccccccctacagcaactacaacaccctgccctgcagaaagagccactgcctgagcgagggcgccaccaacccccagatcagccacagcaacagcatgcagggcagaagagccaagaccacccaggacgtgaacgccggcgagggcagcgagttcgccgacagcggcatcgagggcgccaccaccgacaccgacctgctgagcagaagaagcaacgccaccaacagcagctacagccccaccaccggcagagccttcgtgggcagcgacagcggcagcagcagcaccggcgacgccgccagacagggcgtgtacgagaacttcagaagagagctggagatgagcaccaccaacagcgagagcctggaggaggccggcagcgcccacagcgacgagcagagcagcggcaccctgagcagccccggccagagcgacatcctgctgaccgccgcccagggcaccgtgagaaaggccggcgccctggccgtgaagaacttcctggtgcacaagaagaacaagaaggtggagagcgccaccagaagaaagtggaagcactactgggtgagcctgaagggctgcaccctgttcttctacgagagcgacggcagaagcggcatcgaccacaacagcatccccaagcacgccgtgtgggtggagaacagcatcgtgcaggccgtgcccgagcaccccaagaaggacttcgtgttctgcctgagcaacagcctgggcgacgccttcctgttccagaccaccagccagaccgagctggagaactggatcaccgccatccacagcgcctgcgccaccgccgtggccagacaccaccacaaggaggacaccctgagactgctgaagagcgagatcaagaagctggagcagaagatcgacatggacgagaagatgaagaagatgggcgagatgcagctgagcagcgtgaccgacagcaagaagaagaagaccatcctggaccagatcttcgtgtgggagcagaacctggagcagttccagatggacctgttcagattcagatgctacctggccagcctgcagggcggcgagctgcccaaccccaagagactgctggccttcgccagcagacccaccaaggtggccatgggcagactgggcatcttcagcgtgagcagcttccacgccctggtggccgccagaaccggcgagaccggcgtgagaagaagaacccaggccatgagcagaagcgccagcaagagaagaagcagattcagcagcctgtggggcctggacaccaccagcaagaagaagcagggcagacccagcatcaaccaggtgttcggcgagggcaccgaggccgtgaagaagagcctggagggcatcttcgacgacatcgtgcccgacggcaagagagagaaggaggtggtgctgcccaacgtgcaccagcacaaccccgactgcgacatctgggtgcacgagtacttcacccccagctggttctgcctgcccaacaaccagcccgccctgaccgtggtgagacccggcgacaccgccagagacaccctggagctgatctgcaagacccaccagctggaccacagcgcccactacctgagactgaagttcctgatcgagaacaagatgcagctgtacgtgccccagcccgaggaggacatctacgagctgctgtacaaggagatcgagatctgccccaaggtgacccagagcatccacatcgagaagagcgacaccgccgccgacacctacggcttcagcctgagcagcgtggaggaggacggcatcagaagactgtacgtgaacagcgtgaaggagaccggcctggccagcaagaagggcctgaaggccggcgacgagatcctggagatcaacaacagagccgccgacgccctgaacagcagcatgctgaaggacttcctgagccagcccagcctgggcctgctggtgagaacctaccccgagctggaggagggcgtggagctgctggagagccccccccacagagtggacggccccgccgacctgggcgagagccccctggccttcctgaccagcaaccccggccacagcctgtgcagcgagcagggcagcagcgccgagaccgcccccgaggagaccgagggccccgacctggagagcagcgacgagaccgaccacagcagcaagagcaccgagcaggtggccgccttctgcagaagcctgcacgagatgaaccccagcgaccagagccccagcccccaggacagcaccggcccccagctggccaccatgagacagctgagcgacgccgacaagctgagaaaggtgatctgcgagctgctggagaccgagagaacctacgtgaaggacctgaactgcctgatggagagatacctgaagcccctgcagaaggagaccttcctgacccaggacgagctggacgtgctgttcggcaacctgaccgagatggtggagttccaggtggagttcctgaagaccctggaggacggcgtgagactggtgcccgacctggagaagctggagaaggtggaccagttcaagaaggtgctgttcagcctgggcggcagcttcctgtactacgccgacagattcaagctgtacagcgccttctgcgccagccacaccaaggtgcccaaggtgctggtgaaggccaagaccgacaccgccttcaaggccttcctggacgcccagaaccccaagcagcagcacagcagcaccctggagagctacctgatcaagcccatccagagaatcctgaagtaccccctgctgctgagagagctgttcgccctgaccgacgccgagagcgaggagcactaccacctggacgtggccatcaagaccatgaacaaggtggccagccacatcaacgagatgcagaagatccacgaggagttcggcgccgtgttcgaccagctgatcgccgagcagaccggcgagaagaaggaggtggccgacctgagcatgggcgacctgctgctgcacaccaccgtgatctggctgaacccccccgccagcctgggcaagtggaagaaggagcccgagctggccgccttcgtgttcaagaccgccgtggtgctggtgtacaaggacggcagcaagcagaagaagaagctggtgggcagccacagactgagcatctacgaggactgggaccccttcagattcagacacatgatccccaccgaggccctgcaggtgagagccctggccagcgccgacgccgaggccaacgccgtgtgcgagatcgtgcacgtgaagagcgagagcgagggcagacccgagagagtgttccacctgtgctgcagcagccccgagagcagaaaggacttcctgaaggccgtgcacagcatcctgagagacaagcacagaagacagctgctgaagaccgagagcctgcccagcagccagcagtacgtgcccttcggcggcaagagactgtgcgccctgaagggcgccagacccgccatgagcagagccgtgagcgcccccagcaagagcctgggcagaagaagaagaagactggccagaaacagattcaccatcgacagcgacgccgtgagcgccagcagccccgagaaggagagccagcagccccccggcggcggcgacaccgacagatgggtggaggagcagttcgacctggcccagtacgaggagcaggacgacatcaaggagaccgacatcctgagcgacgacgacgagttctgcgagagcgtgaagggcgccagcgtggacagagacctgcaggagagactgcaggccaccagcatcagccagagagagagaggcagaaagaccctggacagccacgccagcagaatggcccagctgaagaagcaggccgccctgagcggcatcaacggcggcctggagagcgccagcgaggaggtgatctgggtgagaagagaggacttcgcccccagcagaaagctgaacaccgagatctag

SEQ ID NO: 277188 - DNA, 4596 bp, Artificial Sequence
  derived and/or modified sequence
atgggcaacgccgagagccagcacgtggagcacgagttctacggcgagaagcacgccagcctgggcagaaagcacaccagcagaagcctgagactgagccacaagaccagaagaaccagacacgccagcagcggcaaggtgatccacagaaacagcgaggtgagcaccagaagcagcagcacccccagcatcccccagagcctggccgagaacggcctggagcccttcagccaggacggcaccctggaggacttcggcagccccatctgggtggacagagtggacatgggcctgagacccgtgagctacaccgacagcagcgtgacccccagcgtggacagcagcatcgtgctgaccgccgccagcgtgcagagcatgcccgacaccgaggagagcagactgtacggcgacgacgccacctacctggccgagggcggcagaagacagcacagctacaccagcaacggccccaccttcatggagaccgccagcttcaagaagaagagaagcaagagcgccgacatctggagagaggacagcctggagttcagcctgagcgacctgagccaggagcacctgaccagcaacgaggagatcctgggcagcgccgaggagaaggactgcgaggaggccagaggcatggagaccagagccagccccagacagctgagcacctgccagagagccaacagcctgggcgacctgtacgcccagaagaacagcggcgtgaccgccaacggcggccccggcagcaagttcgccggctactgcagaaacctggtgagcgacatccccaacctggccaaccacaagatgccccccgccgccgccgaggagacccccccctacagcaactacaacaccctgccctgcagaaagagccactgcctgagcgagggcgccaccaacccccagatcagccacagcaacagcatgcagggcagaagagccaagaccacccaggacgtgaacgccggcgagggcagcgagttcgccgacagcggcatcgagggcgccaccaccgacaccgacctgctgagcagaagaagcaacgccaccaacagcagctacagccccaccaccggcagagccttcgtgggcagcgacagcggcagcagcagcaccggcgacgccgccagacagggcgtgtacgagaacttcagaagagagctggagatgagcaccaccaacagcgagagcctggaggaggccggcagcgcccacagcgacgagcagagcagcggcaccctgagcagccccggccagagcgacatcctgctgaccgccgcccagggcaccgtgagaaaggccggcgccctggccgtgaagaacttcctggtgcacaagaagaacaagaaggtggagagcgccaccagaagaaagtggaagcactactgggtgagcctgaagggctgcaccctgttcttctacgagagcgacggcagaagcggcatcgaccacaacagcatccccaagcacgccgtgtgggtggagaacagcatcgtgcaggccgtgcccgagcaccccaagaaggacttcgtgttctgcctgagcaacagcctgggcgacgccttcctgttccagaccaccagccagaccgagctggagaactggatcaccgccatccacagcgcctgcgccaccgccgtggccagacaccaccacaaggaggacaccctgagactgctgaagagcgagatcaagaagctggagcagaagatcgacatggacgagaagatgaagaagatgggcgagatgcagctgagcagcgtgaccgacagcaagaagaagaagaccatcctggaccagatcttcgtgtgggagcagaacctggagcagttccagatggacctgttcagattcagatgctacctggccagcctgcagggcggcgagctgcccaaccccaagagactgctggccttcgccagcagacccaccaaggtggccatgggcagactgggcatcttcagcgtgagcagcttccacgccctggtggccgccagaaccggcgagaccggcgtgagaagaagaacccaggccatgagcagaagcgccagcaagagaagaagcagattcagcagcctgtggggcctggacaccaccagcaagaagaagcagggcagacccagcatcaaccagagagagaaggaggtggtgctgcccaacgtgcaccagcacaaccccgactgcgacatctgggtgcacgagtacttcacccccagctggttctgcctgcccaacaaccagcccgccctgaccgtggtgagacccggcgacaccgccagagacaccctggagctgatctgcaagctgtacaaggagatcgagatctgccccaaggtgacccagagcatccacatcgagaagagcgacaccgccgccgacacctacggcttcagcctgagcagcgtggaggaggacggcatcagaagactgtacgtgaacagcgtgaaggagaccggcctggccagcaagaagggcctgaaggccggcgacgagatcctggagatcaacaacagagccgccgacgccctgaacagcagcatgctgaaggacttcctgagccagcccagcctgggcctgctggtgagaacctaccccgagctggaggagggcgtggagctgctggagagccccccccacagagtggacggccccgccgacctgggcgagagccccctggccttcctgaccagcaaccccggccacagcctgtgcagcgagcagggcagcagcgccgagaccgcccccgaggagaccgagggccccgacctggagagcagcgacgagaccgaccacagcagcaagagcaccgagcaggtggccgccttctgcagaagcctgcacgagatgaaccccagcgaccagagccccagcccccaggacagcaccggcccccagctggccaccatgagacagctgagcgacgccgacaagctgagaaaggtgatctgcgagctgctggagaccgagagaacctacgtgaaggacctgaactgcctgatggagagatacctgaagcccctgcagaaggagaccttcctgacccaggacgagctggacgtgctgttcggcaacctgaccgagatggtggagttccaggtggagttcctgaagaccctggaggacggcgtgagactggtgcccgacctggagaagctggagaaggtggaccagttcaagaaggtgctgttcagcctgggcggcagcttcctgtactacgccgacagattcaagctgtacagcgccttctgcgccagccacaccaaggtgcccaaggtgctggtgaaggccaagaccgacaccgccttcaaggccttcctggacgcccagaaccccaagcagcagcacagcagcaccctggagagctacctgatcaagcccatccagagaatcctgaagtaccccctgctgctgagagagctgttcgccctgaccgacgccgagagcgaggagcactaccacctggacgtggccatcaagaccatgaacaaggtggccagccacatcaacgagatgcagaagatccacgaggagttcggcgccgtgttcgaccagctgatcgccgagcagaccggcgagaagaaggaggtggccgacctgagcatgggcgacctgctgctgcacaccaccgtgatctggctgaacccccccgccagcctgggcaagtggaagaaggagcccgagctggccgccttcgtgttcaagaccgccgtggtgctggtgtacaaggacggcagcaagcagaagaagaagctggtgggcagccacagactgagcatctacgaggactgggaccccttcagattcagacacatgatccccaccgaggccctgcaggtgagagccctggccagcgccgacgccgaggccaacgccgtgtgcgagatcgtgcacgtgaagagcgagagcgagggcagacccgagagagtgttccacctgtgctgcagcagccccgagagcagaaaggacttcctgaaggccgtgcacagcatcctgagagacaagcacagaagacagctgctgaagaccgagagcctgcccagcagccagcagtacgtgcccttcggcggcaagagactgtgcgccctgaagggcgccagacccgccatgagcagagccgtgagcgcccccagcaagagcctgggcagaagaagaagaagactggccagaaacagattcaccatcgacagcgacgccgtgagcgccagcagccccgagaaggagagccagcagccccccggcggcggcgacaccgacagatgggtggaggagcagttcgacctggcccagtacgaggagcaggacgacatcaaggagaccgacatcctgagcgacgacgacgagttctgcgagagcgtgaagggcgccagcgtggacagagacctgcaggagagactgcaggccaccagcatcagccagagagagagaggcagaaagaccctggacagccacgccagcagaatggcccagctgaagaagcaggccgccctgagcggcatcaacggcggcctggagagcgccagcgaggaggtgatctgggtgagaagagaggacttcgcccccagcagaaagctgaacaccgagatctag

SEQ ID NO: 277189 - DNA, 4776 bp, Artificial Sequence
  derived and/or modified sequence
atgggcaatgccgagagccagcatgtcgagcacgaattttatggggagaagcacgcctcgctcggtaggaagcatacttcaagatctctgagactgagccacaagactaggcgcacgaggcacgcttcttcaggaaaggtgatccataggaactccgaagtaagcactagatcttcaagcactccgtccatcccgcagagtctggcagaaaacggcctggaacccttttcacaggatggcacattggaggatttcggctctccaatatgggtggacagggttgatatggggcttaggccagtctcatacactgacagctcagtaacccctagcgtcgactcgagcatcgtgttaaccgccgcctccgtgcagtctatgccagacaccgaagagtctaggctgtacggtgatgacgcgacatatcttgcagagggagggcgaagacaacactcatacactagcaatggtcctactttcatggaaaccgcttcatttaagaagaaaagatcaaagtctgcagatatttggcgcgaggactcgctggaattctcccttagcgatttgagccaggagcacctgacttcgaacgaagagatactcggatccgccgaggaaaaggattgcgaagaagcccgggggatggagactcgcgcatcccccaggcagttgagcacctgtcaacgggcaaacagcctcggggacctgtacgcgcaaaaaaactctggagtcacagctaacggagggcctgggagtaaattcgcagggtactgccgcaaccttgtctcagatatccccaacctcgccaaccataagatgccgccagccgctgctgaggaaactcccccttatagtaactacaacactctgccctgtaggaagagtcactgcctgagcgagggcgcaaccaatcctcaaattagccactctaatagcatgcaaggacgccgggccaagaccacccaagacgtgaacgccggcgagggctctgagtttgcagatagtggtatcgaaggggctaccacagataccgatctcctgagccggagatccaacgcaactaactcttcctactccccaaccactggaagggcattcgtcggcagcgactccggtagttcctctacgggtgacgctgccaggcagggagtgtatgaaaacttccggagggagctggaaatgtctacaacgaatagtgagtcccttgaggaggctggctccgctcacagcgatgaacagagtagcgggacactgagctcccctgggcagtcagacattctgttgacggcagcgcagggtacggtgcgcaaggcgggggccctggctgttaaaaattttctcgtgcacaagaaaaataagaaagtcgaaagtgcaacaaggcgtaagtggaagcactattgggtgtccctgaagggatgcactctgtttttctatgagagcgatggccggtccgggattgatcataattcgattccaaagcacgcagtgtgggtcgaaaattcgatcgtgcaggctgtgcctgagcaccctaagaaagactttgtcttctgtctatcaaacagcctaggtgatgcgttccttttccagaccacctcccagaccgagctcgagaactggatcaccgccatccattccgcctgtgccactgcagtggccagacaccaccataaagaagatacgttacgcctactgaagtcagagataaaaaagctggaacagaagattgacatggatgaaaagatgaaaaaaatgggtgaaatgcagttaagcagtgtgactgatagcaaaaaaaaaaagacaatcttagaccagatcttcgtgtgggagcaaaatctggagcagtttcagatggacctttttagatttcgatgctacttggcgtccctgcaggggggcgagctgcccaaccccaagcggctgctggcatttgcctcaagaccaactaaggtggccatgggcagactgggcattttctccgtctcctccttccatgccctcgtcgcagcacggacaggggaaaccggagtccgccgccggacccaagccatgtctagatccgcatcgaagagaagaagccggttttctagtctctggggactggatactacaagcaaaaaaaagcagggacgccccagcataaatcaggtatttggcgaaggcacggaggcagttaaaaaatcccttgagggaatatttgacgacatagtacctgacggcaagagagagaaagaagttgtattgccaaacgtgcaccaacataatccagactgtgacatttgggtgcacgagtacttcacaccaagttggttttgcttgccaaacaaccaaccggccctgaccgtggttcggccgggcgacacagcaagggatactttagagcttatctgcaagacgcaccaactggaccactctgcgcattacttgcggctcaagttcctgattgagaataaaatgcagctgtacgtgcctcaacctgaggaggacatctacgaattgctgtataaggaaatagagatctgcccgaaggtgacccaatctatccacatagagaagtctgacacagctgctgacacctatggcttctctctgagctcagttgaagaagacgggatccgtcgcctttatgttaattctgttaaagagacaggactggcctctaaaaagggactgaaagctggcgatgaaatccttgaaattaataatcgggctgctgatgctctgaactcatcgatgcttaaagacttcctgagtcagccctctctcggtctactggttcgaacgtatcccgagctggaggaaggagtggaactgctggaatcccctccccaccgcgtggacggaccggcagacctgggtgaatctccactggctttcctcacctctaaccccggccactcgctctgttctgaacagggatcaagcgcggagacggcaccagaggagaccgaagggccagatctggaaagctccgacgaaacagaccacagctccaaatctactgagcaagtggctgctttctgtcggagtctgcacgaaatgaatccgagcgatcagagtcctagcccccaggattcaactggcccacaattggctacaatgcgacagctatctgatgcggataagctgagaaaagttatttgtgagctgttggaaacagaacgtacatacgtgaaagacttaaattgcctaatggaaagatatctgaagcccctccagaaggagaccttcctgacacaggacgaacttgacgtgctgttcggcaacctgacggagatggtcgaattccaggtggaattcctcaagaccctggaggacggcgtgcgcctggtgccagatctggagaaactggagaaggtggaccagtttaagaaagtgttgttttcacttgggggttcatttctttattacgcggacaggtttaaactgtactccgcattttgcgcctcgcatacgaaagtccccaaagttctcgtcaaggccaaaaccgacaccgcctttaaggcctttctggatgctcagaaccctaagcagcaacatagctcgacactggagtcctatctgatcaagccgatccagaggattttgaagtacccattgttgcttagggagctctttgccctaaccgatgcggaatcagaggagcactatcacctcgacgtggcaatcaagacaatgaacaaggtggctagtcacattaatgagatgcagaagatccacgaagagtttggcgctgtcttcgaccagctgatcgcggagcagaccggagaaaagaaagaagtggcagatctgtccatgggagatcttctgctccacaccacagttatatggctgaacccacctgcatctctcggaaagtggaagaaagaacctgaactggctgcattcgtctttaaaacggctgttgtgctcgtctacaaagatggctcgaagcagaagaagaaactggttggctcacaccgcctgagcatctatgaagattgggacccatttaggttccgacatatgatccctaccgaggctctgcaggtgagagccctggcatcagccgacgctgaggcgaacgcagtctgcgagattgtgcatgttaaaagtgaatccgagggcagacctgagcgtgtttttcacctgtgttgctcaagccccgaatcccgcaaggacttcttgaaggcggtgcattcaatcctccgggataagcaccgccgacagctcctcaagacagagagtttaccatctagccagcaatacgtcccattcggcggcaagcgactgtgcgctctcaagggcgcaaggccagccatgagtagggccgtgagcgcgccatcaaaatcgctgggcagacgtcggcgccgcctggcacgaaatcgctttacaattgattctgacgcagtcagcgccagcagccccgagaaggagtcccagcagccacctggtggaggcgataccgacaggtgggtggaggagcaattcgacttagcccagtatgaggaacaggacgatatcaaggaaacggacatcctgtcggatgatgatgagttttgcgagtcagtaaagggggctagcgtggatcgagatctgcaggagcgccttcaggcaacgtccatttctcagagggagcggggcaggaaaactcttgatagtcacgcttcgcgcatggcccaactgaagaaacaggccgcactgtctggtatcaacggtggcctagaatctgcatcagaagaagtcatatgggtgcggagggaagatttcgctccctcgcgtaagctcaatactgaaatctag

SEQ ID NO: 277190 - DNA, 4596 bp, Artificial Sequence
  derived and/or modified sequence
atgggaaacgcggaatctcagcacgtagaacacgagttttatggggagaaacatgcctctttagggaggaagcacacttcccgatctcttaggctgtcccataaaacacgaaggaccagacatgccagttctggaaaggttattcacaggaactctgaggtatccacccgtagctcctctactccctctatcccccagtccttagccgaaaacggactagagccgttctcccaggacggcactctggaggattttggtagccctatttgggtcgacagagtcgatatgggactgcggccagtgtcgtacaccgatagtagcgtcacgccttccgtggactctagcatagtgctaacggccgcgtcagtacaatccatgcctgacaccgaggagtcccggctgtatggggacgatgcgacatacttggccgagggagggagacgacaacattcctacacctcgaacggtccaacatttatggaaactgcctctttcaagaaaaaaagatcaaaatctgccgatatttggcgtgaggattcactggaattcagtctgagtgacttgtcacaagaacatcttacgagtaacgaagagatcttggggagcgcagaagaaaaggactgcgaggaggccagagggatggaaacaagagcctcaccacgccaactttccacttgccagcgtgctaattctcttggcgacctttacgcacaaaaaaattccggcgtaacagccaatggcgggcctgggtcaaagttcgcggggtattgcaggaacttagtgtccgatatcccgaacctcgcaaatcacaaaatgcctccagctgccgccgaggagacaccgccgtattccaattacaacactcttccgtgtagaaagtcacactgtttgagcgaaggcgctactaaccctcagatctctcattcaaatagcatgcaaggccgcagagccaagacaacccaagatgtcaatgccggggaagggagcgaatttgctgacagtggcatagaaggcgcaaccaccgatactgacttacttagtagaaggagcaacgcaaccaattcatcttatagccccactacgggcagagcctttgttgggagtgactcgggaagctcctccactggcgatgccgcccgccagggcgtctatgaaaattttcgccgggaactggagatgtcaaccaccaatagtgagtccctcgaggaagccggcagcgcccactctgacgaacagagctctggaacactctcaagtccaggtcagtcagatatcttattaacagccgcccagggtaccgttaggaaggccggggccctcgccgtgaagaattttctcgtacataagaagaataagaaagtggaaagcgcaacccggcgaaagtggaaacactactgggtaagcctgaaagggtgcaccctgttcttttatgagtccgacggtcgcagcggcatcgaccacaactcgataccaaagcacgccgtgtgggtggagaacagcatcgtgcaggccgtgcccgagcaccccaaaaaagattttgtgttctgcttaagtaattccctgggggatgctttcctcttccaaaccacaagtcagacggaacttgagaactggatcacagcaattcactctgcatgcgccacagcggtggcacggcatcaccataaagaggacacccttcgactactcaagtctgagattaaaaagctcgagcagaagattgatatggacgaaaagatgaaaaagatgggagaaatgcaactgtcctctgtgactgattccaaaaagaaaaaaacaatcttggaccagatttttgtctgggagcagaacctcgaacagttccaaatggatttgtttcggttcagatgttacctggcatctcttcaaggtggggaattgcctaatcccaagcgtctgctggcttttgccagcaggccgactaaggtagccatggggcgactcggcatcttttcagtctcatcctttcacgctttggtggccgcccggactggagagaccggagtgagaagaagaacacaggcaatgtctcgatcggcctctaaacgtagatcccggttctcgagcttgtgggggctggacacaacttcgaagaaaaaacagggccggccatcaatcaatcagcgagagaaagaggtcgttctgcccaacgtgcatcagcataatcctgactgtgacatctgggtccatgaatactttactccaagttggttctgtctccccaataatcagcccgcactcactgtggtaaggcccggcgataccgctcgcgatacgctcgagctgatctgtaaactgtacaaagaaattgaaatctgccccaaagtcactcagtccatccacatcgaaaagagcgacacggcagccgatacatacggcttttccttaagcagcgtggaggaggacggaatcagaagactatacgtgaatagcgtcaaagaaactggtctggcgtccaagaagggccttaaggccggagacgaaatcttggaaattaacaatcgggcagccgatgcattgaattcttcaatgctgaaggactttctgagccagcctagcttgggactgttagtgagaacctatccggaactcgaggagggtgtggagttactggagagcccccctcaccgggtggacggcccagctgacctgggtgagagtcctctggctttcctgacgtccaacccgggccattctttatgcagcgaacagggcagttcagcggagacggcccccgaagaaaccgaaggtcctgacctggagtcctctgatgagaccgaccacagttctaaatcaacagaacaggttgccgcattctgcaggagtcttcatgaaatgaatcctagtgatcagagcccatcacctcaagatagtacagggcctcaactggcaactatgcgccagctgtctgatgcggacaaattaagaaaggtcatttgcgagctgctggaaacggaacggacctatgtgaaggatctgaactgtttaatggagcgctatctgaaacccctccaaaaagaaactttcctgactcaggacgaactggatgtgctcttcgggaacctcaccgagatggtagagtttcaggtggagtttctgaagaccctggaggacggtgttcggctggtcccagacctcgagaaactcgagaaagtggatcagtttaaaaaagttttattctccctcggcggctcatttctgtactacgctgacaggtttaagctgtactcggcattttgcgcttctcataccaaggttccaaaggttctcgtgaaggccaagacagataccgcttttaaagcatttctcgacgcccagaatcccaagcaacagcactcatccaccttggagtcctatttgatcaagccaatacagcgcattctgaagtatccactgctgctgagagagttattcgccctcaccgatgcagaaagtgaggagcactaccatctggacgttgccatcaaaaccatgaacaaggtagccagccatatcaatgaaatgcagaaaatccatgaggagttcggggccgtgttcgaccagttgattgctgagcagacgggagaaaagaaagaggtcgccgatttgtctatgggggatctgctgctgcacacaacggtgatctggttgaatcctccagctagcttgggaaagtggaaaaaggagcctgagctggcagcattcgttttcaagacagccgtcgtcttggtgtacaaggacggcagtaaacagaagaaaaagttagtcgggagccacagactctccatttatgaggattgggacccatttcgctttagacacatgatccctacggaagcgctgcaggtgagagctctggccagcgccgatgcagaagctaacgccgtctgtgaaatcgttcacgttaagagcgaatccgagggtcgccccgaaagagtgttccacctgtgctgctcatcccctgaatcacgaaaggattttctcaaagccgtgcactccatcctgagagacaaacatcgtagacagcttctcaagacagagtcactcccaagctcccagcagtacgtgccattcggtggaaaaagactctgtgccctgaagggggcgcgacccgccatgtctagagcggtgagtgctccatcgaagtctcttggcagaagaaggagacgcctggcaagaaaccggttcaccatagactctgacgcagtgtcagccagctcacccgagaaggagtcccaacagccacctggtggaggcgatacagatcggtgggtggaggagcaattcgatttggcccagtacgaagaacaagatgacataaaggagactgatatactgagcgacgatgatgagttctgtgagtctgtgaagggcgcatctgtggaccgcgacctccaagagcgactacaagctacaagcatttctcagcgggagcgcggcagaaagacactcgattctcatgcttctcgaatggctcagttgaaaaagcaagccgctctgtccgggataaatggcggattagagtcagcatctgaggaagtgatttgggtaaggagggaagattttgctccctctcgcaagttgaacaccgaaatttag

SEQ ID NO: 277191 - DNA, 4776 bp, Artificial Sequence
  derived and/or modified sequence
atgggaaatgctgagagccagcacgtggagcacgagttctacggggagaagcacgccagcctgggcaggaagcacaccagccgcagcctgcggctgagccacaagaccaggaggaccaggcatgccagcagcggcaaggtgatccacaggaacagcgaggtgtccaccaggagcagcagcacccccagcatcccccagagcctggccgagaatggcctggagcccttcagccaggacggcaccctggaggactttggcagccccatctgggtggacagagtggacatgggcctgcggcctgtgtcctacacagacagctctgtgaccccatctgtggacagcagcatcgtgctgacagctgcctctgtgcagagcatgccagacacagaggagagccggctgtatggagatgatgccacctacctggccgagggcggccggcggcagcacagctacaccagcaatggccccaccttcatggagacagccagcttcaagaagaagaggagcaagtctgctgacatctggagggaggacagcctggagttcagcctgagtgacctgagccaggagcacctgaccagcaatgaggagatcctgggcagcgctgaggagaaggactgtgaggaggcccggggcatggagacccgggccagcccccggcagctgagcacctgccagagggccaacagcctgggggacctgtatgcccagaagaacagcggcgtgacagccaacggcggccctggcagcaagtttgctggctactgcaggaacctggtgtctgacatccccaacctggccaaccacaagatgcctcctgctgctgctgaggagaccccaccctacagcaactacaacaccctgccctgcaggaagagccactgcctgtctgagggcgccaccaacccccagatcagccacagcaacagcatgcagggcagaagagccaagaccacccaggatgtgaatgctggggagggcagcgagtttgctgacagcggcatcgagggcgccaccacagacacagacctgctgagccgccgcagcaatgccaccaacagcagctacagccccaccaccggccgggcctttgtgggcagtgacagcggcagcagcagcactggagatgctgcccggcagggcgtgtatgagaacttccggcgggagctggagatgagcaccaccaacagcgagagcctggaggaggccggcagcgcccacagtgatgagcagagcagcggcaccctgagcagccctggccagagcgacatcctgctgacagctgcccagggcaccgtgaggaaggccggggccctggccgtgaagaacttcctggtgcacaagaagaacaagaaggtggagagcgccaccaggaggaagtggaagcactactgggtgtccctgaagggctgcaccctcttcttctatgaaagtgatggccgctctggaattgaccacaacagcatccccaagcatgctgtgtgggtggagaacagcatcgtgcaggccgtgcctgagcaccccaagaaggactttgtgttctgcctgagcaacagcctgggagatgccttcctgttccagaccaccagccagacagagctggagaactggatcacagccatccacagcgcctgtgccacagctgtggcccggcaccaccacaaggaggacaccctgcggctgctgaagtctgagatcaagaagctggagcagaagattgacatggatgagaagatgaagaagatgggagagatgcagctgagctctgtgacagacagcaagaagaagaagaccatcctggaccagatctttgtgtgggagcagaacctggagcagttccagatggacctcttccgcttccgctgctacctggccagcctgcagggcggggagctgcccaaccccaagaggctgctggcctttgccagccggcccaccaaggtggccatgggccgcctgggcatcttctctgtgtcctccttccacgccctggtggccgccaggactggagaaacaggagtgagaagaaggacccaggccatgagccgcagcgccagcaagagaagaagccgcttcagcagcctgtggggcctggacaccaccagcaagaagaagcagggccggcccagcatcaaccaggtgtttggagagggcacagaggccgtgaagaagagcctggagggcatctttgatgacatcgtgcctgatggcaagcgggagaaggaggtggtgctgcccaacgtgcaccagcacaacccagactgtgacatctgggtgcatgagtacttcacccccagctggttctgcctgcccaacaaccagcctgccctgactgtggtgcggcctggggacacagcccgggacaccctggagctgatctgcaagacccaccagctggaccacagcgcccactacctgcggctgaagttcctgattgagaacaagatgcagctgtatgtgccccagcctgaggaggacatctatgagctgctgtacaaggagattgagatctgccccaaggtgacccagagcatccacatcgagaagagtgacacagctgctgacacctacggcttcagcctgagctctgtggaggaggatggcatccggcggctgtatgtgaacagcgtgaaggagaccggcctggccagcaagaagggcctgaaggctggagatgagatcctggagatcaacaacagagctgctgatgccctgaacagctccatgctgaaggacttcctgagccagcccagcctgggcctgctggtgaggacctacccagagctggaggagggcgtggagctgctggagagccccccccaccgggtggatggccctgctgacctgggggagagccccctggccttcctgaccagcaaccctggccacagcctgtgcagcgagcagggcagcagcgctgagacagcccctgaggagacagagggccctgacctggagagcagtgatgaaacagaccacagcagcaagagcacagagcaggtggccgccttctgccgcagcctgcacgagatgaaccccagcgaccagagccccagcccccaggacagcacaggcccccagctggccaccatgaggcagctgagtgatgctgacaagctgaggaaggtgatctgtgagctgctggagacagagaggacctacgtgaaggacctgaactgcctgatggagcgctacctgaagcccctgcagaaggagaccttcctgacccaggatgagctggatgtgctgtttggaaacctgacagagatggtggagttccaggtggagttcctgaagaccctggaggatggagtgcggctggtgcctgacctggagaagctggagaaggtggaccagttcaagaaggtgctcttcagcctgggcggcagcttcctgtactatgctgaccgcttcaagctgtacagcgccttctgtgccagccacaccaaggtgcccaaggtgctggtgaaggccaagacagacacagccttcaaggccttcctggatgcccagaaccccaagcagcagcacagcagcaccctggagagctacctgatcaagcccatccagaggatcctgaagtaccccctgctgctgcgggagctgtttgccctgacagatgctgagagcgaggagcactaccacctggatgtggccatcaagaccatgaacaaggtggccagccacatcaatgagatgcagaagatccacgaggagtttggagctgtgtttgaccagctgattgctgagcagacaggagagaagaaggaggtggccgacctgtccatgggagacctgctgctgcacaccaccgtcatctggctgaaccccccagccagcctgggcaagtggaagaaggagcctgagctggccgcctttgtgttcaagacagctgtggtgctggtgtacaaggatggcagcaagcagaagaagaagctggtgggcagccaccggctgagcatctatgaggactgggaccccttccgcttccgccacatgatccccacagaggccctgcaggtgcgggccctggccagcgcagatgctgaggccaatgctgtgtgtgagatcgtgcacgtgaagtctgagagcgagggccggcctgagagggtcttccacctgtgctgcagcagccctgagagcaggaaggacttcctgaaggctgtgcacagcatcctgcgggacaagcaccggcggcagctgctgaagacagagagcctgcccagcagccagcagtatgtgccctttggaggcaagaggctgtgtgccctgaagggggcccggcctgccatgagcagagctgtgtctgcccccagcaagagcctgggcagaagaagaagaaggctggccaggaaccgcttcaccatcgacagtgatgctgtgtctgccagcagccctgagaaggagagccagcagcccccaggcggcggggacacagaccgctgggtggaggagcagtttgacctggcccagtatgaggagcaggatgacatcaaggagacagacatcctgagtgatgatgatgagttctgtgagagcgtgaagggggcctctgtggaccgggacctgcaggagcggctgcaggccaccagcatcagccagcgggagcggggcaggaagaccctggacagccacgccagcaggatggcccagctgaagaagcaggccgccctgagcggcatcaatggaggcctggagagcgccagcgaggaggtgatctgggtgagaagagaagattttgcccccagcaggaagctgaacacagagatctag

SEQ ID NO: 277192 - DNA, 4596 bp, Artificial Sequence
  derived and/or modified sequence
atgggaaatgctgagagccagcacgtggagcacgagttctacggggagaagcacgccagcctgggcaggaagcacaccagccgcagcctgcggctgagccacaagaccaggaggaccaggcatgccagcagcggcaaggtgatccacaggaacagcgaggtgtccaccaggagcagcagcacccccagcatcccccagagcctggccgagaatggcctggagcccttcagccaggacggcaccctggaggactttggcagccccatctgggtggacagagtggacatgggcctgcggcctgtgtcctacacagacagctctgtgaccccatctgtggacagcagcatcgtgctgacagctgcctctgtgcagagcatgccagacacagaggagagccggctgtatggagatgatgccacctacctggccgagggcggccggcggcagcacagctacaccagcaatggccccaccttcatggagacagccagcttcaagaagaagaggagcaagtctgctgacatctggagggaggacagcctggagttcagcctgagtgacctgagccaggagcacctgaccagcaatgaggagatcctgggcagcgctgaggagaaggactgtgaggaggcccggggcatggagacccgggccagcccccggcagctgagcacctgccagagggccaacagcctgggggacctgtatgcccagaagaacagcggcgtgacagccaacggcggccctggcagcaagtttgctggctactgcaggaacctggtgtctgacatccccaacctggccaaccacaagatgcctcctgctgctgctgaggagaccccaccctacagcaactacaacaccctgccctgcaggaagagccactgcctgtctgagggcgccaccaacccccagatcagccacagcaacagcatgcagggcagaagagccaagaccacccaggatgtgaatgctggggagggcagcgagtttgctgacagcggcatcgagggcgccaccacagacacagacctgctgagccgccgcagcaatgccaccaacagcagctacagccccaccaccggccgggcctttgtgggcagtgacagcggcagcagcagcactggagatgctgcccggcagggcgtgtatgagaacttccggcgggagctggagatgagcaccaccaacagcgagagcctggaggaggccggcagcgcccacagtgatgagcagagcagcggcaccctgagcagccctggccagagcgacatcctgctgacagctgcccagggcaccgtgaggaaggccggggccctggccgtgaagaacttcctggtgcacaagaagaacaagaaggtggagagcgccaccaggaggaagtggaagcactactgggtgtccctgaagggctgcaccctcttcttctatgaaagtgatggccgctctggaattgaccacaacagcatccccaagcatgctgtgtgggtggagaacagcatcgtgcaggccgtgcctgagcaccccaagaaggactttgtgttctgcctgagcaacagcctgggagatgccttcctgttccagaccaccagccagacagagctggagaactggatcacagccatccacagcgcctgtgccacagctgtggcccggcaccaccacaaggaggacaccctgcggctgctgaagtctgagatcaagaagctggagcagaagattgacatggatgagaagatgaagaagatgggagagatgcagctgagctctgtgacagacagcaagaagaagaagaccatcctggaccagatctttgtgtgggagcagaacctggagcagttccagatggacctcttccgcttccgctgctacctggccagcctgcagggcggggagctgcccaaccccaagaggctgctggcctttgccagccggcccaccaaggtggccatgggccgcctgggcatcttctctgtgtcctccttccacgccctggtggccgccaggactggagaaacaggagtgagaagaaggacccaggccatgagccgcagcgccagcaagagaagaagccgcttcagcagcctgtggggcctggacaccaccagcaagaagaagcagggccggcccagcatcaaccagcgggagaaggaggtggtgctgcccaacgtgcaccagcacaacccagactgtgacatctgggtgcatgagtacttcacccccagctggttctgcctgcccaacaaccagcctgccctgactgtggtgcggcctggggacacagcccgggacaccctggagctgatctgcaagctgtacaaggagattgagatctgccccaaggtgacccagagcatccacatcgagaagagtgacacagctgctgacacctacggcttcagcctgagctctgtggaggaggatggcatccggcggctgtatgtgaacagcgtgaaggagaccggcctggccagcaagaagggcctgaaggctggagatgagatcctggagatcaacaacagagctgctgatgccctgaacagctccatgctgaaggacttcctgagccagcccagcctgggcctgctggtgaggacctacccagagctggaggagggcgtggagctgctggagagccccccccaccgggtggatggccctgctgacctgggggagagccccctggccttcctgaccagcaaccctggccacagcctgtgcagcgagcagggcagcagcgctgagacagcccctgaggagacagagggccctgacctggagagcagtgatgaaacagaccacagcagcaagagcacagagcaggtggccgccttctgccgcagcctgcacgagatgaaccccagcgaccagagccccagcccccaggacagcacaggcccccagctggccaccatgaggcagctgagtgatgctgacaagctgaggaaggtgatctgtgagctgctggagacagagaggacctacgtgaaggacctgaactgcctgatggagcgctacctgaagcccctgcagaaggagaccttcctgacccaggatgagctggatgtgctgtttggaaacctgacagagatggtggagttccaggtggagttcctgaagaccctggaggatggagtgcggctggtgcctgacctggagaagctggagaaggtggaccagttcaagaaggtgctcttcagcctgggcggcagcttcctgtactatgctgaccgcttcaagctgtacagcgccttctgtgccagccacaccaaggtgcccaaggtgctggtgaaggccaagacagacacagccttcaaggccttcctggatgcccagaaccccaagcagcagcacagcagcaccctggagagctacctgatcaagcccatccagaggatcctgaagtaccccctgctgctgcgggagctgtttgccctgacagatgctgagagcgaggagcactaccacctggatgtggccatcaagaccatgaacaaggtggccagccacatcaatgagatgcagaagatccacgaggagtttggagctgtgtttgaccagctgattgctgagcagacaggagagaagaaggaggtggccgacctgtccatgggagacctgctgctgcacaccaccgtcatctggctgaaccccccagccagcctgggcaagtggaagaaggagcctgagctggccgcctttgtgttcaagacagctgtggtgctggtgtacaaggatggcagcaagcagaagaagaagctggtgggcagccaccggctgagcatctatgaggactgggaccccttccgcttccgccacatgatccccacagaggccctgcaggtgcgggccctggccagcgcagatgctgaggccaatgctgtgtgtgagatcgtgcacgtgaagtctgagagcgagggccggcctgagagggtcttccacctgtgctgcagcagccctgagagcaggaaggacttcctgaaggctgtgcacagcatcctgcgggacaagcaccggcggcagctgctgaagacagagagcctgcccagcagccagcagtatgtgccctttggaggcaagaggctgtgtgccctgaagggggcccggcctgccatgagcagagctgtgtctgcccccagcaagagcctgggcagaagaagaagaaggctggccaggaaccgcttcaccatcgacagtgatgctgtgtctgccagcagccctgagaaggagagccagcagcccccaggcggcggggacacagaccgctgggtggaggagcagtttgacctggcccagtatgaggagcaggatgacatcaaggagacagacatcctgagtgatgatgatgagttctgtgagagcgtgaagggggcctctgtggaccgggacctgcaggagcggctgcaggccaccagcatcagccagcgggagcggggcaggaagaccctggacagccacgccagcaggatggcccagctgaagaagcaggccgccctgagcggcatcaatggaggcctggagagcgccagcgaggaggtgatctgggtgagaagagaagattttgcccccagcaggaagctgaacacagagatctag

SEQ ID NO: 277193 - DNA, 4776 bp, Artificial Sequence
  derived and/or modified sequence
atgggcaacgccgagagccagcacgtggagcacgagttctacggcgagaagcatgcttcgctgggcagaaaacacacatcccgatctctgcgtttgtcgcacaagaccaggcggactagacatgcatcctctggaaaggtcatacacagaaatagtgaagtcagtacccgctcaagcagcacacccagcatcccccagagtctggcagagaatgggctcgagcctttctcacaggatggcacgctggaagactttggatcccctatctgggtagacagagtggatatggggctccgtccggtgagttacaccgactcttctgtgacaccttccgtagatagttcaatcgtgctcaccgcagcgagtgtccagtccatgcctgacactgaggagtctagattatacggcgatgatgctacctacctggccgaaggcggccgcagacagcactcttacacctctaacgggcctacctttatggaaaccgcatccttcaaaaagaaaagaagtaagtcggcggacatctggcgggaagattctctggaattctccttaagcgacctgtctcaggagcacctaacaagcaatgaagagattttgggttccgctgaagaaaaagattgtgaggaggcccgtggcatggaaacaagagccagccccagacagctgtccacttgtcaaagagctaatagtctaggcgacttatacgcccagaagaactctggtgtcaccgccaacggcgggccagggtccaaatttgcagggtactgccgaaaccttgtgtccgatattccgaacctggctaatcacaagatgccccctgcagccgcagaggaaacgcctccttatagcaactataataccctgccctgtcgcaaaagccattgcctctcagaaggagccaccaacccccagatttctcactcaaactcgatgcaaggccgacgcgcaaaaactacccaggatgtgaatgctggcgagggtagtgaattcgccgacagtggcatagagggagcaaccacagacaccgacctgctcagtcggcgaagcaacgcaaccaatagctcctactcaccaactactggaagggcgtttgtgggatctgatagtggttctagttctaccggcgacgctgcgagacaaggagtgtatgaaaacttccgccgggagctggaaatgtccaccactaactccgaatcactcgaagaggctgggagcgcacactccgatgaacaatcatccggtacgctgtcatccccaggccaatcagacatcctcctgaccgctgcacaggggaccgtgcgcaaggcgggggcgctggccgttaagaatttcctggtgcataagaaaaacaagaaagtcgaaagcgccaccagacgaaaatggaagcattattgggtaagcctcaagggatgtaccttattcttctacgagagtgacggaaggagtgggattgatcacaattccatcccgaagcatgccgtgtgggtcgagaactccatcgtccaggctgtgccagaacaccctaagaaggatttcgtgttttgtctgtcaaacagtcttggagatgcatttttgtttcaaaccacatcgcagaccgagttggaaaactggatcaccgccattcactccgcgtgcgccactgccgtcgcgcgtcatcaccacaaggaggacacgcttaggctgctgaaatcagagatcaagaaactcgagcaaaaaatcgatatggacgagaagatgaagaagatgggggagatgcagctttcgtccgtaaccgatagtaagaagaagaagacgattttagatcagatctttgtgtgggagcagaacctggagcagttccaaatggacctgtttcgcttcaggtgttatctagcctccctgcaaggcggcgagttgccgaaccctaagcgcctcttagcattcgcctctcgtccgaccaaggtggcgatgggcagactcggcatcttttctgtttctagctttcacgctctggtggcagcacgcaccggcgagaccggggtacggagacgaacccaggccatgagtagatccgcatctaagagacgtagcaggttctcatcactctggggccttgataccacatcgaagaaaaaacaggggaggccgagtattaaccaagtattcggggaaggaactgaggccgttaagaagtccttggagggcatctttgatgatatcgttcccgatggcaaaagagaaaaagaggtggtgttgccaaatgtgcaccaacacaatccagactgcgatatctgggtgcatgagtattttacacccagttggttctgtttgccaaacaaccaacccgctttgaccgtagtgcggcccggcgacaccgctcgcgatacactcgaactgatatgcaaaacccaccagttggaccactccgcacattatttgcgtctgaagttcttaatcgaaaacaagatgcagctgtatgtgcctcagccagaggaagatatttacgaactattgtataaagagatcgagatttgcccaaaagtgactcagtcaattcacatagagaaatctgacaccgcggctgatacctacggcttttcgctcagtagcgtggaggaagatggcatcagacgtctctacgtaaactccgttaaggagacaggattagccagcaaaaagggtctgaaggcgggggacgaaatcctggagatcaataaccgggccgcggatgctctgaactcttccatgctgaaggactttttatcgcagcccagtctaggactgctggtcaggacttaccctgaactagaggagggagttgagctgctcgagtcacctccgcatcgcgtggatggtccagccgacctcggagaatctcccctggcatttctgacaagtaatccaggccatagtctatgctcagagcaaggatctagcgcagagacggctccggaggagactgaaggccccgacctggaaagctcagatgaaacagatcacagctctaaatcaactgagcaggtggccgcgttctgccgatcattacatgaaatgaatcccagtgaccagagtccgtcgccccaggatagcaccggcccccagttggccacaatgaggcagctgtccgacgctgacaaactaaggaaagtcatctgcgagctactggaaacggagagaacatacgtgaaagatttgaactgtctgatggaacgctacctgaagccgcttcagaaagaaacatttctcacacaggatgagctagatgtgctcttcggcaatctaactgagatggtggaatttcaggttgagttcttaaagacactggaggacggagtgcggctagtgccagatcttgagaaattggagaaggtggaccaatttaagaaagtactgttctcactcgggggaagcttcctctactatgcagatagattcaagttgtatagtgctttttgcgcctctcatacgaaggtgcccaaggtactggtgaaggctaagaccgataccgcttttaaagcctttctcgacgcccagaaccccaaacagcagcatagttctaccctcgagagttacttaattaagcccatccagcggatcctgaaatatccccttctgctgcgagagctgtttgccctgacggacgctgaatccgaggagcattaccatttggatgtggccattaaaaccatgaataaggtcgcctcacacattaacgaaatgcagaagatccacgaggagtttggcgccgttttcgaccaactgatcgcagagcagactggagaaaaaaaggaggttgccgatctctctatgggcgacctcctcttgcacaccaccgtaatttggctcaacccgcccgcatccctaggaaagtggaagaaagaacctgagctggcagcgttcgtgttcaaaacagcagttgtgttggtctataaagatggttccaagcagaagaaaaaattggtgggatcccatcgtctgtccatctacgaggactgggatccatttcggtttagacatatgatacctacagaagccttacaggtacgggctctcgctagcgccgatgccgaagctaatgctgtctgcgaaatcgtgcatgtgaaatccgaatctgaggggcgccctgaacgggtatttcacttatgttgttcatcacccgaaagtcgcaaagactttcttaaggctgtacattctatcctgagggataagcacaggagacagctgttgaagaccgagtcattacccagctctcagcaatatgtcccgtttgggggtaagcgactgtgtgctctcaagggggcccggccagccatgagcagagccgtgtcagctccaagtaaatccctgggcaggaggcgacgtagactggcacggaaccgcttcacgattgattccgatgcggtcagcgcctctagccctgaaaaggagtctcagcaaccgcccggtgggggagatacagaccgctgggtcgaggagcagttcgacctggcccagtacgaggaacaggacgatattaaggagaccgatatcctctcagacgacgacgaattttgtgaatcagtcaaaggtgcctcggttgaccgggatttgcaggagcgcctgcaggcaactagtatctcccagagagagcgcgggcgcaagacactcgacagccacgcttctaggatggctcaacttaagaaacaggctgctctgtctggaatcaacgggggcttggaaagtgcttcagaagaggtgatttgggtgcggcgagaagatttcgcccccagtaggaaactgaacacggaaatttag

SEQ ID NO: 277194 - DNA, 4596 bp, Artificial Sequence
  derived and/or modified sequence
atgggcaacgccgagagccagcacgtggagcacgagttctacggcgaaaagcacgcctcactggggaggaagcacacttctaggagtttgagattgagccataaaaccaggaggacacgacatgcctcctcaggcaaagtcattcacaggaattctgaagtgagcacccgcagtagttcaaccccatccattccacaatcacttgcggagaatgggcttgaaccattttcccaagatggcaccctggaggacttcgggtcacctatttgggtggatagggtggatatgggactacgccccgtgtcttataccgattcttccgtcacccccagcgttgactcatcaattgtcctgacggcagcctctgtccagagcatgccagatacagaggagtcccgcctgtacggagatgacgccacttacctggccgaagggggaaggaggcaacactcttacacgtcaaatggaccaacctttatggaaaccgcgagtttcaaaaaaaagagaagcaagagtgcagacatctggagggaggactctctcgaattctcactttcagatctctcacaagaacacctgactagcaatgaagagatcctgggaagcgccgaggaaaaggactgcgaggaggcgagaggaatggagactcgggcctcgcctagacagctctccacgtgtcagcgggctaatagcttaggcgatctgtatgcacaaaagaactccggagttactgccaacggtggccccggcagtaagtttgctgggtactgtcgtaatcttgtgtcagacatcccaaacctggccaaccacaaaatgccacccgctgccgccgaggagacacccccttacagcaactacaatacactgccctgtcgcaagtcccattgcttgagcgaaggtgccacgaacccccagataagccacagcaactctatgcaggggaggcgcgccaaaacaacacaggatgttaacgccggcgaaggctctgaatttgcagattccgggattgagggcgcaactacggacacagatctcctgtctcggcggtcaaacgctactaacagttcctacagtcccacaacaggcagagcatttgtaggctcagactctgggtctagctccaccggtgatgctgcaagacagggtgtgtacgagaacttccggcgagaactagagatgtcaactactaactcggagagcctggaggaagccgggagcgctcacagtgacgaacagagttcgggtaccttgtctagtcccggacagtctgacatccttctgaccgcagcccagggaacagtgcgtaaggccggagctctggccgtgaaaaacttcctagtccacaagaaaaacaaaaaggtcgagtctgccaccaggaggaagtggaaacactattgggtttctctcaagggttgcactctattcttctatgagtccgacggtagatccggtattgatcacaacagtatccctaagcatgccgtgtgggtagagaattccatcgtgcaagccgtgcctgagcaccctaaaaaagatttcgtcttttgcctctccaacagcctgggcgatgctttcttatttcagactacttcccagacggagctggaaaattggattaccgcgatccacagcgcatgcgctacagctgtcgcacgccaccaccacaaggaggacactctgcggttgctgaagtcagagatcaaaaagttggaacagaagatagacatggacgaaaaaatgaagaaaatgggagaaatgcaactctccagcgtgaccgactcaaaaaaaaaaaagacgatactcgatcaaatattcgtttgggaacaaaatctggaacagtttcaaatggacctgtttcgattccgttgctatctagccagtctgcagggcggagagttgcccaaccccaaacggctcctagcatttgcatcccgcccaaccaaggtggccatgggacggctgggcatattttccgtgtcctcatttcacgcgctcgttgcagcgcgtacaggagagaccggcgtaagacgcagaactcaggcaatgagtcgttccgctagcaaacggcggagccgcttttcatccctgtggggcctagatacaacttccaagaaaaagcagggccgtcccagtattaaccaacgtgagaaagaggttgttctgcctaacgtacatcaacacaatccagactgcgacatttgggtgcacgagtactttaccccgagctggttttgtctccccaataatcagcctgcactcactgtggttagacctggcgatacagccagggacacactggagcttatatgcaagctgtataaggagattgaaatttgccctaaggttacccaatccatccacattgaaaaaagtgatactgctgccgatacttacgggtttagtctgagcagtgtggaagaagatggcatacgacgcctgtatgtcaattcagttaaggaaaccggtctggcctccaagaaaggcctaaaggctggcgacgaaattctggagataaataatcgcgccgccgacgccctaaattcctccatgttgaaagacttcctgagccagcctagcctggggctgctcgtcaggacctatcccgagcttgaggaaggagtggaactgcttgaatctcccccgcatagagtggacggcccagccgacctgggcgaatccccactggcttttcttacctctaaccctggccatagtctgtgttccgagcaaggcagctcagccgagactgcgcctgaagagaccgagggcccggatttggagtcaagcgacgagactgatcacagttcaaagtctactgagcaggtagccgccttttgtagaagcctccacgagatgaacccctccgaccagtcaccttccccacaggacagcaccgggcctcagctggctaccatgagacagcttagcgatgcagataaactgcgcaaggtgatttgtgaacttcttgaaacagaaagaacctacgttaaggacctcaactgcctcatggagcgctatctgaaacccctgcagaaagaaactttcttgacacaagacgagctggacgtcctgttcggtaacttgacagagatggtcgaatttcaagttgagtttctgaaaaccctagaggatggcgtgcggctcgtcccagatctggagaagttggagaaagtggaccagttcaagaaggtgctcttcagcctaggaggatcctttctgtactacgctgacagattcaagttatatagcgccttctgtgctagtcacactaaggtgccaaaggttctcgtcaaggctaagactgatactgcgttcaaggcatttctcgatgcacaaaaccccaaacagcagcacagtagtactctcgagtcttacctcatcaagccaattcagcggattttaaaatatcccttgctgctgcgggaactttttgcgctgaccgacgctgagtctgaggaacactatcatcttgacgtggcaattaaaaccatgaacaaggtcgccagtcatatcaacgagatgcagaagatccacgaggaattcggagctgtgttcgatcagctgatcgccgagcaaactggggagaaaaaagaagtggcagacctaagtatgggcgacctactcctccacaccacggtcatctggctgaacccacccgcgtcactgggaaaatggaaaaaggagcctgaactcgctgccttcgttttcaaaactgcagtggtgttggtctataaggacggaagcaaacaaaaaaagaagttggtggggtcccacagactgagcatctacgaggattgggatccttttcggttcagacacatgatccccacggaggctctgcaggtgagagccctggctagcgcagacgctgaggccaatgcagtctgtgagattgtgcacgtgaaaagtgagtctgagggtcgccccgagcgtgtgtttcatctgtgttgttcaagccctgagtcccgaaaagactttctcaaagccgtgcatagtattctgcgggacaagcacaggagacagcttttaaagacagagtcccttccctctagccagcaatacgtcccattcggcggcaagaggctatgtgcgctaaagggagctcggcccgctatgtcacgtgccgtaagcgctccctcgaaaagtctaggcaggagacgcagacgactggctcgaaacagattcaccattgactccgatgcggtatcagccagttctcctgaaaaggaaagccagcagccgcctggcgggggcgacactgatcggtgggtagaagagcagttcgatctggctcagtacgaggagcaggatgatatcaaggaaacagatattctgtccgacgacgacgaattctgcgagagcgtgaagggcgcttctgtggaccgggatcttcaggaacgcttgcaggcaactagcatctctcagcgggaaagaggcaggaaaaccctggatagtcacgcctcacggatggcgcagctgaagaagcaggccgccctgtcgggcataaatggaggtctcgagtccgcctcggaagaggtgatctgggtgagacgcgaggatttcgctccatcccggaagctgaatactgagatatag

SEQ ID NO: 277195 - DNA, 4776 bp, Artificial Sequence
  derived and/or modified sequence
atgggaaatgctgaaagtcaacatgttgaacatgagttctatggcgagaaacatgcctctctggggagaaagcacacctctcgctccctgaggctaagccacaagacccggaggactagacacgcctcatccggcaaggttattcaccggaactcagaggtctccacacgttcgtcctctactccttcaattccccagtctcttgccgagaatgggctagaaccctttagccaggatggaacactggaagactttggaagccctatatgggtggatagggtcgatatgggccttcgtcctgtgagttataccgactcttctgtcacacctagtgtggactctagcattgttctgacagcagccagtgtgcaatcaatgccagatacagaggagagccggctgtacggagacgacgccacttatttagccgagggtggcagacggcaacatagctataccagcaacgggcctacgtttatggaaaccgcctcttttaagaagaagaggagtaaaagcgccgatatttggcgcgaggattctcttgaattctctttatctgatctatcccaggagcatttgacgtcgaacgaggaaatactgggctctgccgaagaaaaggattgcgaggaagccagaggaatggaaacaagagcctccccccgacaattgtcaacatgccaaagggcaaactccctaggtgacttgtatgcgcagaaaaattctggcgtcaccgccaatggcggacccggaagtaaattcgcaggatattgtcgcaatttggtgagcgacattcccaacctcgcgaaccataaaatgccccctgctgcggcagaggagacgccaccctattctaactataacaccttgccatgccgaaagagccattgcctgtcagagggcgctactaatccccaaatcagccattccaacagtatgcagggaagacgcgctaaaaccacacaagacgtgaatgctggggaaggatctgaatttgccgactcaggaatagagggagccactactgataccgatttactcagtaggagaagcaacgctactaacagcagctacagcccaacaacaggaagggcattcgtcggaagtgactcagggtcttcctctaccggcgatgcagctcgtcagggcgtgtatgaaaatttcaggcgagagcttgagatgagtactaccaattcggaatcactggaggaggcgggatctgcccactctgacgaacagtcaagtggcaccctgtcaagtcccggacaaagcgatattttactgacagcggctcagggcaccgtccgaaaggccggtgctctcgccgtgaagaactttttggttcataagaagaacaagaaggtagaatcagccacaaggaggaagtggaaacattactgggtcagtttgaagggctgcactctgttcttttatgaatccgatggcaggagcggcatcgatcacaatagtatccccaaacatgccgtctgggtcgagaacagcattgtgcaggccgtgcccgaacaccccaagaaagatttcgtattttgtttgagcaattctctcggagacgcattcttgtttcagactacgagccagacagagttagagaattggattacagccatacactctgcctgcgctaccgccgtggccagacaccatcacaaagaggacacactcaggctgctgaagtccgaaataaaaaagcttgagcagaagattgacatggatgagaagatgaaaaagatgggagagatgcaactttcatcagtcaccgatagcaagaagaaaaaaaccatcctggaccaaatcttcgtgtgggaacaaaacctagagcagtttcagatggacttatttcgattcagatgctacctggccagcctgcagggaggtgaattacccaacccaaagaggttgcttgcgtttgcatcccgacctaccaaagtcgccatgggcagattaggtatctttagcgtatcttccttccacgctttggttgccgcacgcacaggtgaaaccggagtcagacgcagaacccaggctatgtctcgctctgctagcaagcgcagaagtcgcttcagttccctctggggcctcgataccacgtccaaaaaaaagcaagggcgaccaagcattaatcaagtgttcggcgaaggcacagaagcggtgaagaagtctctcgagggcatatttgatgacatcgtcccagatggcaaaagagagaaggaggtggtcctgcccaacgtacaccaacataacccagactgtgatatctgggttcacgagtacttcacaccttcctggttttgtctccctaacaaccagcccgcactgaccgtggtcaggcccggagacaccgctcgagatacactagaactgatttgcaagacacatcaactggatcactccgctcattatttacgcctgaaatttctaattgaaaataagatgcagctatacgtgccacagcctgaagaagatatctacgagcttttatataaggagatcgagatttgtcccaaagtgacccaaagtattcatattgagaagtcagacactgctgccgacacgtacggattttccctgagttcagtcgaagaggatggtatccggaggctgtatgtgaattctgttaaggaaacgggtctggcctccaaaaaaggcctgaaggcaggggacgagatcttggagattaataacagggccgcagatgcattgaattctagtatgctgaaagactttctctctcagccttcactcggcctgctggtgaggacttatccggaattggaggagggagtcgaactcctggaaagcccacctcatagggtggacgggcctgccgatttaggagagagtcctttggccttcctcacatctaaccctggacatagcctctgctctgagcaagggagttcagccgaaacggcaccggaggaaacggagggacccgacctggaatcaagcgatgagacggatcactcgtcaaaaagcacagagcaggtggctgccttctgtcgcagccttcatgaaatgaatcccagtgaccagtcaccttccccgcaggacagcacggggccacagctcgcaaccatgcgccaactaagcgatgccgataaactcaggaaagtcatctgtgaattactggagacagaacgcacatatgttaaggacctgaattgcctgatggaacggtacctgaaacccctgcagaaggagacctttttgacccaggatgagctggatgtactgttcggaaatctgaccgaaatggtggaatttcaagttgaattcctgaaaaccctggaggacggtgtcagactggtaccggacctggagaaattagaaaaggtagaccagttcaagaaggtccttttctccctgggtggatcattcctttattacgcagaccgttttaaactttattctgccttttgtgcttctcacactaaggttcccaaagtgttagtaaaggccaagactgatactgcctttaaggctttcctggatgcccagaatcctaagcaacaacactcttcgactttggaaagctacctgatcaagcccatacagagaatcttgaagtatccgctgctgctgcgcgaactctttgctctaactgacgcggaaagtgaagaacactatcacctcgacgtggccatcaagacaatgaacaaggttgctagtcacattaatgagatgcagaaaatacacgaggagtttggggctgtctttgaccaacttatagcagaacagactggggagaaaaaggaagtcgctgaccttagtatgggagatctccttctgcataccactgtgatctggctgaaccctcccgcatcactgggcaagtggaagaaggagcccgagcttgccgcttttgtgtttaaaacagcagttgtactggtgtacaaagatggttcgaaacagaagaaaaaactggttgggtctcaccgcttaagcatctatgaggactgggacccttttcgatttcgacatatgattcctactgaagccctgcaagtgcgcgctctcgctagcgcagatgccgaggccaatgcagtatgcgaaatcgtgcacgtaaaaagtgaatccgagggcaggcctgaaagggtgttccatctatgctgctcgagtcccgagagccggaaggattttctgaaggcagtccactctattttgcgggacaaacaccgtcgccagctgctgaagacagaatccctgccttcaagccagcagtacgttcccttcggaggaaaaaggctctgtgccctcaaaggcgctaggccagcaatgagtcgggcagtaagcgctccctccaagagcctcgggaggcgacgcagaaggctggcacgtaacagattcactattgattctgatgccgtgtcagcaagtagtccagagaaggagagccaacaaccacccggaggtggagatacagataggtgggtggaggagcagttcgatttagcacaatacgaagaacaagatgatattaaggaaactgacatactgtcagatgacgacgaattctgtgagagcgtgaaaggtgcaagcgtcgaccgggacctccaggaaaggttgcaggccacgtcaatcagccagagggagaggggcaggaagacactggatagccacgcctcacgaatggctcagctgaagaaacaggcagcgttgtccggaatcaatgggggattggagtctgccagtgaggaggtaatatgggtgcgcagggaagactttgcacccagtagaaagcttaacactgagatttaa

SEQ ID NO: 277196 - DNA, 4596 bp, Artificial Sequence
  derived and/or modified sequence
atgggcaatgcggaatcccagcacgtagagcacgaattctatggcgagaagcatgcctccctgggaaggaagcacaccagtcgctctttgcgcctgagccacaagacccggaggactagacacgcctcatccgggaaggtaattcatcggaactctgaagtttctacgcgctcctcatctacacctagtatcccccaatctctggctgagaacgggctggagcctttcagtcaggacggcaccctggaggacttcggaagtcctatctgggtggatcgcgtggacatgggactgcgaccggtatcatatactgattcttccgtgacccctagcgttgactcaagcatcgtcttgaccgccgcttccgtgcagagcatgccagatacagaggagagtagattgtacggggacgatgcaacgtacctggccgaagggggtagacgccagcatagctatacatctaacggccctacattcatggagacggcctcattcaagaagaagcggtctaaaagcgccgacatctggcgggaggatagccttgaattctctctgagcgacctgtcccaggaacaccttacctctaatgaggagatcctgggctccgctgaagagaaggattgtgaggaggcacggggtatggaaactagagcttctcctcggcagctctctacctgccagcgagcaaactcacttggggacctgtatgctcaaaagaattccggtgtcacagctaacgggggtcccggatccaagtttgcgggatattgcaggaatctcgtgtctgacatcccgaacctggccaaccataaaatgccacccgctgctgccgaagagacccctccctactccaactataacaccctaccctgccgcaagagtcattgcttgagcgagggagcgaccaatcctcagatttcccactccaactccatgcagggccgtcgcgcaaagactactcaggacgtcaacgctggtgagggctctgagttcgcagatagtggaatagaaggagccacaaccgacaccgatctgctatcccggcgatccaacgccaccaattcctcttactccccaaccactggtcgagccttcgtaggaagtgatagcggctcctcgagcactggagacgcggcacggcaaggagtctacgagaatttcaggagggagctagagatgtcaaccacaaattccgagtctcttgaggaggctggatctgcccatagtgacgaacagtcatccggcacgctgtcatcacccggacagagtgacattctgttgactgcagcacagggaacagtgaggaaagcaggagcactcgcggtgaaaaacttccttgtccacaagaaaaataaaaaagtagaatcagcgacacgaagaaaatggaaacattactgggttagtcttaaggggtgcaccctatttttctatgaatcagatggacgttctgggatagaccataattctattcccaaacatgctgtttgggtggagaactccatcgtacaagcagtacctgaacatccaaagaaggattttgtcttttgcctgtctaatagcctcggcgacgcctttctgtttcagacaacaagtcagacagaattggaaaattggattactgccatacactccgcatgcgccacggccgtggctagacatcaccacaaggaggacacgctcaggctgttaaaatcggagattaagaaactggaacagaagattgatatggacgagaaaatgaagaagatgggggaaatgcagctatcaagcgtgaccgacagcaagaaaaagaaaacgattctagaccagatttttgtttgggagcaaaacctagaacagttccagatggacctgttcagatttcgatgctacctggccagtttacaaggcggtgagttgcctaatcctaagcgcctgctggcatttgcgtccaggccaaccaaggttgccatggggagactgggtattttcagtgtttctagctttcatgcattggttgctgccagaaccggggaaaccggcgtgagacgtagaacccaggccatgtcccggtcggcaagcaaaagacgcagcaggtttagctccttatggggtctggatacgacctcaaaaaaaaaacagggcagaccttccattaaccagcgcgagaaagaggtcgtgctccccaatgtgcaccagcacaatccagactgcgacatctgggtccacgaatacttcactcctagctggttctgcctaccaaacaaccaacccgctctgacggtagttcggccaggtgatacagcgcgagacaccttggagctgatttgcaagttgtataaggagatagagatctgtccaaaagtcacacagtccattcatattgagaagtccgacacagccgcagatacctatggcttttcactctcctctgtggaagaagatgggattcgcagactttatgtcaatagcgtgaaggagaccggattggcgtccaaaaaaggtctgaaagccggtgacgaaattttggagatcaacaaccgtgctgctgacgccctgaactcctctatgttgaaggattttctgtcacaaccatctctgggcctgctggtgcggacttatcctgagctggaagagggagtggaacttctggagtcccctccccaccgggtggatgggcctgcagatcttggggaatctccactggcattcctcacttccaaccctggccacagcctgtgctccgagcagggcagtagcgcagagacagcacccgaggagaccgagggtcctgacttggagtctagcgatgagaccgatcacagctctaagtcaacagagcaggtagccgctttctgtcgctctttacatgagatgaacccctcggaccagagcccctcaccacaagattcaacgggtccccagctagcgaccatgcggcagttgagcgatgccgataaactgagaaaagtgatatgtgaattgttagaaactgagcgcacctatgtgaaagacctgaactgcctgatggagaggtacttaaaacctctgcaaaaagagaccttcctcacgcaggacgaacttgatgtgctctttggcaacctgacagagatggtggagttccaagtggagttcctgaagaccttggaggacggggtcaggcttgttcctgacttggaaaagctggagaaagtcgaccagttcaagaaagttctttttagccttggcggttctttcctatattatgccgacaggttcaagctctattcagcattctgcgcatcccacaccaaagtgcctaaagttctcgtcaaggctaagactgatacggccttcaaggcatttctcgacgcccagaatcccaaacagcagcactcgtccacactggaatcatatctgattaaacctatacagagaatcctcaaatacccactgttgctcagagagctttttgccttaacagatgctgaaagtgaagagcactaccatctggatgtggctatcaagacaatgaacaaggtggcctcgcatataaatgaaatgcagaaaatccacgaggagttcggagccgtgttcgaccagctaatcgctgagcagaccggcgagaaaaaagaggtcgccgacttgagcatgggggatttactcctgcacactaccgtgatctggctcaatccgcctgctagcctgggaaagtggaaaaaggagcccgagctggccgctttcgtgtttaaaactgcagttgtgctggtgtacaaggacggtagtaagcagaaaaaaaagctggtcggatcccaccgattatccatatatgaggattgggatccgtttcggttccgccacatgatccccaccgaagccttacaggttcgggctttggcctccgccgatgctgaggctaacgccgtatgcgaaattgtgcacgtcaagagcgagtcagaaggacggccagagcgtgtattccacctttgctgcagttctcctgagagcaggaaggactttctgaaggccgtgcactctatcctgagggataagcatcggaggcagcttctgaagaccgagagcctgcctagcagccagcagtacgtgcccttcggtgggaaaagactatgcgcccttaagggcgcaaggccagctatgagccgagctgtttccgcaccctctaagagcctgggaagaagacgcagacgcctcgctaggaataggttcacaatcgattccgacgccgtgagcgccagctctccggagaaggagtcccagcaaccacctggaggaggtgacacggatagatgggtggaggagcaatttgatctggcacaatatgaggaacaggatgatataaaagagaccgatattttgagcgacgacgatgagttctgcgaatccgtcaagggcgcatccgtcgaccgagatctgcaagaaagacttcaggcgacctccatttcgcagcgcgaaaggggaaggaaaaccctggacagtcacgcctctcggatggcacaattgaaaaagcaggccgcattgtccgggatcaatggaggcttggagtctgctagcgaagaagtaatttgggtgcgcagggaagacttcgctccatcgagaaagttgaataccgagatatag

SEQ ID NO: 277197 - DNA, 7200 bp, Artificial Sequence
  derived and/or modified sequence
gccccgcatcgtgcccggccccgtcgcggagatcccggacgaccgtcgcgggttgatggtcgcattccagatgtaaacagcttcagaagcctgacggtcatatggtagaatcactgtggactgagacccacctttctagacctgaagcccaggaggaggaagaggaggctggttggtaccatgggcataatgctctgaatcctagtctctcacctagtatgtgagcagtccctgcagatggcccatttggagatcttgacaaagcctcttctgtttccaatggggtttttggcgcattctcacagacttagatgaaactgtgatggccaccgcagggggcaggtgctgacatcgtccccagccctgtggctgttcatccggacatcatttccaacctcaatatctaaatgccacagtgctcttggagcaagttgggctggggaccactgttgccttttaagaccataaaaccatgggaaacgcagaaagtcaacatgtagagcacgagttttatggagaaaagcatgccagcctggggcgcaagcacacttcccgctccctgcgcctctcgcacaagacgcggaggaccaggcacgcttcctcggggaaggtgatccacaggaactccgaagtgagcacccgatccagcagcacccccagcatcccccagtccctggctgaaaatggcctggagcccttctcccaagatggtaccctagaagacttcgggagccccatctgggtggaccgagtggacatgggcttgagacctgtgtcttacactgactcttctgtcactcccagcgtagacagcagcatcgtcctcacagcagcctctgtgcagagcatgccagacactgaggagagcaggctttacggggatgacgctacatatttggctgagggaggcaggaggcagcattcctatacatccaatgggcccactttcatggagacggcgagctttaagaagaaacgctccaaatctgcagacatctggcgggaggacagcctggaattctcactctctgatctgagccaagaacatttaacaagcaacgaagaaatcttgggttccgccgaagagaaggactgcgaggaggctcgggggatggaaacgcgggcgagtccgcggcagctcagcacctgtcagagagccaattccttgggtgacttgtatgctcagaaaaactctggagtgacagcaaacggggggccggggagcaaatttgcaggctactgtcggaatttggtgtctgatattcccaatcttgcaaaccataagatgccaccagctgctgctgaagagactcctccgtacagtaattataacacacttccctgtaggaaatctcactgtctctctgaaggtgccaccaacccacaaattagccatagcaacagcatgcaaggcagaagagctaaaacaactcaggatgttaatgcaggcgagggcagtgagtttgcagacagtgggattgaaggggccactaccgacacggacctcctgtccaggcgatctaatgccaccaactccagctactcacccaccacaggccgggcctttgtgggcagcgacagcggcagcagctccaccggggatgcggctcgtcagggggtgtacgagaacttccggcgggagctggagatgagcaccaccaacagcgagagcctggaggaggccggctcggcgcacagcgatgagcagagcagcggcaccctgagctctccgggccagtcggacatcctgctgaccgccgcacagggcacggtgcgcaaggccggcgccctggccgtcaagaacttcctggtgcacaagaagaacaagaaggtggagtcagccacccggaggaagtggaagcactactgggtgtccctgaaaggatgcacgctatttttctacgagagcgacggcaggtctgggatagaccacaacagcatccccaaacacgccgtctgggtggagaacagcattgtgcaggcggtgcctgagcaccccaagaaggactttgtcttctgcctcagcaattccctgggtgatgccttcctttttcagaccactagccagacggagcttgaaaactggatcaccgccatccactctgcctgcgccactgcggtcgcgaggcaccaccacaaggaagacacgctccgactcctgaaatcagagatcaaaaaactggaacagaagattgacatggatgaaaagatgaagaaaatgggtgaaatgcagctgtcttcagtcactgactcaaagaaaaagaaaacaatattagatcagatctttgtctgggagcaaaatctcgagcagttccaaatggacctgtttcgtttccgctgttatttagccagccttcagggtggggagctgccaaaccccaaaaggcttctcgcttttgcaagtcgaccaacgaaagtggccatgggccgccttggaatcttttcggtatcatcgtttcatgccctggtggcagcacgcactggtgaaactggagtgagaagacgtactcaggccatgtccagatccgcgagcaagcgaaggagcaggttttcttctctgtggggtctggatactacctccaaaaagaagcagggacggccaagcatcaatcaggtgtttggagagggaaccgaagctgtaaagaaatctttagagggaatatttgatgacattgttccagatggcaagagggagaaagaagtggtcttacctaacgttcaccagcacaaccctgactgcgacatttgggtccacgagtatttcactccatcctggttctgtctgcccaataatcagcctgccctgacggtcgtccggccaggcgacactgcacgggacaccctggagctgatttgcaagacacatcaactggatcattctgctcattacctgcgcctgaaatttctaatagaaaacaaaatgcagctctatgttccacagcccgaggaagacatctatgagctgctgtacaaagaaattgaaatctgtccaaaagtcactcagagcatccacattgagaagtcagatacagctgctgatacttacgggttttcactttcttctgtggaagaagatggtattcgaaggctgtacgtgaatagtgtgaaggaaaccggtttagcttccaagaaaggcctgaaagcaggagatgagattcttgagatcaataatcgtgctgctgacgccctgaactcttctatgctcaaagatttcctctcacagccctcgctgggcctcctggtgaggacctaccccgagctggaggaaggagtggagctgctggaaagcccgccccaccgagtggacggccctgccgaccttggcgagagccccctcgcctttctcaccagcaacccagggcacagcctttgcagcgagcagggcagcagtgctgagaccgctccagaggagaccgaggggccagacttggaatcctcagatgagactgatcacagcagcaagagtacagaacaggtggccgcattttgccgcagtttgcatgagatgaacccctctgaccagagcccatctcctcaggactccacggggcctcagctggcgaccatgagacaactctcggatgcagataagctgcgcaaggtgatctgcgagctcctggagacggagcgcacctacgtgaaggatttaaactgtcttatggagagatacctaaagcctcttcaaaaagaaacttttctcacccaggatgagcttgacgtgctttttggaaatttaacggaaatggtagagtttcaagtagaattccttaaaactctagaagatggagtgagactggtacctgatttggaaaagcttgagaaggttgatcaatttaagaaagtgctgttctctctggggggatcattcctgtattatgctgaccgcttcaagctctacagtgccttctgcgccagccacacaaaagttcccaaggtcctggtgaaagccaagacagacacggctttcaaggcattcttggatgcccagaacccgaagcagcagcactcatccacgctggagtcgtacctcatcaagcccatccagaggatcctcaagtacccacttctgctcagggagctgttcgccctgaccgatgcggagagcgaggagcactaccacctggacgtggccatcaagaccatgaacaaggttgccagtcacatcaatgagatgcagaaaatccatgaagagtttggggctgtgtttgaccagctgattgctgaacagactggtgagaaaaaagaggttgcagatctgagcatgggagacctgcttttgcacactaccgtgatctggctgaacccgccggcctcgctgggcaagtggaaaaaggaaccagagttggcagcattcgtcttcaaaactgctgtggtccttgtgtataaagatggttccaaacagaagaagaaacttgtaggatctcacaggctttccatttatgaggactgggaccccttcagatttcgacacatgatccccacggaagcgctgcaggttcgagctttggcgagtgcagatgcagaggcaaatgccgtgtgtgaaattgtccatgtaaaatccgagtctgaagggaggccggagagggtctttcacttgtgctgcagctccccagagagccgaaaggatttcctaaaggctgtgcattcaatcctgcgtgataagcacagaagacagctcctcaaaaccgagagccttccctcatcccagcaatatgtcccttttggaggcaaaagattgtgtgcactgaagggggccaggccggccatgagcagggcagtgtctgccccaagcaagtctcttgggaggaggaggcggcggctggctcgaaacaggtttaccattgattctgatgccgtctccgcaagcagcccggagaaagagtcccagcagccccccggtggtggggacactgaccgatgggtagaggagcagtttgatcttgctcagtatgaggagcaagatgacatcaaggagacagacatcctcagtgacgatgatgagttctgtgagtccgtgaagggtgcctcagtggacagagacctgcaggagcggcttcaggccacctccatcagtcagcgggaaagaggccggaaaaccctggatagtcacgcgtcccgcatggcacagctcaagaagcaagctgccctgtcggggatcaatggaggcctggagagcgcaagcgaggaagtcatttgggttaggcgtgaagactttgccccctccaggaaactgaacactgagatctgactgcgtcacctgccccgtagagaatgtgtgtagatacttcctgccctaactctgcccaccctcctgtaccgtcgacaagaatgtccccttaggtcgcgctcttgcacacacggttttggcagctgacttggttctgaagccatgtagccacccaactttgtcattttcaacaacatcagaaagaattgatcagaatcccaaataagcttgagtcctatcttctgtatattactaagggcttttatttattctcaataaatcagggcctgaacaattaaaagaaaaaagattctatagcactggaaagcaaatcaccccaggagttaacggatgtacaacagattaatttaagggatagtagcacacacacgatccttctatctgaaatcagtctcctagctggggaaacctctttcacacacaaaatgaaatgtgtacagcttgccgtgttctgactgtacccttccctcttccatgtctgagaatctccgtgtattttaagaatgtgtgaggagagggtggcgattcatgtttcaatgagcctctttttttttttccttcctgttttggtctatggctggtcttactctgtgtccatgttcggaagctctagttttgcatagaattatagagatgccaaactctttgaaaagagatccaaatttatcgcttgagagaaagaaaagaaacactattttttgtattttacctgagatacaggggcacaaatagatgagaattttacagtgttagtgtatgtatccctgagcctaaaaaatgaggatataaccttttacagagagagtgaggcgtggtggttttatatttatatatgaaaggccagcaagctcatgcgaaggatatacttttcttccaaaaagcggattttttttttttaatgtttgaatctatatttgagatgggagtttggttggattaaacatgacaccccggtgggcggtgtgtgtgtctgttgcacatggcagggaggggagcctccttctcatggggttgccatggtgatcattggtttttccatcaaaattgcatcttcatccatagattaccttccccttccctgacagtccataaccaaacctttaaacagaacaacctctttaaaaacttctcttgtgtttaacactttcttcatgccaacgaaacagggtaaacatgctcaaaacattaacagtctaaacagatatccaaatactaagaagaaaaacaagttatagcactttcaattttttttttttttttaaaaaaaggtttatagctttttcttttcccatgtcacaatgtccacttcctaagaagggtttaaaatactatgaaaactttctttttggggaaaatatctatttggtgtttgacacatcagtaggtactttaaagacctgaattttatagtagctttaggagttatattttataaaaatcagttatgactttatatttccagacaatagagagttcagtacatcatgctcttgtgcctctgcctgcttttcctgcgttcccaccctgtattccccccgcctttcgggtttccagggcttcgagcttgatcttttgaaagttttattctattaaatttttgctatatcttctggttttctgaaaaagctttagaatggtttctataccctttgtatcactgcatttttccatatcatctccggttcgatcgcgtccagatggaaaacggaagcagaggcttctaatcgtcgcatttactggctccagtgcaacacatccatctgaaaacactcggaagtctggtgcttggagagggtgccattgtctcttgtacataaggtcatgacgtgtctatgtcaaaagttcttatatatttcttttataagctgaaagaaggtctatttttatgtttttaggtctatgaatggaacgttgtaaatgcttgtcaaacaataaaaataacgaaaagtgtc

SEQ ID NO: 277198 - DNA, 4654 bp, Artificial Sequence
  derived and/or modified sequence
agcaagttgggctggggaccactgttgccttttaagaccataaaaccatgggaaacgcagaaagtcaacatgtagagcacgagttttatggagaaaagcatgccagcctggggcgcaagcacacttcccgctccctgcgcctctcgcacaagacgcggaggaccaggcacgcttcctcggggaaggtgatccacaggaactccgaagtgagcacccgatccagcagcacccccagcatcccccagtccctggctgaaaatggcctggagcccttctcccaagatggtaccctagaagacttcgggagccccatctgggtggaccgagtggacatgggcttgagacctgtgtcttacactgactcttctgtcactcccagcgtagacagcagcatcgtcctcacagcagcctctgtgcagagcatgccagacactgaggagagcaggctttacggggatgacgctacatatttggctgagggaggcaggaggcagcattcctatacatccaatgggcccactttcatggagacggcgagctttaagaagaaacgctccaaatctgcagacatctggcgggaggacagcctggaattctcactctctgatctgagccaagaacatttaacaagcaacgaagaaatcttgggttccgccgaagagaaggactgcgaggaggctcgggggatggaaacgcgggcgagtccgcggcagctcagcacctgtcagagagccaattccttgggtgacttgtatgctcagaaaaactctggagtgacagcaaacggggggccggggagcaaatttgcaggctactgtcggaatttggtgtctgatattcccaatcttgcaaaccataagatgccaccagctgctgctgaagagactcctccgtacagtaattataacacacttccctgtaggaaatctcactgtctctctgaaggtgccaccaacccacaaattagccatagcaacagcatgcaaggcagaagagctaaaacaactcaggatgttaatgcaggcgagggcagtgagtttgcagacagtgggattgaaggggccactaccgacacggacctcctgtccaggcgatctaatgccaccaactccagctactcacccaccacaggccgggcctttgtgggcagcgacagcggcagcagctccaccggggatgcggctcgtcagggggtgtacgagaacttccggcgggagctggagatgagcaccaccaacagcgagagcctggaggaggccggctcggcgcacagcgatgagcagagcagcggcaccctgagctctccgggccagtcggacatcctgctgaccgccgcacagggcacggtgcgcaaggccggcgccctggccgtcaagaacttcctggtgcacaagaagaacaagaaggtggagtcagccacccggaggaagtggaagcactactgggtgtccctgaaaggatgcacgctatttttctacgagagcgacggcaggtctgggatagaccacaacagcatccccaaacacgccgtctgggtggagaacagcattgtgcaggcggtgcctgagcaccccaagaaggactttgtcttctgcctcagcaattccctgggtgatgccttcctttttcagaccactagccagacggagcttgaaaactggatcaccgccatccactctgcctgcgccactgcggtcgcgaggcaccaccacaaggaagacacgctccgactcctgaaatcagagatcaaaaaactggaacagaagattgacatggatgaaaagatgaagaaaatgggtgaaatgcagctgtcttcagtcactgactcaaagaaaaagaaaacaatattagatcagatctttgtctgggagcaaaatctcgagcagttccaaatggacctgtttcgtttccgctgttatttagccagccttcagggtggggagctgccaaaccccaaaaggcttctcgcttttgcaagtcgaccaacgaaagtggccatgggccgccttggaatcttttcggtatcatcgtttcatgccctggtggcagcacgcactggtgaaactggagtgagaagacgtactcaggccatgtccagatccgcgagcaagcgaaggagcaggttttcttctctgtggggtctggatactacctccaaaaagaagcagggacggccaagcatcaatcagagggagaaagaagtggtcttacctaacgttcaccagcacaaccctgactgcgacatttgggtccacgagtatttcactccatcctggttctgtctgcccaataatcagcctgccctgacggtcgtccggccaggcgacactgcacgggacaccctggagctgatttgcaagctgtacaaagaaattgaaatctgtccaaaagtcactcagagcatccacattgagaagtcagatacagctgctgatacttacgggttttcactttcttctgtggaagaagatggtattcgaaggctgtacgtgaatagtgtgaaggaaaccggtttagcttccaagaaaggcctgaaagcaggagatgagattcttgagatcaataatcgtgctgctgacgccctgaactcttctatgctcaaagatttcctctcacagccctcgctgggcctcctggtgaggacctaccccgagctggaggaaggagtggagctgctggaaagcccgccccaccgagtggacggccctgccgaccttggcgagagccccctcgcctttctcaccagcaacccagggcacagcctttgcagcgagcagggcagcagtgctgagaccgctccagaggagaccgaggggccagacttggaatcctcagatgagactgatcacagcagcaagagtacagaacaggtggccgcattttgccgcagtttgcatgagatgaacccctctgaccagagcccatctcctcaggactccacggggcctcagctggcgaccatgagacaactctcggatgcagataagctgcgcaaggtgatctgcgagctcctggagacggagcgcacctacgtgaaggatttaaactgtcttatggagagatacctaaagcctcttcaaaaagaaacttttctcacccaggatgagcttgacgtgctttttggaaatttaacggaaatggtagagtttcaagtagaattccttaaaactctagaagatggagtgagactggtacctgatttggaaaagcttgagaaggttgatcaatttaagaaagtgctgttctctctggggggatcattcctgtattatgctgaccgcttcaagctctacagtgccttctgcgccagccacacaaaagttcccaaggtcctggtgaaagccaagacagacacggctttcaaggcattcttggatgcccagaacccgaagcagcagcactcatccacgctggagtcgtacctcatcaagcccatccagaggatcctcaagtacccacttctgctcagggagctgttcgccctgaccgatgcggagagcgaggagcactaccacctggacgtggccatcaagaccatgaacaaggttgccagtcacatcaatgagatgcagaaaatccatgaagagtttggggctgtgtttgaccagctgattgctgaacagactggtgagaaaaaagaggttgcagatctgagcatgggagacctgcttttgcacactaccgtgatctggctgaacccgccggcctcgctgggcaagtggaaaaaggaaccagagttggcagcattcgtcttcaaaactgctgtggtccttgtgtataaagatggttccaaacagaagaagaaacttgtaggatctcacaggctttccatttatgaggactgggaccccttcagatttcgacacatgatccccacggaagcgctgcaggttcgagctttggcgagtgcagatgcagaggcaaatgccgtgtgtgaaattgtccatgtaaaatccgagtctgaagggaggccggagagggtctttcacttgtgctgcagctccccagagagccgaaaggatttcctaaaggctgtgcattcaatcctgcgtgataagcacagaagacagctcctcaaaaccgagagccttccctcatcccagcaatatgtcccttttggaggcaaaagattgtgtgcactgaagggggccaggccggccatgagcagggcagtgtctgccccaagcaagtctcttgggaggaggaggcggcggctggctcgaaacaggtttaccattgattctgatgccgtctccgcaagcagcccggagaaagagtcccagcagccccccggtggtggggacactgaccgatgggtagaggagcagtttgatcttgctcagtatgaggagcaagatgacatcaaggagacagacatcctcagtgacgatgatgagttctgtgagtccgtgaagggtgcctcagtggacagagacctgcaggagcggcttcaggccacctccatcagtcagcgggaaagaggccggaaaaccctggatagtcacgcgtcccgcatggcacagctcaagaagcaagctgccctgtcggggatcaatggaggcctggagagcgcaagcgaggaagtcatttgggttaggcgtgaagactttgccccctccaggaaactgaacactgagatctgactgcgtcacct

SEQ ID NO: 277199 - DNA, 3216 bp, Artificial Sequence
  derived and/or modified sequence
atggagaccgccagcttcaagaagaagagaagcaagagcgccgacatctggagagaggacagcctggagttcagcctgagcgacctgagccaggagcacctgaccagcaacgaggagatcctgggcagcgccgaggagaaggactgcgaggaggccagaggcatggagaccagagccagccccagacagctgagcacctgccagagagccaacagcctgggcgacctgtacgcccagaagaacagcggcgtgaccgccaacggcggccccggcagcaagttcgccggctactgcagaaacctggtgagcgacatccccaacctggccaaccacaagatgccccccgccgccgccgaggagacccccccctacagcaactacaacaccctgccctgcagaaagagccactgcctgagcgagggcgccaccaacccccagatcagccacagcaacagcatgcagggcagaagagccaagaccacccaggacgtgaacgccggcgagggcagcgagttcgccgacagcggcatcgagggcgccaccaccgacaccgacctgctgagcagaagaagcaacgccaccaacagcagctacagccccaccaccggcagagccttcgtgggcagcgacagcggcagcagcagcaccggcgacgccgccagacagggcgtgtacgagaacttcagaagagagctggagatgagcaccaccaacagcgagagcctggaggaggccggcagcgcccacagcgacgagcagagcagcggcaccctgagcagccccggccagagcgacatcctgctgaccgccgcccagggcaccgtgagaaaggccggcgccctggccgtgaagaacttcctggtgcacaagaagaacaagaaggtggagagcgccaccagaagaaagtggaagcactactgggtgagcctgaagggctgcaccctgttcttctacgagagcgacggcagaagcggcatcgaccacaacagcatccccaagcacgccgtgtgggtggagaacagcatcgtgcaggccgtgcccgagcaccccaagaaggacttcgtgttctgcctgagcaacagcctgggcgacgccttcctgttccagaccaccagccagaccgagctggagaactggatcaccgccatccacagcgcctgcgccaccgccgtggccagacaccaccacaaggaggacaccctgagactgctgaagagcgagatcaagaagctggagcagaagatcgacatggacgagaagatgaagaagatgggcgagatgcagctgagcagcgtgaccgacagcaagaagaagaagaccatcctggaccagatcttcgtgtgggagcagaacctggagcagttccagatggacctgttcagattcagatgctacctggccagcctgcagggcggcgagctgcccaaccccaagagactgctggccttcgccagcagacccaccaaggtggccatgggcagactgggcatcttcagcgtgagcagcttccacgccctggtggccgccagaaccggcgagaccggcgtgagaagaagaacccaggccatgagcagaagcgccagcaagagaagaagcagattcagcagcctgtggggcctggacaccaccagcaagaagaagcagggcagacccagcatcaaccaggtgttcggcgagggcaccgaggccgtgaagaagagcctggagggcatcttcgacgacatcgtgcccgacggcaagagagagaaggaggtggtgctgcccaacgtgcaccagcacaaccccgactgcgacatctgggtgcacgagtacttcacccccagctggttctgcctgcccaacaaccagcccgccctgaccgtggtgagacccggcgacaccgccagagacaccctggagctgatctgcaagacccaccagctggaccacagcgcccactacctgagactgaagttcctgatcgagaacaagatgcagctgtacgtgccccagcccgaggaggacatctacgagctgctgtacaaggagatcgagatctgccccaaggtgacccagagcatccacatcgagaagagcgacaccgccgccgacacctacggcttcagcctgagcagcgtggaggaggacggcatcagaagactgtacgtgaacagcgtgaaggagaccggcctggccagcaagaagggcctgaaggccggcgacgagatcctggagatcaacaacagagccgccgacgccctgaacagcagcatgctgaaggacttcctgagccagcccagcctgggcctgctggtgagaacctaccccgagctggaggagggcgtggagctgctggagagccccccccacagagtggacggccccgccgacctgggcgagagccccctggccttcctgaccagcaaccccggccacagcctgtgcagcgagcagggcagcagcgccgagaccgcccccgaggagaccgagggccccgacctggagagcagcgacgagaccgaccacagcagcaagagcaccgagcaggtggccgccttctgcagaagcctgcacgagatgaaccccagcgaccagagccccagcccccaggacagcaccggcccccagctggccaccatgagacagctgagcgacgccgacaagctgagaaaggtgatctgcgagctgctggagaccgagagaacctacgtgaaggacctgaactgcctgatggagagatacctgaagcccctgcagaaggagaccttcctgacccaggacgagctggacgtgctgttcggcaacctgaccgagatggtggagttccaggtggagttcctgaagaccctggaggacggcgtgagactggtgcccgacctggagaagctggagaaggtggaccagttcaagaaggtgctgttcagcctgggcggcagcttcctgtactacgccgacagattcaagctgtacagcgccttctgcgcccacaagagcagccagggccccggcgagagccaggacagacacggcttccagggcatcctgggctgccccgagcccgaggccgccgccctgatccacgccggcgtggtgccccaccaggcccaccccgaggacccccaggtgcccaccagcgcccagggcgccgtgagacccgacagatgcggcgagagaggcgccctgccccccggcagaggccaccaggaccacgagcagggctgccagagccaccagtag

SEQ ID NO: 277200 - DNA, 678 bp, Artificial Sequence
  derived and/or modified sequence
atgggcaacgccgagagccagcacgtggagcacgagttctacggcgagaagcacgccagcctgggcagaaagcacaccagcagaagcctgagactgagccacaagaccagaagaaccagacacgccagcagcggcaaggtgatccacagaaacagcgaggtgagcaccagaagcagcagcacccccagcatcccccagagcctggccgagaacggcctggagcccttcagccaggacggcaccctggaggacttcggcagccccatctgggtggacagagtggacatgggcctgagacccgtgagctacaccgacagcagcgtgacccccagcgtggacagcagcatcgtgctgaccgccgccagcgtgcagagcatgcccgacaccgaggagagcagactgtacggcgacgacgccacctacctggccgagggcggcagaagacagcacagctacaccagcaacggccccaccttcatggagaccgccagcttcaagaagaagagaagcaagagcgccgacatctggagagaggacagcctggagttcagcctgagcgacctgagccaggagcacctgaccagcaacgaggagatcctgggcagcgccgaggagaaggactgcgaggaggccagaggcatggagaccagagccagccccagacagctgagcacctag

SEQ ID NO: 277201 - DNA, 3216 bp, Artificial Sequence
  derived and/or modified sequence
atggaaactgcttcttttaaaaaaaaacgctctaaatccgcagacatttggagggaggattctttagagtttagcttgagcgacctgtctcaggaacacctcacaagcaacgaagaaattctgggaagcgcagaagaaaaggattgcgaggaggcacgggggatggaaacacgggcctcccctcgccagttatctacctgccagcgggctaactctctaggcgatctgtacgcccagaaaaacagcggtgttaccgcgaatggaggcccggggagcaagttcgcgggctattgccgcaacttagtctccgatatcccaaacctcgccaatcacaagatgccacccgcagctgcagaggagactccgccctattctaactacaataccctgccatgcagaaaaagccattgcctgtcagagggcgcaaccaacccccagataagccatagcaatagcatgcagggaaggcgggctaaaactactcaggatgttaacgccggcgagggcagcgagttcgctgactctgggattgagggcgcaacaaccgacacggatctgctttcccgcaggagcaatgctactaattcgtcatatagtccgaccactggtagggcctttgtgggtagtgattcaggatcctcatcaacaggcgacgcagcaaggcaaggtgtctatgaaaattttaggagagaacttgaaatgtctaccacaaatagtgaatcactggaagaggccggcagtgcccactctgacgagcagtcctctggaaccctgagcagccctgggcagagcgacatcttgctaaccgcagctcagggcacagtgaggaaggcaggcgctttagctgtgaagaattttctggtgcataagaaaaataaaaaggttgagtcagcgacccgcaggaagtggaaacactattgggtcagtctgaagggttgtacgctttttttttatgagtctgacggccggagcggaatcgatcacaatagtatacctaaacacgccgtttgggtggagaattctatcgtccaggctgtccctgaacatcccaaaaaggatttcgtcttctgcctgtctaactccctcggggacgcattcctgtttcagaccacctcacagaccgagctggagaattggataactgcaatacactccgcttgtgcaacagctgtcgcacgccaccaccacaaggaggataccttgaggctgctgaagtctgagattaaaaaactagagcaaaaaatcgatatggatgaaaagatgaaaaagatgggggagatgcaactctcatcagttactgattcaaaaaaaaagaagacaatcctggatcagatttttgtctgggagcagaacctagagcagttccagatggatctgtttagattccgatgttacctggcaagcttgcaggggggggaactgccgaatcccaagcggctgctggcatttgcctctagacctacaaaggttgccatggggagactcggaatcttcagtgtctcttctttccacgccctggttgccgcacggaccggcgaaaccggggtcagacgacgcactcaggctatgagcagaagcgcttccaagcgcagatctagattctcctcactgtggggcctggatacaacaagtaagaaaaagcagggccgtcccagcattaaccaggtgtttggtgaaggaactgaagcagttaaaaagtccctggaagggatctttgatgatatcgtaccggacggcaagcgggagaaggaagttgtgctccccaacgtccatcaacataatcccgactgtgacatctgggtccacgagtactttactcctagctggttttgtttgccaaacaatcagcccgcactaaccgtggtgcgccccggtgacactgccagggacactttagagttgatatgcaaaacccaccaactcgaccactcggcacactacttgagactgaagttcttgattgaaaacaaaatgcaactgtatgtaccacagcctgaagaggatatatatgagctcctctataaagaaatcgaaatttgcccaaaggtgactcagtctatacacatcgagaagtcagacacagctgcagatacatatggcttttctctgagcagtgtggaagaggacggcatccgccgcctgtacgtaaactctgtgaaggaaaccgggctcgcctccaagaagggattgaaagccggggacgaaatactggaaatcaataatagagccgccgatgctctgaatagctctatgcttaaagatttcctgtctcagccatccctgggattgctcgtaaggacatacccagagctagaagagggcgttgaattactcgaatccccaccacatcgggtggatggtccggctgacttgggcgaaagcccattggcattcctgacaagcaaccccgggcattcactgtgctctgagcagggatctagtgccgaaacagcccccgaagaaacagaaggaccggacttggagagtagtgatgagacagatcactcctctaagtcaaccgaacaggttgcagccttctgccgttcccttcacgaaatgaatccatcggaccaaagtccgtctcctcaagattccacaggaccccagttagctacaatgagacagctttcggatgcggataaattgaggaaagtgatctgcgaactgctggagaccgaacgtacgtacgtgaaggatttgaactgcctaatggagagatacttgaaacccctacagaaggagacctttctgacacaggacgagctggacgtgttatttggcaatcttacagaaatggtggaatttcaggtggaattcctgaaaacgctggaagatggggtgagactggtcccggatctcgagaaattagaaaaagttgaccaattcaaaaaagtcctgtttagcctaggcggatctttcctgtattacgccgacagatttaagctttatagtgccttctgcgcccataagagcagccaggggccaggagaatctcaggacagacacggctttcagggtattttgggctgccctgagcccgaggccgctgccctcatccacgcgggtgtggtacctcatcaagcacatcctgaagatccccaggttcccacatcagctcaaggcgcagtgaggcccgatcgctgtggagagcgaggggctttgcctccaggccgagggcatcaggatcacgaacaaggctgtcagagccatcaatag

SEQ ID NO: 277202 - DNA, 678 bp, Artificial Sequence
  derived and/or modified sequence
atggggaacgctgagtctcagcacgtggagcatgagttttatggtgagaaacacgccagtctgggacggaagcacacgagcagaagtttgaggttgagtcataagactcgccggacccgccatgcatcaagcggaaaagtgatccaccgtaatagcgaagtgtccacccgctcctcaagcaccccgagtattccccagtcactggcagagaacgggctggaacctttctctcaagatggcacactcgaggattttggctctccaatatgggttgatcgagtcgacatgggtctccggcctgtgagctacaccgactcttccgtgaccccctccgtggactcatctattgttctgactgctgccagcgtgcaaagcatgcccgataccgaagagtcgaggctgtatggggacgatgctacatacttagccgagggagggcgccggcagcactcatacacctctaatggaccgacatttatggaaaccgcttcttttaagaaaaagaggagtaagagcgctgacatttggcgggaagatagtctggaattcagtctctctgatctctcccaggagcacctgacctctaacgaagagatactgggctcagccgaggaaaaagattgtgaggaggctcggggaatggagactcgcgcctcaccccgacaactatccacgtag

SEQ ID NO: 277203 - DNA, 3216 bp, Artificial Sequence
  derived and/or modified sequence
atggagacagccagcttcaagaagaagaggagcaagtctgctgacatctggagggaggacagcctggagttcagcctgagtgacctgagccaggagcacctgaccagcaatgaggagatcctgggcagcgctgaggagaaggactgtgaggaggcccggggcatggagacccgggccagcccccggcagctgagcacctgccagagggccaacagcctgggggacctgtatgcccagaagaacagcggcgtgacagccaatggaggccctggcagcaagtttgctggctactgcaggaacctggtgtctgacatccccaacctggccaaccacaagatgcccccagctgctgctgaggagaccccaccctacagcaactacaacaccctgccctgcaggaagagccactgcctgtctgagggcgccaccaacccccagatcagccacagcaacagcatgcagggccggcgggccaagaccacccaggatgtgaatgctggggagggcagcgagtttgctgacagcggcattgaaggagccaccacagacacagacctgctgagcagaagaagcaatgccaccaacagcagctacagccccaccaccggccgggcctttgtgggcagtgacagcggcagcagcagcactggagatgctgcccggcagggcgtgtatgagaacttcagaagagagctggagatgagcaccaccaacagcgagagcctggaggaggccggcagcgcccacagtgatgagcagagcagcggcaccctgagcagccctggccagagcgacatcctgctgacagctgcccagggcaccgtgaggaaggccggggccctggccgtgaagaacttcctggtgcacaagaagaacaagaaggtggagagcgccaccaggaggaagtggaagcactactgggtgtccctgaagggctgcaccctcttcttctatgaaagtgatggccgcagcggcatcgaccacaacagcatccccaagcatgctgtgtgggtggagaacagcatcgtgcaggccgtgcctgagcaccccaagaaggactttgtgttctgcctgagcaacagcctgggagatgccttcctgttccagaccaccagccagacagagctggagaactggatcacagccatccacagcgcctgtgccacagctgtggcccggcaccaccacaaggaggacaccctgcggctgctgaagtctgagatcaagaagctggagcagaagattgacatggatgagaagatgaagaagatgggagagatgcagctgagctctgtgacagacagcaagaagaagaagaccatcctggaccagatctttgtgtgggagcagaacctggagcagttccagatggacctcttccgcttccgctgctacctggccagcctgcagggcggggagctgcccaaccccaagaggctgctggcctttgccagccggcccaccaaggtggccatgggccgcctgggcatcttctctgtgagcagcttccacgccctggtggccgccaggactggagagaccggggtgagaagaaggacccaggccatgagccgcagcgccagcaagaggaggagccgcttcagcagcctgtggggcctggacaccaccagcaagaagaagcagggccggcccagcatcaaccaggtgtttggagagggcacagaagctgtgaagaagagcctggagggcatctttgatgacatcgtgcctgatggcaagcgggagaaggaggtggtgctgcccaacgtgcaccagcacaacccagactgtgacatctgggtgcatgagtacttcacccccagctggttctgcctgcccaacaaccagcctgccctgactgtggtgcggcctggggacacagcccgggacaccctggagctgatctgcaagacccaccagctggaccacagcgcccactacctgcggctgaagttcctgattgagaacaagatgcagctgtatgtgccccagcctgaggaggacatctatgagctgctgtacaaggagattgagatctgccccaaggtgacccagagcatccacatcgagaagagtgacacagctgctgacacctacggcttcagcctgagctctgtggaggaggatggcatccggcggctgtatgtgaacagcgtgaaggagaccggcctggccagcaagaagggcctgaaggctggagatgagatcctggagatcaacaacagagctgctgatgccctgaacagctccatgctgaaggacttcctgagccagcccagcctgggcctgctggtgaggacctacccagagctggaggagggcgtggagctgctggagagccccccccaccgggtggatggccctgctgacctgggggagagccccctggccttcctgaccagcaaccctggccacagcctgtgcagcgagcagggcagcagcgctgagacagcccctgaggagacagagggccctgacctggagagcagtgatgaaacagaccacagcagcaagagcacagagcaggtggccgccttctgccgcagcctgcacgagatgaaccccagcgaccagagccccagcccccaggacagcacaggcccccagctggccaccatgaggcagctgagtgatgctgacaagctgaggaaggtgatctgtgagctgctggagacagagaggacctacgtgaaggacctgaactgcctgatggagcgctacctgaagcccctgcagaaggagaccttcctgacccaggatgagctggatgtgctgtttggaaacctgacagagatggtggagttccaggtggagttcctgaagaccctggaggatggagtgcggctggtgcctgacctggagaagctggagaaggtggaccagttcaagaaggtgctcttcagcctgggcggcagcttcctgtactatgctgaccgcttcaagctgtacagcgccttctgtgcccacaagagcagccagggccctggagagagccaggacagacatggcttccagggcatcctgggctgcccagagcctgaggccgccgccctgattcatgctggggtggtgccccaccaggcccaccctgaggacccccaggtgcccaccagcgcccagggcgctgtgcggccagacagatgtggggagcggggggccctgcccccaggccggggccaccaggaccacgagcagggctgccagagccaccagtag

SEQ ID NO: 277204 - DNA, 678 bp, Artificial Sequence
  derived and/or modified sequence
atgggaaatgctgagagccagcacgtggagcacgagttctacggggagaagcacgccagcctgggcaggaagcacaccagccgcagcctgcggctgagccacaagaccaggaggaccaggcatgccagcagcggcaaggtgatccacaggaacagcgaggtgtccaccaggagcagcagcacccccagcatcccccagagcctggccgagaatggcctggagcccttcagccaggacggcaccctggaggactttggcagccccatctgggtggacagagtggacatgggcctgcggcctgtgtcctacacagacagctctgtgaccccatctgtggacagcagcatcgtgctgacagctgcctctgtgcagagcatgccagacacagaggagagccggctgtatggagatgatgccacctacctggccgagggcggccggcggcagcacagctacaccagcaatggccccaccttcatggagacagccagcttcaagaagaagaggagcaagtctgctgacatctggagggaggacagcctggagttcagcctgagtgacctgagccaggagcacctgaccagcaatgaggagatcctgggcagcgctgaggagaaggactgtgaggaggcccggggcatggagacccgggccagcccccggcagctgagcacctag

SEQ ID NO: 277205 - DNA, 3216 bp, Artificial Sequence
  derived and/or modified sequence
atggagaccgccagcttcaagaagaagcggagcaagagcgccgacatttggcgtgaagactccctcgagttctcactgtcagatctgagccaggagcatcttacgtcaaatgaagagattttgggtagtgctgaagaaaaagactgcgaggaagcaagagggatggagacacgtgcatcaccgagacagctgtcgacttgtcagcgcgctaacagcctgggagatctgtacgctcaaaaaaattccggagtaactgctaacggaggcccaggaagtaagtttgccggttactgcaggaacttggtaagcgacatccctaatctggctaaccacaagatgcctcccgccgcagctgaggagacacccccatactctaactataataccctcccgtgtagaaagagtcactgtctgagcgagggggctacaaacccccagattagccactccaactcgatgcaaggacggcgggccaagacgacacaggacgtcaacgctggggaaggtagtgagttcgccgattccggcattgaaggcgctaccacagacacagatctgctctcacgaagatctaacgccaccaattcttcctatagtcctaccacaggccgcgccttcgtggggtccgatagcggcagcagctcgaccggcgacgcagcccgccagggtgtctatgagaactttcggcgggagctcgagatgtcaaccacaaattctgagagtcttgaagaagccggctctgcgcacagcgacgagcagagctctggcactctttccagccctggacagagcgatattcttttgacggcagcccaaggcacggttagaaaagctggagcgctggcggtgaagaattttttagtgcataagaaaaataagaaggtggagtctgccaccagaaggaagtggaagcactattgggtgagtcttaagggctgtacactcttcttttatgagtccgacggacggagtggaatagaccataacagtattcccaagcatgcagtgtgggtggagaacagtatcgtacaggccgtaccagagcatcccaagaaggacttcgtattttgcctgtcaaattcactgggagacgcatttctgttccaaaccacttcacaaaccgagctggagaattggatcacggccattcactccgcatgtgctacagcagtcgcccgacatcaccataaagaggacacgttgagactgctgaagagtgaaataaaaaagctagagcagaaaattgacatggacgaaaaaatgaagaaaatgggagaaatgcagttatcctctgtcactgactcaaaaaagaagaagacaatactggaccagatctttgtatgggagcagaatctggaacaattccagatggacctgttccgttttaggtgctacctggcgagtctgcagggcggagagctgcccaatcctaaacggttactggccttcgcctcccggcctacaaaagtggctatggggcggttaggaattttctctgtgtctagctttcacgccctagtggccgctcgcactggggagactggggtgagaaggaggacgcaagccatgagtcgctcagctagcaagcgtcggagtagatttagcagtctgtggggccttgacacaacaagcaagaagaagcaaggacggccttcaattaatcaggtgtttggcgaggggacagaggctgtgaagaagtccctcgagggaatcttcgacgacattgtgcccgacggcaaacgagagaaggaagtcgtgctgcctaatgtacaccagcacaaccccgactgcgatatctgggtccatgagtacttcacgccttcctggttttgtctgccaaataaccagcctgcactgacagtggtgcgtcctggagatacggcgagggatacactggaactgatttgtaaaactcatcagctggatcatagcgctcactatctgcgcctgaaattcttgattgagaacaagatgcaactgtatgtgccacagcccgaagaggacatatacgaactgctctacaaggaaattgagatatgccctaaggtgacccagtctatccatatcgaaaaaagcgacacagctgccgatacatatggcttttccctctccagtgtggaggaagatgggataaggagattatatgtgaacagcgtgaaggaaacgggtctggctagcaagaaaggtctgaaagctggagatgagatcctcgagattaacaaccgggctgctgacgctttaaacagctccatgctcaaagacttcctttctcaacctagtctcggcctgctcgttcgaacttatccagaactggaggaaggtgtggagctgttggaatcccccccccatagggtcgacggacctgctgatctgggagagagcccgcttgccttcttaacatcaaatcccggccactccctctgctccgagcagggctccagcgctgagacagccccagaagagactgagggccctgatctggagtctagcgacgaaaccgatcatagcagcaagtctaccgagcaggtagctgcgttttgtaggagcctccatgaaatgaatccatcggaccagtcaccgtctccccaagattctaccggcccacagttggccaccatgcggcagctttctgatgctgacaagttgagaaaagtgatctgcgagttactagagaccgagcgtacttatgtgaaagatctcaactgtctcatggagcggtacctaaagcctctccagaaggaaacctttctgacacaggatgagctcgacgtcctgttcggaaatctaactgaaatggtggaattccaggtggaatttctcaagactcttgaggatggtgtccgactggtacctgatctcgaaaagctggagaaggtggatcagttcaaaaaggtcctttttagtctgggtggctcattcctgtactacgccgatcgattcaaactatatagcgctttctgtgcgcataaaagctctcagggtccaggtgagtcccaggaccggcatggctttcagggtatacttggctgtcctgagcccgaggccgctgccttgatccatgcaggcgtagtgcctcatcaggctcacccagaggatccacaagtgccaacatccgcacagggagcagtgcgccctgataggtgcggtgagcgtggtgcattaccccccggacgaggtcaccaagaccacgaacagggatgccagtcgcaccagtag

SEQ ID NO: 277206 - DNA, 678 bp, Artificial Sequence
  derived and/or modified sequence
atgggcaacgccgagagccagcacgtggagcacgagttctacggcgagaaacacgccagcctggggagaaagcatacctcgcgatccttgcgtcttagtcacaagacaaggagaacacggcatgcgtcctctggcaaggttattcatagaaattccgaggtcagcactaggtctagttccacacccagcatcccacagtcgttggccgagaatgggctcgaacctttcagccaggatggtaccctggaagactttggcagcccaatctgggtggacagggtggacatgggactcaggcccgtgagttacacagactccagtgtgaccccttcagtggatagctctatcgtgcttacagctgctagtgtgcagtccatgcccgacaccgaggagtcgcgtctttacggtgatgatgcaacctacctggctgaaggcgggcgcagacaacacagctacacatctaatggccccactttcatggagacagcttcttttaaaaagaaaaggagcaagagcgccgatatttggcgggaagattcactcgagttctccctgagcgatctgtcacaggagcacctgaccagtaatgaagaaatcctcggctctgcggaggaaaaggactgcgaggaagcccgcggcatggagactcgtgcctccccacggcaactctctacttag

SEQ ID NO: 277207 - DNA, 3216 bp, Artificial Sequence
  derived and/or modified sequence
atggaaacggcctcattcaaaaagaaaagatcaaaatcggcagacatttggcgggaggactctctcgaattctcgctgagcgatctgtctcaggagcacctcacttcgaatgaggaaatcctgggctctgcagaagagaaagattgcgaagaagccagaggaatggaaacgcgggcttccccaagacagctgagcacctgccaacgggctaattccctcggcgacctttatgcacagaagaacagtggggtcacggcgaatggcggaccaggatctaaatttgccggatactgccgtaatctcgtgtcagatattccaaatctggcgaaccataaaatgcctcctgctgccgcagaagagactcccccttactcaaactacaacacattgccctgtcgaaaaagccactgtctgtctgaaggggcaacaaatccacagatctcccatagcaatagcatgcagggacggagagcaaaaactacacaggacgtcaacgccggtgaggggtccgaattcgctgattccggcatcgaaggcgctactacagacaccgatctcttaagtaggaggagcaatgcaaccaactcgtcctattctcccaccaccggaagagcattcgtcggaagtgatagcggatcttctagtacgggcgacgccgctcgccaaggtgtctacgaaaatttccgcagggagctggaaatgagtacaaccaatagcgagtccctcgaggaggcgggaagcgcacattccgacgagcaaagttctggaactctatctagccccggtcagtcggacatcctgctaacagcagcacaagggacggtgagaaaagctggtgcgcttgccgtgaagaatttccttgtgcacaaaaagaataagaaagtggaatctgccacccggaggaagtggaaacactactgggtgtccctgaagggatgcacactgtttttttacgagagcgatggaagatcgggtattgaccacaactcaatacccaaacatgcagtgtgggtcgaaaatagtatagtgcaagcagtgcccgagcacccaaagaaggactttgtgttttgcctttctaatagtttgggggacgcgttcctgtttcaaacaacatctcaaaccgagctggagaactggattacagccatccattctgcctgtgctactgccgtcgcacgccaccatcataaggaggataccctgagactgttgaagtctgagatcaaaaagttggagcaaaagatcgacatggatgaaaaaatgaagaaaatgggtgagatgcagctgtcctccgtgactgacagcaaaaagaaaaaaacaatcttggaccaaatttttgtgtgggaacagaacctggagcagtttcagatggacctgttccgttttcgatgctaccttgcttctttacaggggggagagttgcctaacccaaagcggctgctggcctttgcctcaaggcccactaaggtcgcaatgggccgtttaggaattttctctgtgtcgagctttcacgctctggttgctgccaggaccggggaaacaggcgtgagacggagaacccaggcaatgtcacgatctgcaagcaaacgacgcagtagattcagctcactgtgggggctggatacaaccagcaagaaaaagcagggccgaccatctattaatcaggtgttcggggagggaactgaagccgtgaagaaatctctagaaggtatcttcgatgatatagtgccggatggtaagagagagaaagaggttgtgctcccgaatgtgcaccagcacaaccccgactgcgatatatgggttcatgagtacttcacacctagctggttttgcttacccaacaatcagcccgcattgaccgtcgtccggccaggggatacagcgagagatacgctggagctgatttgcaaaacccatcaacttgaccattcagcacattacctgaggttgaagttcctcatcgagaacaaaatgcagctgtacgtcccacagcccgaagaagatatctatgaacttttgtacaaggagattgaaatctgtcccaaggtgacacaatcaattcatatcgaaaaaagtgacacggccgctgacacttatggatttagcctttccagtgtggaggaagatggtattaggcgcctttatgtcaatagtgtgaaagagactggattagccagcaagaagggtctcaaggctggagacgagattctcgagatcaataaccgcgcagcagatgccctgaacagctccatgctcaaagactttctgtcccagccttccctgggactcctggtcaggacctaccctgaactggaggagggtgtggagctgctggagtcacccccacacagggtcgatggacctgccgacttaggcgaatcaccattggcctttctgacctctaaccctggacactcgctgtgctctgagcagggaagctccgctgagaccgcaccagaagaaacggaaggccctgacctggaatcttcggatgagaccgatcacagttccaagtcaacggagcaagtcgcagccttctgccggagcttacacgagatgaatccttccgatcaatccccatcacctcaggactccaccggcccacagttggcaaccatgagacaactgtcagacgcagacaaacttcgaaaagtgatctgcgaactcttagagacagagcgcacatatgttaaggacctcaactgccttatggagaggtacctgaaacctctgcagaaggagacgtttctaactcaggacgaactggacgttctgtttggaaaccttaccgaaatggtggagttccaggttgagttcctaaagactctggaggacggagtaaggttagtacccgatttggaaaagcttgagaaggtggatcaattcaagaaggtgctgttttcccttggcggaagctttttatactacgctgatagatttaagctctatagcgccttctgcgcacacaagtcctcccaggggcctggcgagtcacaggatcggcatggattccaaggcatactggggtgtccagagcctgaagcagctgccttaatccatgccggtgtcgtgccacatcaggcgcacccagaggatccgcaagtccccacaagcgcccagggggcagtccgccctgaccgatgtggagagcgaggagcattgcctccagggagagggcaccaggaccatgaacagggctgtcagagccaccagtag

SEQ ID NO: 277208 - DNA, 678 bp, Artificial Sequence
  derived and/or modified sequence
atgggtaacgctgaaagccagcatgttgaacacgaattttatggggagaaacatgcttctctgggcagaaagcacaccagcagatccctcagacttagtcacaaaaccaggcggacaaggcatgcgtcatctggaaaggtgatacaccgcaacagcgaagtctcaacaagaagttctagtaccccttccatcccccagagtctggcagagaacggtctggagccattcagtcaggatggaaccctcgaggactttggatcccctatttgggttgatcgggtagatatggggctgagacccgtcagctatacagacagcagcgtgacccccagtgtcgacagttccattgtgctgaccgctgcctccgtccagtcgatgcctgataccgaagaaagcaggttatacggcgatgacgccacgtacttggcggaggggggaaggcgccagcactcgtacactagcaacggcccaacgttcatggagaccgcctccttcaaaaagaagagatcgaagagcgccgacatctggcgggaggatagcctcgaatttagcttaagcgatctttcccaagagcacctaacttccaacgaggaaatccttggtagcgccgaggagaaggattgcgaagaagctagagggatggagactagagcttccccacgtcagctgagtacatag

SEQ ID NO: 277209 - DNA, 7193 bp, Artificial Sequence
  derived and/or modified sequence
gccccgcatcgtgcccggccccgtcgcggagatcccggacgaccgtcgcgggttgatggtcgcattccagatgtaaacagcttcagaagcctgacggtcatatggtagaatcactgtggactgagacccacctttctagacctgaagcccaggaggaggaagaggaggctggttggtaccatgggcataatgctctgaatcctagtctctcacctagtatgtgagcagtccctgcagatggcccatttggagatcttgacaaagcctcttctgtttccaatggggtttttggcgcattctcacagacttagatgaaactgtgatggccaccgcagggggcaggtgctgacatcgtccccagccctgtggctgttcatccggacatcatttccaacctcaatatctaaatgccacagtgctcttggagcaagttgggctggggaccactgttgccttttaagaccataaaaccatgggaaacgcagaaagtcaacatgtagagcacgagttttatggagaaaagcatgccagcctggggcgcaagcacacttcccgctccctgcgcctctcgcacaagacgcggaggaccaggcacgcttcctcggggaaggtgatccacaggaactccgaagtgagcacccgatccagcagcacccccagcatcccccagtccctggctgaaaatggcctggagcccttctcccaagatggtaccctagaagacttcgggagccccatctgggtggaccgagtggacatgggcttgagacctgtgtcttacactgactcttctgtcactcccagcgtagacagcagcatcgtcctcacagcagcctctgtgcagagcatgccagacactgaggagagcaggctttacggggatgacgctacatatttggctgagggaggcaggaggcagcattcctatacatccaatgggcccactttcatggagacggcgagctttaagaagaaacgctccaaatctgcagacatctggcgggaggacagcctggaattctcactctctgatctgagccaagaacatttaacaagcaacgaagaaatcttgggttccgccgaagagaaggactgcgaggaggctcgggggatggaaacgcgggcgagtccgcggcagctcagcacctgtcagagagccaattccttgggtgacttgtatgctcagaaaaactctggagtgacagcaaacggggggccggggagcaaatttgcaggctactgtcggaatttggtgtctgatattcccaatcttgcaaaccataagatgccaccagctgctgctgaagagactcctccgtacagtaattataacacacttccctgtaggaaatctcactgtctctctgaaggtgccaccaacccacaaattagccatagcaacagcatgcaaggcagaagagctaaaacaactcaggatgttaatgcaggcgagggcagtgagtttgcagacagtgggattgaaggggccactaccgacacggacctcctgtccaggcgatctaatgccaccaactccagctactcacccaccacaggccgggcctttgtgggcagcgacagcggcagcagctccaccggggatgcggctcgtcagggggtgtacgagaacttccggcgggagctggagatgagcaccaccaacagcgagagcctggaggaggccggctcggcgcacagcgatgagcagagcagcggcaccctgagctctccgggccagtcggacatcctgctgaccgccgcacagggcacggtgcgcaaggccggcgccctggccgtcaagaacttcctggtgcacaagaagaacaagaaggtggagtcagccacccggaggaagtggaagcactactgggtgtccctgaaaggatgcacgctatttttctacgagagcgacggcaggtctgggatagaccacaacagcatccccaaacacgccgtctgggtggagaacagcattgtgcaggcggtgcctgagcaccccaagaaggactttgtcttctgcctcagcaattccctgggtgatgccttcctttttcagaccactagccagacggagcttgaaaactggatcaccgccatccactctgcctgcgccactgcggtcgcgaggcaccaccacaaggaagacacgctccgactcctgaaatcagagatcaaaaaactggaacagaagattgacatggatgaaaagatgaagaaaatgggtgaaatgcagctgtcttcagtcactgactcaaagaaaaagaaaacaatattagatcagatctttgtctgggagcaaaatctcgagcagttccaaatggacctgtttcgtttccgctgttatttagccagccttcagggtggggagctgccaaaccccaaaaggcttctcgcttttgcaagtcgaccaacgaaagtggccatgggccgccttggaatcttttcggtatcatcgtttcatgccctggtggcagcacgcactggtgaaactggagtgagaagacgtactcaggccatgtccagatccgcgagcaagcgaaggagcaggttttcttctctgtggggtctggatactacctccaaaaagaagcagggacggccaagcatcaatcaggtgtttggagagggaaccgaagctgtaaagaaatctttagagggaatatttgatgacattgttccagatggcaagagggagaaagaagtggtcttacctaacgttcaccagcacaaccctgactgcgacatttgggtccacgagtatttcactccatcctggttctgtctgcccaataatcagcctgccctgacggtcgtccggccaggcgacactgcacgggacaccctggagctgatttgcaagacacatcaactggatcattctgctcattacctgcgcctgaaatttctaatagaaaacaaaatgcagctctatgttccacagcccgaggaagacatctatgagctgctgtacaaagaaattgaaatctgtccaaaagtcactcagagcatccacattgagaagtcagatacagctgctgatacttacgggttttcactttcttctgtggaagaagatggtattcgaaggctgtacgtgaatagtgtgaaggaaaccggtttagcttccaagaaaggcctgaaagcaggagatgagattcttgagatcaataatcgtgctgctgacgccctgaactcttctatgctcaaagatttcctctcacagccctcgctgggcctcctggtgaggacctaccccgagctggaggaaggagtggagctgctggaaagcccgccccaccgagtggacggccctgccgaccttggcgagagccccctcgcctttctcaccagcaacccagggcacagcctttgcagcgagcagggcagcagtgctgagaccgctccagaggagaccgaggggccagacttggaatcctcagatgagactgatcacagcagcaagagtacagaacaggtggccgcattttgccgcagtttgcatgagatgaacccctctgaccagagcccatctcctcaggactccacggggcctcagctggcgaccatgagacaactctcggatgcagataagctgcgcaaggtgatctgcgagctcctggagacggagcgcacctacgtgaaggatttaaactgtcttatggagagatacctaaagcctcttcaaaaagaaacttttctcacccaggatgagcttgacgtgctttttggaaatttaacggaaatggtagagtttcaagtagaattccttaaaactctagaagatggagtgagactggtacctgatttggaaaagcttgagaaggttgatcaatttaagaaagtgctgttctctctggggggatcattcctgtattatgctgaccgcttcaagctctacagtgccttctgcgcccacaaaagttcccaaggtcctggtgaaagccaagacagacacggctttcaaggcattcttggatgcccagaacccgaagcagcagcactcatccacgctggagtcgtacctcatcaagcccatccagaggatcctcaagtacccacttctgctcagggagctgttcgccctgaccgatgcggagagcgaggagcactaccacctggacgtggccatcaagaccatgaacaaggttgccagtcacatcaatgagatgcagaaaatccatgaagagtttggggctgtgtttgaccagctgattgctgaacagactggtgagaaaaaagaggttgcagatctgagcatgggagacctgcttttgcacactaccgtgatctggctgaacccgccggcctcgctgggcaagtggaaaaaggaaccagagttggcagcattcgtcttcaaaactgctgtggtccttgtgtataaagatggttccaaacagaagaagaaacttgtaggatctcacaggctttccatttatgaggactgggaccccttcagatttcgacacatgatccccacggaagcgctgcaggttcgagctttggcgagtgcagatgcagaggcaaatgccgtgtgtgaaattgtccatgtaaaatccgagtctgaagggaggccggagagggtctttcacttgtgctgcagctccccagagagccgaaaggatttcctaaaggctgtgcattcaatcctgcgtgataagcacagaagacagctcctcaaaaccgagagccttccctcatcccagcaatatgtcccttttggaggcaaaagattgtgtgcactgaagggggccaggccggccatgagcagggcagtgtctgccccaagcaagtctcttgggaggaggaggcggcggctggctcgaaacaggtttaccattgattctgatgccgtctccgcaagcagcccggagaaagagtcccagcagccccccggtggtggggacactgaccgatgggtagaggagcagtttgatcttgctcagtatgaggagcaagatgacatcaaggagacagacatcctcagtgacgatgatgagttctgtgagtccgtgaagggtgcctcagtggacagagacctgcaggagcggcttcaggccacctccatcagtcagcgggaaagaggccggaaaaccctggatagtcacgcgtcccgcatggcacagctcaagaagcaagctgccctgtcggggatcaatggaggcctggagagcgcaagcgaggaagtcatttgggttaggcgtgaagactttgccccctccaggaaactgaacactgagatctgactgcgtcacctgccccgtagagaatgtgtgtagatacttcctgccctaactctgcccaccctcctgtaccgtcgacaagaatgtccccttaggtcgcgctcttgcacacacggttttggcagctgacttggttctgaagccatgtagccacccaactttgtcattttcaacaacatcagaaagaattgatcagaatcccaaataagcttgagtcctatcttctgtatattactaagggcttttatttattctcaataaatcagggcctgaacaattaaaagaaaaaagattctatagcactggaaagcaaatcaccccaggagttaacggatgtacaacagattaatttaagggatagtagcacacacacgatccttctatctgaaatcagtctcctagctggggaaacctctttcacacacaaaatgaaatgtgtacagcttgccgtgttctgactgtacccttccctcttccatgtctgagaatctccgtgtattttaagaatgtgtgaggagagggtggcgattcatgtttcaatgagcctctttttttttttccttcctgttttggtctatggctggtcttactctgtgtccatgttcggaagctctagttttgcatagaattatagagatgccaaactctttgaaaagagatccaaatttatcgcttgagagaaagaaaagaaacactattttttgtattttacctgagatacaggggcacaaatagatgagaattttacagtgttagtgtatgtatccctgagcctaaaaaatgaggatataaccttttacagagagagtgaggcgtggtggttttatatttatatatgaaaggccagcaagctcatgcgaaggatatacttttcttccaaaaagcggattttttttttttaatgtttgaatctatatttgagatgggagtttggttggattaaacatgacaccccggtgggcggtgtgtgtgtctgttgcacatggcagggaggggagcctccttctcatggggttgccatggtgatcattggtttttccatcaaaattgcatcttcatccatagattaccttccccttccctgacagtccataaccaaacctttaaacagaacaacctctttaaaaacttctcttgtgtttaacactttcttcatgccaacgaaacagggtaaacatgctcaaaacattaacagtctaaacagatatccaaatactaagaagaaaaacaagttatagcactttcaattttttttttttttttaaaaaaaggtttatagctttttcttttcccatgtcacaatgtccacttcctaagaagggtttaaaatactatgaaaactttctttttggggaaaatatctatttggtgtttgacacatcagtaggtactttaaagacctgaattttatagtagctttaggagttatattttataaaaatcagttatgactttatatttccagacaatagagagttcagtacatcatgctcttgtgcctctgcctgcttttcctgcgttcccaccctgtattccccccgcctttcgggtttccagggcttcgagcttgatcttttgaaagttttattctattaaatttttgctatatcttctggttttctgaaaaagctttagaatggtttctataccctttgtatcactgcatttttccatatcatctccggttcgatcgcgtccagatggaaaacggaagcagaggcttctaatcgtcgcatttactggctccagtgcaacacatccatctgaaaacactcggaagtctggtgcttggagagggtgccattgtctcttgtacataaggtcatgacgtgtctatgtcaaaagttcttatatatttcttttataagctgaaagaaggtctatttttatgtttttaggtctatgaatggaacgttgtaaatgcttgtcaaacaataaaaataacgaaaagtg

SEQ ID NO: 277210 - DNA, 1187 bp, Artificial Sequence
  derived and/or modified sequence
atcatagcacgaaacttcacaagttacacccactgcctccgccagcagccggggaaggctgctgcttcctcatttctgttactggaagtttgggacatgtgaagccagacggggagaaacgtgcgcgccttgttgagcagcggtagaatcactgtggactgagacccacctttctagacctgaagcccaggaggaggaagaggaggctggttggtaccatgggcataatgctctgaatcctagtctctcacctagtatgtgagcagtccctgcagatggcccatttggagatcttgacaaagcctcttctgtttccaatggggtttttggcgcattctcacagacttagatgaaactgtgatggccaccgcagggggcaggtgctgacatcgtccccagccctgtggctgttcatccggacatcatttccaacctcaatatctaaatgccacagtgctcttggagcaagttgggctggggaccactgttgccttttaagaccataaaaccatgggaaacgcagaaagtcaacatgtagagcacgagttttatggagaaaagcatgccagcctggggcgcaagcacacttcccgctccctgcgcctctcgcacaagacgcggaggaccaggcacgcttcctcggggaaggtgatccacaggaactccgaagtgagcacccgatccagcagcacccccagcatcccccagtccctggctgaaaatggcctggagcccttctcccaagatggtaccctagaagacttcgggagccccatctgggtggaccgagtggacatgggcttgagacctgtgtcttacactgactcttctgtcactcccagcgtagacagcagcatcgtcctcacagcagcctctgtgcagagcatgccagacactgaggagagcaggctttacggggatgacgctacatatttggctgagggaggcaggaggcagcattcctatacatccaatgggcccactttcatggagacggcgagctttaagaagaaacgctccaaatctgcagacatctggcgggaggacagcctggaattctcactctctgatctgagccaagaacatttaacaagcaacgaagaaatcttgggttccgccgaagagaaggactgcgaggaggctcgggggatggaaacgcgggcgagtccgcggcagctcagcacctg

SEQ ID NO: 277211 - protein, 79 aa, Artificial Sequence
  derived and/or modified sequence
MALNSGSPPAIGPYYENHGYQPENPYPAQPTVVPTVYEVHPAQYYPSPVPQYAPRVLTQASNPVVCTQPKSPSGTVCTS

SEQ ID NO: 277212 - protein, 780 aa, Artificial Sequence
  derived and/or modified sequence
MDNFAEGDFTVADYALLEDCPHVDDCVFAAEFMSNDYVRVTQLYCDGVGVQYKDYIQSERNLEFDICSIWCSKPISVLQDYCDAIKINIFWPLLFQHQNSSVISRLHPCVDANNSRASEINLKKLQHLELMEDIVDLAKKVANDSFLIGGLLRIGCKIENKILAMEEALNWIKYAGDVTILTKLGSIDNCWPMLSIFFTEYKYHITKIVMEDCNLLEELKTQSCMDCIEEGELMKMKGNEEFSKERFDIAIIYYTRAIEYRPENYLLYGNRALCFLRTGQFRNALGDGKRATILKNTWPKGHYRYCDALSMLGEYDWALQANIKAQKLCKNDPEGIKDLIQQHVKLQKQIEDLQGRTANKDPIKAFYENRAYTPRSLSAPIFTTSLNFVEKERDFRKINHEMANGGNQNLKVADEALKVDDCDCHPEFSPPSSQPPKHKGKQKSRNNESEKFSSSSPLTLPADLKNILEKQFSKSSRAAHQDFANIMKMLRSLIQDGYMALLEQRCRSAAQAFTELLNGLDPQKIKQLNLAMINYVLVVYGLAISLLGIGQPEELSEAENQFKRIIEHYPSEGLDCLAYCGIGKVYLKKNRFLEALNHFEKARTLIYRLPGVLTWPTSNVIIEESQPQKIKMLLEKFVEECKFPPVPDAICCYQKCHGYSKIQIYITDPDFKGFIRISCCQYCKIEFHMNCWKKLKTTTFNDKIDKDFLQGICLTPDCEGVISKIIIFSSGGEVKCEFEHKVIKEKVPPRPILKQKCSSLEKLRLKEDKKLKRKIQKKEA

SEQ ID NO: 277213 - DNA, 2343 bp, Artificial Sequence
  derived and/or modified sequence
atggacaacttcgccgagggcgacttcaccgtggccgactacgccctgctggaggactgcccccacgtggacgactgcgtgttcgccgccgagttcatgagcaacgactacgtgagagtgacccagctgtactgcgacggcgtgggcgtgcagtacaaggactacatccagagcgagagaaacctggagttcgacatctgcagcatctggtgcagcaagcccatcagcgtgctgcaggactactgcgacgccatcaagatcaacatcttctggcccctgctgttccagcaccagaacagcagcgtgatcagcagactgcacccctgcgtggacgccaacaacagcagagccagcgagatcaacctgaagaagctgcagcacctggagctgatggaggacatcgtggacctggccaagaaggtggccaacgacagcttcctgatcggcggcctgctgagaatcggctgcaagatcgagaacaagatcctggccatggaggaggccctgaactggatcaagtacgccggcgacgtgaccatcctgaccaagctgggcagcatcgacaactgctggcccatgctgagcatcttcttcaccgagtacaagtaccacatcaccaagatcgtgatggaggactgcaacctgctggaggagctgaagacccagagctgcatggactgcatcgaggagggcgagctgatgaagatgaagggcaacgaggagttcagcaaggagagattcgacatcgccatcatctactacaccagagccatcgagtacagacccgagaactacctgctgtacggcaacagagccctgtgcttcctgagaaccggccagttcagaaacgccctgggcgacggcaagagagccaccatcctgaagaacacctggcccaagggccactacagatactgcgacgccctgagcatgctgggcgagtacgactgggccctgcaggccaacatcaaggcccagaagctgtgcaagaacgaccccgagggcatcaaggacctgatccagcagcacgtgaagctgcagaagcagatcgaggacctgcagggcagaaccgccaacaaggaccccatcaaggccttctacgagaacagagcctacacccccagaagcctgagcgcccccatcttcaccaccagcctgaacttcgtggagaaggagagagacttcagaaagatcaaccacgagatggccaacggcggcaaccagaacctgaaggtggccgacgaggccctgaaggtggacgactgcgactgccaccccgagttcagcccccccagcagccagccccccaagcacaagggcaagcagaagagcagaaacaacgagagcgagaagttcagcagcagcagccccctgaccctgcccgccgacctgaagaacatcctggagaagcagttcagcaagagcagcagagccgcccaccaggacttcgccaacatcatgaagatgctgagaagcctgatccaggacggctacatggccctgctggagcagagatgcagaagcgccgcccaggccttcaccgagctgctgaacggcctggacccccagaagatcaagcagctgaacctggccatgatcaactacgtgctggtggtgtacggcctggccatcagcctgctgggcatcggccagcccgaggagctgagcgaggccgagaaccagttcaagagaatcatcgagcactaccccagcgagggcctggactgcctggcctactgcggcatcggcaaggtgtacctgaagaagaacagattcctggaggccctgaaccacttcgagaaggccagaaccctgatctacagactgcccggcgtgctgacctggcccaccagcaacgtgatcatcgaggagagccagccccagaagatcaagatgctgctggagaagttcgtggaggagtgcaagttcccccccgtgcccgacgccatctgctgctaccagaagtgccacggctacagcaagatccagatctacatcaccgaccccgacttcaagggcttcatcagaatcagctgctgccagtactgcaagatcgagttccacatgaactgctggaagaagctgaagaccaccaccttcaacgacaagatcgacaaggacttcctgcagggcatctgcctgacccccgactgcgagggcgtgatcagcaagatcatcatcttcagcagcggcggcgaggtgaagtgcgagttcgagcacaaggtgatcaaggagaaggtgccccccagacccatcctgaagcagaagtgcagcagcctggagaagctgagactgaaggaggacaagaagctgaagagaaagatccagaagaaggaggcctag

SEQ ID NO: 277214 - DNA, 2343 bp, Artificial Sequence
  derived and/or modified sequence
atggataacttcgccgagggtgactttacagtggccgactacgccctgctggaggattgtccacacgtggacgactgcgtttttgcggccgagtttatgtcgaacgattatgtgcgtgttacgcagctgtactgcgatggagtgggagtgcagtacaaggactatatccagagtgaaaggaacctggagttcgacatctgcagcatatggtgtagtaagcctatcagtgttctgcaggactattgtgatgcaattaagatcaacatcttctggcctctattgtttcagcatcagaactcaagcgtgatttctcgtcttcatccctgtgtggacgcaaataactccagggcctctgaaattaatctgaaaaaattgcagcatctagagctaatggaagatatcgtggatttggccaagaaagtagccaacgacagcttccttatcggcggcttgctacgcataggatgcaaaatcgagaataagatacttgctatggaggaagctctgaactggatcaagtatgccggggatgtaacaatcctgaccaagttgggatctatcgacaattgttggcctatgctgtctatattttttaccgagtacaaataccatatcactaagatcgtcatggaagattgtaacctgttagaggagctgaaaacacagtcttgcatggactgcatcgaggaaggcgaactgatgaagatgaaggggaatgaagagttcagcaaggaacggtttgatatagccatcatctactacaccagggctattgagtaccgacccgaaaattacctgctctacggtaatcgggctctctgcttcctgcgaaccggccagttccgtaatgcgctaggtgacgggaagcgggccacgattctgaaaaatacgtggccaaaaggacattatcgttattgcgacgccctctcaatgctgggcgagtatgactgggctctccaggctaatattaaggctcagaagctgtgcaaaaatgatccagaggggataaaagatctgatccagcagcacgtcaagctccaaaaacagatcgaagatcttcaggggaggacagcgaataaagatccgattaaggccttttatgaaaatagggcgtataccccccggagcctgtcggctccgatctttacaacttcactcaactttgtcgaaaaggagagggatttccgtaaaatcaaccacgaaatggccaacgggggcaaccaaaacttgaaagtcgccgacgaagctctcaaggttgatgactgcgactgccaccctgaattctccccgccaagctcccagcccccaaaacacaaaggaaagcaaaagagtaggaataacgaaagcgaaaaattctcatccagctcccctctgactctaccagctgacctgaagaacattctagagaaacagttctcgaaatccagccgagctgctcaccaggatttcgccaatatcatgaagatgctgcgatcactgatccaggatggctatatggcacttctggagcagaggtgtcgctctgctgctcaggccttcacggagctgctgaatggcctggaccctcagaagatcaagcagctgaatttagcgatgatcaactacgtgttagtggtgtatggtcttgcgatcagtcttttaggaatcggccaaccagaggaactgtctgaagccgagaaccagttcaaacgcatcattgagcactacccctccgagggcctagactgcctggcctactgcgggatcgggaaagtgtatctgaaaaagaataggttccttgaagcactcaaccactttgaaaaggcccgcaccctgatctaccggttacccggagtgctgacctggccgacctccaacgtgattatcgaggagagtcagccccaaaaaattaagatgctattggaaaagttcgtcgaggaatgtaagttcccacctgtgccagatgctatctgttgttaccagaaatgccacgggtactccaaaatccagatctatattacagaccctgactttaaagggtttatcaggatctcttgttgtcagtactgtaagattgagtttcacatgaattgttggaaaaagctcaagaccacgacgtttaacgataaaatcgacaaagatttcttgcaaggaatttgcttgacacctgactgcgagggagttatttccaagattattattttttccagtggtggggaggtcaagtgcgaattcgagcataaggtgatcaaagaaaaagtgcccccccgcccgatactaaagcaaaaatgctcaagtctcgaaaagctccgtctgaaggaggacaaaaagctgaaaagaaagatccaaaagaaggaggcctag

SEQ ID NO: 277215 - DNA, 2343 bp, Artificial Sequence
  derived and/or modified sequence
atggacaactttgctgagggggacttcaccgtggccgactatgccctgctggaggactgcccccacgtggatgactgtgtgtttgctgctgagttcatgagcaatgactatgtgcgggtgacccagctgtactgtgatggagtgggcgtgcagtacaaggactacatccagagcgagaggaacctggagtttgacatctgcagcatctggtgcagcaagcccatctctgtgctgcaggactactgtgatgccatcaagatcaacatcttctggcccctgctcttccagcaccagaacagcagcgtcatcagccggctgcacccctgtgtggatgccaacaacagccgggccagcgagatcaacctgaagaagctgcagcacctggagctgatggaggacatcgtggacctggccaagaaggtggccaatgacagcttcctgattggaggcctgctgcgcatcggctgcaagattgagaacaagatcctggccatggaggaggccctgaactggatcaagtatgctggagatgtgaccatcctgaccaagctgggcagcattgacaactgctggcccatgctgagcatcttcttcacagagtacaagtaccacatcaccaagatcgtgatggaggactgcaacctgctggaggagctgaagacccagagctgcatggactgcatcgaggagggggagctgatgaagatgaagggaaatgaggagttcagcaaggagagatttgatattgccatcatctactacacccgggccatcgagtacagacctgagaactacctgctgtatggcaacagagccctgtgcttcctgaggacaggccagttcagaaatgccctgggagatggcaagagggccaccatcctgaagaacacctggcccaagggccactaccgctactgtgatgccctgtccatgctgggggagtatgactgggccctgcaggccaacatcaaggcccagaagctgtgcaagaatgaccctgagggcatcaaggacctgatccagcagcacgtgaagctgcagaagcagatcgaggacctgcagggccgcacagccaacaaggaccccatcaaggccttctatgagaacagagcctacacccccaggagcctgagcgcccccatcttcaccaccagcctgaactttgtggagaaggagcgggacttcaggaagatcaaccacgagatggccaacggcggcaaccagaacctgaaggtggctgatgaggccctgaaggtggatgactgtgactgccaccctgagttcagcccccccagcagccagccccccaagcacaagggcaagcagaagagcagaaataatgaaagtgagaagttcagcagcagcagccccctgaccctgcctgctgacctgaagaacatcctggagaagcagttcagcaagagcagccgggccgcccaccaggactttgccaacatcatgaagatgctgcggagcctcatccaggacggctacatggccctgctggagcagcgctgccgctctgctgcccaggccttcacagagctgctgaatggcctggacccccagaagatcaagcagctgaacctggccatgatcaactacgtgctggtggtgtatggcctggccatcagcctgctgggcatcggccagcctgaggagctgtctgaggccgagaaccagttcaagaggatcatcgagcactaccccagcgagggcctggactgcctggcctactgcggcatcggcaaggtgtacctgaagaagaaccgcttcctggaggccctgaaccactttgagaaggcccggaccctcatctaccgcctgcccggggtgctgacctggcccaccagcaatgtcatcatcgaggagagccagccccagaagatcaagatgctgctggagaagtttgtggaggagtgcaagttcccccctgtgcctgatgccatctgctgctaccagaagtgccacggctacagcaagatccagatctacatcacagatcctgacttcaagggcttcatccgcatcagctgctgccagtactgcaagattgagttccacatgaactgctggaagaagctgaagaccaccaccttcaatgacaagattgacaaggacttcctgcagggcatctgcctgaccccagactgtgagggcgtcatcagcaagatcatcatcttcagcagcggcggggaggtgaagtgtgaatttgagcacaaggtgatcaaggagaaggtgcccccccggcccatcctgaagcagaagtgcagcagcctggagaagctgcggctgaaggaggacaagaagctgaagaggaagatccagaagaaggaggcctag

SEQ ID NO: 277216 - DNA, 2343 bp, Artificial Sequence
  derived and/or modified sequence
atggacaacttcgccgagggcgacttcaccgtggccgactacgccctgctcgaagactgcccccacgtcgacgactgcgtgttcgccgcagagtttatgtctaatgattacgtgcgtgtaacgcagttgtattgtgacggcgtgggagtccagtacaaagattatattcaaagtgagcgaaacttagaatttgacatttgctcaatttggtgtagtaagccaatttcggtgctgcaggattattgcgatgccatcaagattaatattttttggcccctgctgtttcagcatcagaattcctcagtcattagcagattgcacccctgcgtggacgccaacaactctcgggcctcagaaatcaatctgaaaaaattacagcacttggaactaatggaagatattgtcgacttagcaaaaaaagtcgcaaatgactctttccttatcggggggttgctgcgcattggttgcaagatagaaaacaagatactagcaatggaagaagcactaaattggatcaagtacgccggcgacgtgaccatcctcaccaaactcggatccattgataattgctggcctatgctttcgatcttcttcactgagtataaataccatatcaccaaaattgtgatggaggactgcaatctgttagaagaacttaagacccaatcatgtatggattgtatcgaggagggcgagctgatgaaaatgaaagggaatgaggagtttagcaaagagcggttcgatattgctattatttactatacgagggcaatcgagtacaggcccgaaaactatctcttatacggcaacagggccctttgcttcttgcgaaccggccagttccggaacgcactcggagacggaaaacgcgccacaatcctaaaaaatacatggcctaaaggtcactaccggtactgcgatgctttaagtatgctaggggaatatgattgggccctgcaggctaatatcaaggcccaaaagctctgtaaaaacgatcccgaaggcattaaggatctgatccagcagcatgtgaaacttcagaaacagatcgaagacctgcagggccgcacggcgaataaggacccgataaaagcattctacgagaacagggcctatacccctaggtcactgtctgctcctatattcacaacatccctcaattttgtggaaaaggagcgagatttccggaagatcaatcatgaaatggccaatgggggcaatcaaaatctgaaagttgccgacgaggcactcaaggttgacgactgtgactgtcaccctgaattcagtcctccaagtagtcagccaccaaagcacaaggggaagcagaaaagccggaataatgaatccgaaaagttttccagttccagtcctcttacattgcctgccgatctgaaaaacatcttggaaaagcagttttcgaagtcctcacgcgccgcacatcaagacttcgctaatattatgaagatgctccggagtctgattcaggacggctatatggccctgcttgagcagcgttgtcggtcagccgcccaggcctttaccgagctgctcaacggcctggatccccagaagattaagcagcttaatctcgctatgattaactatgtgctggtagtatacgggctcgccatttccctgctgggcataggccaaccggaagaactcagcgaagcagagaaccagttcaagcggattatcgaacattatcccagcgaaggactggactgtttggcttactgcgggatcggaaaggtctacttgaagaaaaaccggtttctggaagccctgaaccacttcgaaaaagcccggacgcttatttataggctaccaggcgttctaacttggcccacatctaacgttatcatcgaagaatcccagccccaaaagatcaaaatgctgctcgagaaattcgtggaggaatgcaagtttccacccgtacccgacgctatttgttgttaccagaagtgtcacggctattctaagatccaaatctatataaccgaccctgatttcaagggctttatccgtatcagctgttgtcaatactgtaaaatagagttccacatgaattgctggaaaaagctaaaaacgactacctttaatgataagattgacaaggacttcttacaaggcatttgcctgactcccgattgcgagggcgtgattagtaagataattatcttctcgagtggaggtgaggtcaagtgtgagttcgagcacaaggtgattaaggaaaaggtcccacccaggccgattctgaagcagaagtgtagctctttagaaaagctgcgactcaaagaggataagaaactcaaacgcaagatccaaaaaaaggaggcttag

SEQ ID NO: 277217 - DNA, 2343 bp, Artificial Sequence
  derived and/or modified sequence
atggataacttcgccgagggggactttaccgtcgctgattacgctctgctggaagactgcccacatgtggatgattgtgtctttgccgcagagttcatgtcgaacgactacgtacgagtgactcagttgtattgcgatggcgttggcgtgcagtataaagattacatccagagtgagcggaacttggagttcgatatttgctcgatctggtgttccaaacccatcagcgtactacaggactactgcgatgcgattaaaataaatatcttctggccacttctttttcagcaccaaaactccagcgttatttctcggctgcatccttgcgtggacgctaacaattcgcgcgcttctgagatcaacctgaagaagttacagcacctcgagctcatggaagatattgtggacctggcaaagaaagttgccaatgactcctttctcatcggaggtttgctgcgcattgggtgtaagattgagaacaaaattttggccatggaagaggcactgaactggattaagtatgcaggcgacgtgaccatcctgacaaagctcggcagtattgacaactgttggccaatgctaagtattttcttcacggagtacaaataccatatcactaaaatcgtgatggaggactgtaatttactggaagaactgaagactcaatcctgcatggactgtattgaggaaggggaactaatgaagatgaagggaaacgaggagttctccaaggaacgctttgacattgcaatcatatactacacccgggcaattgagtaccgcccagaaaattatcttctctacggaaatagagctctgtgctttcttaggacaggccagttcaggaatgcccttggcgatggaaagcgggctactatcctgaaaaacacatggcccaaaggccactataggtattgcgacgctctctcaatgctcggggagtatgattgggccctgcaagctaatataaaagctcaaaaactctgtaaaaatgacccagagggcattaaggatcttatacaacaacatgttaagctgcaaaaacagatagaagatttgcaaggaagaaccgccaacaaggatcctattaaagcattttacgagaacagagcctatacaccgagatctctctcagccccaatctttacgacctccctgaactttgttgaaaaagagagagatttccgcaaaattaaccacgagatggcgaatggcggtaaccagaaccttaaggtcgccgatgaggcgcttaaggttgacgattgcgactgtcaccccgaattctcacctccctcctcacaacctccaaagcataaaggtaagcagaaatcacgcaacaatgagtccgagaaattttcgtcaagcagccccctgactctccctgctgacctgaaaaacatcctggaaaagcagttctcaaaatctagtagagcagcacaccaggatttcgccaacataatgaagatgctgagatctctgatccaggatggatatatggccctacttgaacagagatgtcggtccgccgcacaagccttcaccgaactcctcaatggcctcgacccacaaaagataaaacagctgaaccttgcgatgattaattacgtgctcgtggtgtacggcctcgcaatctcgctgctcgggatcggccagcccgaagagctatctgaagctgagaatcagttcaagaggatcatagaacactatcctagcgagggattggattgtctggcctactgtggtataggcaaagtgtacctgaagaagaaccggttcttggaagccttgaatcactttgaaaaggccagaacccttatctatcgactgcctggagtgctgacctggcccacctcaaacgtgataatcgaagagagtcagccacagaaaattaagatgctccttgaaaagttcgttgaggaatgcaagtttcctcccgtgccagacgctatttgttgctatcagaagtgccacggatacagcaagattcagatctatatcactgatccagactttaaaggatttattcggatcagctgctgtcagtactgcaagatagaatttcatatgaactgttggaagaagcttaagacaaccacctttaacgataagatagataaagacttcttgcagggaatctgtcttacccctgactgtgaaggggtcatatccaagataataattttcagtagcgggggagaagtgaaatgcgagtttgaacacaaggtaatcaaggagaaagtgccgccacgcccaattctaaagcagaaatgcagtagcctggagaagttgaggctgaaggaggacaagaaactcaagcggaaaattcagaagaaagaagcctag

SEQ ID NO: 277218 - DNA, 2451 bp, Artificial Sequence
  derived and/or modified sequence
cgccgtcggctgacgtggagggccggaggtggcggcggcggcggcggcggctgctgctgctgctgcccgcgtccgaggctcgcgggcggcgggcccggacttgtgcaccatggacaattttgctgagggagatttcactgtggcggattatgccttgttagaagattgccctcacgtggatgattgtgtctttgctgctgaatttatgagcaatgattatgttcgtgtgactcagctttactgtgatggggtgggtgtgcaatataaagattatatccaaagtgagaggaatttggaatttgacatctgcagtatatggtgtagtaaaccaatttctgtcctgcaagattattgcgatgccattaaaataaacatcttctggccacttctgtttcaacatcaaaacagttccgtaatatcacgattgcatccctgtgtggacgccaacaattcacgtgcttctgagataaatttgaagaaactacaacatcttgagttgatggaagatattgtggatttggcaaagaaagttgctaatgattcattccttattggaggcttattgagaattggttgtaaaatagaaaataaaatcttggcaatggaagaagctctgaattggataaaatatgcaggcgatgtaacaattctaactaaattaggatcaattgacaattgttggcctatgttaagtattttctttactgaatacaagtaccacataactaaaattgtaatggaagactgcaatttgcttgaagaacttaaaactcaaagttgtatggattgtatagaggaaggagaactaatgaaaatgaaaggaaatgaagagttttccaaagaaagatttgatatagctattatctattacaccagagccattgaatatagacctgaaaactaccttctttatggtaaccgagctctttgttttcttcgtactggacagtttagaaatgcactcggtgatggaaagagagccactattctgaagaacacttggccaaagggtcattatcgttattgtgatgctctttctatgctgggggaatatgactgggccctgcaagcaaacataaaagctcaaaaactctgtaaaaatgaccctgagggaatcaaggatctaattcagcagcatgtaaagttacaaaaacaaatagaagacctacaaggtcgaacagcaaataaggatccaattaaagccttttatgaaaacagggcctacacacctaggagtttatcagcacctatatttactacttcacttaactttgtggagaaggaaagagatttcagaaaaattaatcacgaaatggccaacggtggtaatcagaatctaaaggtggcggatgaggcgttgaaggtagatgattgtgactgtcatcctgaattttcaccaccatcaagtcagcctccaaaacataaaggaaaacaaaaatctcgaaacaatgaatcagaaaagttcagttctagttcaccattgactttaccagcagatttgaagaacatcttggagaaacagttttctaaatcttccagagctgcacaccaggattttgctaatataatgaaaatgctgagaagcttaattcaagatggctatatggccttattggagcagcgttgccgcagcgctgcacaggcctttacagagttgctgaacggtttagatcctcaaaaaataaagcaattgaacctggccatgattaactatgttttggtcgtctatggacttgccatttctctccttggaataggacagcctgaggaattatctgaagccgaaaaccagtttaagaggattattgaacactaccccagtgagggccttgattgcttggcctactgtggaattggaaaagtatatttgaaaaaaaacagatttctagaagctctcaatcactttgagaaagcaagaaccttgatttatcgtcttcctggagtgttaacttggcccacgagtaatgtgattattgaagagtctcagccacaaaaaataaagatgctgttagagaaatttgttgaagaatgcaagttccctccagtgccagatgccatttgttgctatcagaagtgccatggatattctaagatccagatatacataactgatccagactttaagggttttatacgcatcagctgttgccagtactgtaaaatagaatttcacatgaattgctggaagaagttaaaaactacaacctttaatgataaaattgacaaggattttctacaaggaatatgtcttacccctgactgtgaaggtgtcatttctaagattatcatcttcagcagtggtggtgaagttaaatgtgaatttgaacacaaggtcataaaagaaaaggttcctccaagacctattctgaaacagaaatgttctagcctagagaaactaagactgaaagaagacaaaaaattgaagagaaagatccaaaaaaaagaagcaaa

SEQ ID NO: 277219 - protein, 612 aa, Artificial Sequence
  derived and/or modified sequence
MLGEYDWALQANIKAQKLCKNDPEGIKDLIQQHVKLQKQIEDLQGRTANKDPIKAFYENRAYTPRSLSAPIFTTSLNFVEKERDFRKINHEMANGGNQNLKVADEALKVDDCDCHPEFSPPSSQPPKHKGKQKSRNNESEKFSSSSPLTLPADLKNILEKQFSKSSRAAHQDFANIMKMLRSLIQDGYMALLEQRCRSAAQAFTELLNGLDPQKIKQLNLAMINYVLVVYGLAISLLGIGQPEELSEAENQFKRIIEHYPSEGLDCLAYCGIGKVYLKKNRFLEALNHFEKARTLIYRLPGVLTWPTSNVIIEESQPQKIKMLLEKFVEECKFPPVPDAICCYQKCHGYSKIQIYITDPDFKGFIRISCCQYCKIEFHMNCWKKLKTTTFNDKIDKDFLQGICLTPDCEGVISKIIIFSSGGEVKCEFEHKVIKEKVPPRPILKQKCSSLEKLRLKEDKKLKRKIQKKEAKKLAQERMEEDLRESNPPKNEEQKETVDNVQRCQFLDDRILQCIKQYADKIKSGIQNTAMLLKELLSWKVLSTEDYTTCFSSRNFLNEAVDYVIRHLIQENNRVKTRIFLHVLSELKEVEPKLAAWIQKLNSFGMSLYIPEQ

SEQ ID NO: 277220 - protein, 1158 aa, Artificial Sequence
  derived and/or modified sequence
MTHGEELGSDVHQDSIVLTYLEGLLMHQAAGGSGTAVDKKSAGHNEEDQNFNISGSAFPTCQSNGPVLNTHTYQGSGMLHLKKARLLQSSEDWNAAKRKRLSDSIMNLNVKKEALLAGMVDSVPKGKQDSTLLASLLQSFSSRLQTVALSQQIRQSLKEQGYALSHDSLKVEKDLRCYGVASSHLKTLLKKSKVKDQKPDTNLPDVTKNLIRDRFAESPHHVGQSGTKVMSEPLSCAARLQAVASMVEKRASPATSPKPSVACSQLALLLSSEAHLQQYSREHALKTQNANQAASERLAAMARLQENGQKDVGSYQLPKGMSSHLNGQARTSSSKLMASKSSATVFQNPMGIIPSSPKNAGYKNSLERNNIKQAANNSLLLHLLKSQTIPKPMNGHSHSERGSIFEESSTPTTIDEYSDNNPSFTDDSSGDESSYSNCVPIDLSCKHRTEKSESDQPVSLDNFTQSLLNTWDPKVPDVDIKEDQDTSKNSKLNSHQKVTLLQLLLGHKNEENVEKNTSPQGVHNDVSKFNTQNYARTSVIESPSTNRTTPVSTPPLLTSSKAGSPINLSQHSLVIKWNSPPYVCSTQSEKLTNTASNHSMDLTKSKDPPGEKPAQNEGAQNSATFSASKLLQNLAQCGMQSSMSVEEQRPSKQLLTGNTDKPIGMIDRLNSPLLSNKTNAVEENKAFSSQPTGPEPGLSGSEIENLLERRTVLQLLLGNPNKGKSEKKEKTPLRDESTQEHSERALSEQILMVKIKSEPCDDLQIPNTNVHLSHDAKSAPFLGMAPAVQRSAPALPVSEDFKSEPVSPQDFSFSKNGLLSRLLRQNQDSYLADDSDRSHRNNEMALLESKNLCMVPKKRKLYTEPLENPFKKMKNNIVDAANNHSAPEVLYGSLLNQEELKFSRNDLEFKYPAGHGSASESEHRSWARESKSFNVLKQLLLSENCVRDLSPHRSNSVADSKKKGHKNNVTNSKPEFSISSLNGLMYSSTQPSSCMDNRTFSYPGVVKTPVSPTFPEHLGCAGSRPESGLLNGCSMPSEKGPIKWVITDAEKNEYEKDSPRLTKTNPILYYMLQKGGNSVTSRETQDKDIWREASSAESVSQVTAKEELLPTAETKASFFNLRSPYNSHMGNNASRPHSANGEVYGLLGSVLTIKKESE

SEQ ID NO: 277221 - protein, 66 aa, Artificial Sequence
  derived and/or modified sequence
MTHGEELGSDVHQDSIVLTYLEGLLMHQAAGGSGTAVDKKSAGHNEEDQNFNISGSAFPTCQSNGP

SEQ ID NO: 277222 - DNA, 3477 bp, Artificial Sequence
  derived and/or modified sequence
atgacccacggcgaggagctgggcagcgacgtgcaccaggacagcatcgtgctgacctacctggagggcctgctgatgcaccaggccgccggcggcagcggcaccgccgtggacaagaagagcgccggccacaacgaggaggaccagaacttcaacatcagcggcagcgccttccccacctgccagagcaacggccccgtgctgaacacccacacctaccagggcagcggcatgctgcacctgaagaaggccagactgctgcagagcagcgaggactggaacgccgccaagagaaagagactgagcgacagcatcatgaacctgaacgtgaagaaggaggccctgctggccggcatggtggacagcgtgcccaagggcaagcaggacagcaccctgctggccagcctgctgcagagcttcagcagcagactgcagaccgtggccctgagccagcagatcagacagagcctgaaggagcagggctacgccctgagccacgacagcctgaaggtggagaaggacctgagatgctacggcgtggccagcagccacctgaagaccctgctgaagaagagcaaggtgaaggaccagaagcccgacaccaacctgcccgacgtgaccaagaacctgatcagagacagattcgccgagagcccccaccacgtgggccagagcggcaccaaggtgatgagcgagcccctgagctgcgccgccagactgcaggccgtggccagcatggtggagaagagagccagccccgccaccagccccaagcccagcgtggcctgcagccagctggccctgctgctgagcagcgaggcccacctgcagcagtacagcagagagcacgccctgaagacccagaacgccaaccaggccgccagcgagagactggccgccatggccagactgcaggagaacggccagaaggacgtgggcagctaccagctgcccaagggcatgagcagccacctgaacggccaggccagaaccagcagcagcaagctgatggccagcaagagcagcgccaccgtgttccagaaccccatgggcatcatccccagcagccccaagaacgccggctacaagaacagcctggagagaaacaacatcaagcaggccgccaacaacagcctgctgctgcacctgctgaagagccagaccatccccaagcccatgaacggccacagccacagcgagagaggcagcatcttcgaggagagcagcacccccaccaccatcgacgagtacagcgacaacaaccccagcttcaccgacgacagcagcggcgacgagagcagctacagcaactgcgtgcccatcgacctgagctgcaagcacagaaccgagaagagcgagagcgaccagcccgtgagcctggacaacttcacccagagcctgctgaacacctgggaccccaaggtgcccgacgtggacatcaaggaggaccaggacaccagcaagaacagcaagctgaacagccaccagaaggtgaccctgctgcagctgctgctgggccacaagaacgaggagaacgtggagaagaacaccagcccccagggcgtgcacaacgacgtgagcaagttcaacacccagaactacgccagaaccagcgtgatcgagagccccagcaccaacagaaccacccccgtgagcaccccccccctgctgaccagcagcaaggccggcagccccatcaacctgagccagcacagcctggtgatcaagtggaacagccccccctacgtgtgcagcacccagagcgagaagctgaccaacaccgccagcaaccacagcatggacctgaccaagagcaaggacccccccggcgagaagcccgcccagaacgagggcgcccagaacagcgccaccttcagcgccagcaagctgctgcagaacctggcccagtgcggcatgcagagcagcatgagcgtggaggagcagagacccagcaagcagctgctgaccggcaacaccgacaagcccatcggcatgatcgacagactgaacagccccctgctgagcaacaagaccaacgccgtggaggagaacaaggccttcagcagccagcccaccggccccgagcccggcctgagcggcagcgagatcgagaacctgctggagagaagaaccgtgctgcagctgctgctgggcaaccccaacaagggcaagagcgagaagaaggagaagacccccctgagagacgagagcacccaggagcacagcgagagagccctgagcgagcagatcctgatggtgaagatcaagagcgagccctgcgacgacctgcagatccccaacaccaacgtgcacctgagccacgacgccaagagcgcccccttcctgggcatggcccccgccgtgcagagaagcgcccccgccctgcccgtgagcgaggacttcaagagcgagcccgtgagcccccaggacttcagcttcagcaagaacggcctgctgagcagactgctgagacagaaccaggacagctacctggccgacgacagcgacagaagccacagaaacaacgagatggccctgctggagagcaagaacctgtgcatggtgcccaagaagagaaagctgtacaccgagcccctggagaaccccttcaagaagatgaagaacaacatcgtggacgccgccaacaaccacagcgcccccgaggtgctgtacggcagcctgctgaaccaggaggagctgaagttcagcagaaacgacctggagttcaagtaccccgccggccacggcagcgccagcgagagcgagcacagaagctgggccagagagagcaagagcttcaacgtgctgaagcagctgctgctgagcgagaactgcgtgagagacctgagcccccacagaagcaacagcgtggccgacagcaagaagaagggccacaagaacaacgtgaccaacagcaagcccgagttcagcatcagcagcctgaacggcctgatgtacagcagcacccagcccagcagctgcatggacaacagaaccttcagctaccccggcgtggtgaagacccccgtgagccccaccttccccgagcacctgggctgcgccggcagcagacccgagagcggcctgctgaacggctgcagcatgcccagcgagaagggccccatcaagtgggtgatcaccgacgccgagaagaacgagtacgagaaggacagccccagactgaccaagaccaaccccatcctgtactacatgctgcagaagggcggcaacagcgtgaccagcagagagacccaggacaaggacatctggagagaggccagcagcgccgagagcgtgagccaggtgaccgccaaggaggagctgctgcccaccgccgagaccaaggccagcttcttcaacctgagaagcccctacaacagccacatgggcaacaacgccagcagaccccacagcgccaacggcgaggtgtacggcctgctgggcagcgtgctgaccatcaagaaggagagcgagtag

SEQ ID NO: 277223 - DNA, 201 bp, Artificial Sequence
  derived and/or modified sequence
atgacccacggcgaggagctgggcagcgacgtgcaccaggacagcatcgtgctgacctacctggagggcctgctgatgcaccaggccgccggcggcagcggcaccgccgtggacaagaagagcgccggccacaacgaggaggaccagaacttcaacatcagcggcagcgccttccccacctgccagagcaacggcccctag

SEQ ID NO: 277224 - DNA, 3477 bp, Artificial Sequence
  derived and/or modified sequence
atgacccacggggaggaattagggagcgacgttcaccaggactcaatagtcctgacatacctggagggtctgctgatgcaccaggccgccggcggatccggtaccgctgtggataagaaatcagctggccacaatgaggaggaccagaattttaatatatccggtagcgcttttcctacatgtcaaagcaacggccccgtactcaacacgcatacctaccagggttctggaatgctgcatcttaaaaaggcacgcctgttgcaaagctccgaggactggaatgctgctaaacgaaagcggctgtcagacagcatcatgaatttgaatgtcaaaaaagaggctctgctcgcggggatggtggattccgtgcctaagggcaaacaggattccaccttactcgcgtcactgctgcagagcttcagcagcagactccagacagtcgcactcagccagcagattcggcagagcttgaaggagcaaggatatgccctctcccacgatagcctcaaggttgaaaaggacctgaggtgctacggtgtggcaagttcccacctcaagactttgttaaaaaagtcaaaggtgaaggatcagaaacctgacacaaacctgccggatgttaccaaaaatctgattagagacaggtttgcggagtccccgcaccatgtaggtcagagtggaactaaagtcatgagtgagcctctgtcttgcgctgccaggctacaggccgtcgcatccatggtcgagaagcgggcatctccagccacaagtccaaagccctccgtcgcatgctcccaactggctctcttgctgagctccgaggcacacctgcagcagtacagtcgtgagcatgccttaaagacccagaacgcaaatcaggccgccagtgagaggctagcggccatggcacgcctacaggaaaacgggcagaaggacgtgggatcataccagctgcccaaagggatgtctagtcacctgaatggtcaggcgcgaactagcagtagtaagcttatggcctcaaaatcttccgctactgtgttccagaatcctatgggcatcatcccatcttcacccaaaaatgcgggctacaagaactctctggagcggaataatatcaaacaggccgccaacaatagcctgttgctgcacttattaaagagccagaccattccaaaaccaatgaacggacacagtcatagtgagaggggaagtattttcgaagagtcctccacccccacaacgatagatgagtacagcgacaacaatccctctttcacagacgactctagcggcgatgagtcctcatatagcaactgcgtccccatagatttgtcttgcaagcacagaacagagaaaagtgagtcagatcaacctgtgagcctggataattttacccagagcctgctgaatacctgggatcctaaggtgccagatgtggatatcaaagaggaccaggatacttctaagaactccaagctaaatagccaccagaaagtcacactgctgcagctgctgctcgggcacaagaacgaagaaaatgtggagaagaacacatcccctcagggcgtgcataacgatgtgagcaagtttaacacacaaaactatgcccgcacctctgtcattgagagtccttcaacaaatcgtacaactccagtgagtacccctccactcctgaccagtagcaaggctggctcaccgatcaatctctcacagcacagcttggtgattaaatggaacagccccccatatgtgtgttccacccagagcgagaagttgaccaacacagcttctaaccactccatggatctgactaagagcaaggaccctcccggcgaaaagccggcgcagaatgaaggtgcacagaacagcgccacctttagcgcctcaaaacttctgcaaaacctggcccagtgtggaatgcaatccagcatgagtgtcgaagaacaacggccaagcaaacagttacttaccggtaacactgacaaaccgataggtatgatcgatagactaaattctcctctgttgagtaacaagacaaacgccgtggaggagaataaagcatttagcagtcagcccaccggacccgaacccggcctctcgggtagtgagattgaaaacctgttggagaggcgtacagtgctgcagcttttgctggggaatcccaacaaaggcaagtccgagaagaaagagaaaaccccgctgagggatgagagcacccaagagcactcagagcgtgctctgagcgagcagattttaatggtgaaaattaaatcagagccatgcgatgacttgcaaatcccaaatactaacgtccatctcagtcacgacgcaaagagcgctccctttctcggaatggctcccgcagtccagcgatcagccccagccctgcctgtgagtgaggatttcaagtctgagcctgtatcccctcaggacttctcatttagcaagaatggcttactgtctcggctgctgcgtcagaatcaggactcatacttggctgatgatagcgaccggagtcatcgaaacaatgaaatggccttgctggagtctaaaaacctgtgcatggtaccgaagaagagaaagctgtatacggaacctctcgagaacccattcaagaaaatgaaaaacaacatcgtggatgccgctaacaaccactcagcaccagaggttctatatggaagcctcctgaaccaggaggagctcaagtttagccgaaacgatttggaattcaaataccccgccggacatggctcagcctcggaatccgagcatcggagttgggcgcgcgagtccaagtctttcaacgtgttgaagcaactgttattaagcgagaattgtgtgcgcgatttgagtccgcataggtccaactcagtggccgattccaaaaagaaggggcacaagaataacgtaacaaactctaaaccagagttctcaatctcttccttgaacggtctgatgtacagctccacacagccctcatcatgcatggataacagaaccttctcatatcccggagtagtgaagacacccgttagcccgactttccctgagcaccttggctgcgctggcagtcgacctgagtccggcctcctgaacggctgcagcatgccttccgagaaagggcccatcaagtgggttattactgacgctgagaagaatgagtatgaaaaggacagccccaggctgacaaagacaaatcctattctgtactacatgttgcagaaaggaggcaactcagtaacgagtagggagacccaggacaaagatatctggagggaagcctcttcagctgaatctgtgtcccaggttactgccaaggaggaactgctccctacagcagaaaccaaggcctccttctttaacctgcgcagcccatacaattcccatatgggtaataacgcgagccgcccccacagtgccaatggtgaggtgtatggactgcttgggagcgtcctgacaatcaagaaggaatctgaatag

SEQ ID NO: 277225 - DNA, 3477 bp, Artificial Sequence
  derived and/or modified sequence
atgacccacggtgaggagcttgggtccgatgtgcaccaggactccatcgtgctgacgtacctagaaggtctactcatgcaccaggcagcgggaggaagcgggaccgctgtagacaagaagtctgccggccacaacgaggaagaccagaacttcaacattagcgggagtgcttttccaacatgccagagcaacggaccagtgctgaatacccacacgtaccaggggagtggcatgctccatctcaaaaaggcacggctgttgcaaagctcagaagattggaacgctgcaaagaggaaacgcctatctgacagcattatgaatttgaatgtcaaaaaggaggccctccttgccggaatggtggacagcgtgcccaaagggaagcaagattccactctcctcgcttcactcctacagtccttctcgtccagactacagacagtggctttgtcacagcagattaggcaatccctaaaagagcagggttacgctctctcccacgatagccttaaggtggagaaagaccttagatgctacggagtagctagctcgcacctgaaaacacttctgaagaaatccaaagtgaaggaccaaaaacctgataccaatttgcctgatgtgacgaagaatctgatcagagaccggttcgctgaatcacctcaccacgtcggacagagcggtacaaaagtcatgagtgaacctctgagctgcgcggcccggttgcaggcggtcgcctcaatggttgaaaaaagagcctctcccgctacttctcctaagccaagcgtagcctgctcccaactggcactcctgctctctagcgaagcacatctgcaacagtatagtagggagcatgcccttaagacccagaacgccaaccaggcagccagcgaacgcctggctgccatggcaaggttacaggaaaacgggcagaaggatgtgggctcctatcaactccctaaggggatgtcgtctcacttgaatggccaggcccgaaccagcagtagcaaacttatggcaagcaagtcgtccgctacagtcttccagaaccctatggggatcataccttccagtcccaagaacgcaggctataagaacagcctcgagaggaacaatatcaagcaggcggcgaataacagtcttctactgcatctgctcaagtcacagaccatccccaaaccaatgaatggtcactcgcactcagaacgtgggagcatcttcgaagagagctctaccccgaccacaattgacgagtactctgataacaatccgagtttcaccgatgactcgagcggagatgaaagttcttatagcaactgtgttcctatcgatctgagttgtaaacaccgaacagagaaatcagagtcagaccaaccagtgagccttgacaatttcacacagtcactgcttaatacctgggaccctaaagtgcctgatgtggatatcaaggaggatcaggacacatccaagaatagcaaactcaacagccaccagaaggtgacactcttgcaactcttgctggggcacaagaacgaggaaaacgtagagaaaaacacctcccctcagggcgtgcacaatgacgtgagcaaatttaatacacagaattatgctcgcacgtccgttattgaaagcccttccaccaacagaactactccggtgtctactccgcctctgttaacctcctctaaggccggcagccccattaatctcagccagcatagtctcgtgattaaatggaactctcctccttacgtgtgttcgacgcagtctgagaaactaaccaacactgcctccaaccactcaatggacctgaccaaatcaaaggacccgccaggggaaaaacccgcgcaaaacgagggagctcagaatagtgccaccttctccgcctcgaagttgctgcagaacttggcccagtgcggaatgcagagctcaatgtccgtggaggagcagagacccagtaagcagctgctgacgggaaataccgataagccgattgggatgattgacaggctgaattcacccctgctaagcaacaagaccaatgctgtggaggaaaacaaggcatttagcagtcagcccactggaccggagccagggctgtccgggtccgagattgagaatctgttggagcggcgtactgtgctgcagctgttactgggcaatcctaataagggaaagagtgagaaaaaagagaagaccccactgagggacgaatctacccaagaacatagcgaaagagcccttagcgaacagatccttatggtgaaaataaaatcggaaccctgtgatgacctccaaatccccaacaccaacgtacatttgagccacgacgcaaaatcagcccccttcctgggaatggcaccagccgtccagcggagcgctcctgctttacctgtctcagaggattttaagtccgagccggtaagcccacaggatttctctttttcaaaaaatggcctgctgtcccggctgctgcgccagaaccaagactcctacctcgcagacgattccgacagatcccatcggaacaatgagatggctctgcttgagtccaagaatctatgcatggtcccgaagaaacgaaagttatacacagagcccctggaaaatcctttcaagaaaatgaaaaacaatattgtcgacgcagctaataaccatagcgccccggaggtcctttacggcagcctgctgaaccaggaggaactgaaattctcacggaatgatctggagtttaaataccctgccgggcatggatcagcttcagaatctgagcaccggagttgggcgcgtgagagcaaaagtttcaatgtgctcaaacaactgcttctgtcagaaaattgcgtgagagacttgagtccccatagaagtaattcagtagcagacagtaaaaaaaagggacacaaaaacaatgttacaaacagcaagccggagttctcaatcagcagtttaaacgggcttatgtactcatccactcaaccgtcctcttgtatggataaccgcacctttagctaccccggggttgtcaaaactccagttagccctaccttccccgaacatctgggctgtgctggcagcagaccagaatccgggctactgaacggttgttctatgccttctgagaaaggcccaatcaagtgggtgattacagatgccgaaaaaaatgagtacgagaaagacagccctcggttaactaaaaccaacccgatactttactacatgctgcagaagggaggtaacagtgtgacaagcagagagacgcaagacaaggatatctggcgagaggcgtcgtctgccgagtcagtgtcgcaagtgactgccaaggaggagctattgcctacagctgaaaccaaagcgtctttctttaatcttcggtccccctataactctcatatgggtaacaacgcctcccgaccccatagcgctaatggagaagtctatggcctgctgggtagcgttctgacgattaaaaaagaaagcgaatag

SEQ ID NO: 277226 - DNA, 3477 bp, Artificial Sequence
  derived and/or modified sequence
atgactcacggcgaagaactgggctcagatgttcaccaagatagcattgtcttgacctacttagagggactactaatgcatcaggccgcagggggaagtggaaccgccgtggacaagaagtccgctggacacaatgaggaggatcaaaactttaatatttccgggagcgcattccccacatgccagagcaatggacctgtgcttaatacccacacttaccaagggtctggcatgctacatctgaaaaaagcccgccttctccagagcagcgaagactggaacgctgctaagagaaagagactgagtgacagtataatgaatctcaatgttaagaaggaagccctccttgctgggatggtcgactccgtgccaaaagggaagcaggatagtactctgttagcctcactgctacagtcatttagtagcaggctgcaaactgtcgccctgtcccagcaaatcaggcagtccttgaaagaacagggatatgcattaagtcacgattcattaaaggtcgaaaaggatttacgctgctacggggtcgcatcctcccacctgaagacgctgctgaaaaagagcaaagtcaaagaccagaagcccgataccaacctgcccgacgtcactaaaaatctgattcgggacagatttgcagagtcccctcaccacgtggggcaatccggaacaaaggtcatgtctgagcccctgtcctgtgctgccagactgcaggctgtggcctctatggttgaaaagagagcttctccagctacttcccctaagccaagcgtagcctgcagccagctggcgctactgctttcctccgaagctcacttacaacagtatagtcgagaacacgcactgaagacacagaatgctaatcaggccgcctccgagcgattagcggccatggcccggctgcaggaaaacggtcagaaagatgtggggtcctatcagctcccgaaagggatgtcatctcatcttaatggccaggctagaactagtagctccaagttaatggcctctaaaagctccgccacagttttccagaaccccatgggtatcatccccagctctcccaagaatgccggatacaaaaactccttggaaagaaataacatcaagcaggcagccaataactctctcctccttcacctgctgaagtcacagaccatcccaaaaccaatgaacggccactctcactccgagagaggaagtatctttgaggaatcttctaccccgacgaccattgatgagtactcagacaacaacccttcctttaccgacgactccagcggagatgagtccagctactctaattgcgttcccattgatctcagctgcaagcacagaacggaaaagtccgaatccgatcaacctgtcagcctagacaatttcacacagtcgctgctcaatacctgggacccaaaggtgcccgacgtggacataaaagaagaccaggatacctccaagaatagcaagttgaatagccaccaaaaagtgacacttctgcaattgctgttaggccataagaatgaggagaatgttgagaagaacacatcaccccagggcgtacacaacgacgtatcaaaatttaatacccagaattatgcccgcaccagtgttatcgaatctccgtctaccaaccgaacaacccccgtcagcactcctccgttgctcacttctagcaaagctgggtctcccattaatttaagccagcattcattagttattaagtggaattcaccgccgtacgtctgcagtacccagagtgaaaagctaactaacaccgcaagtaaccactcaatggatctcaccaagtctaaggatccacccggtgagaagccagctcagaacgaaggggcgcagaactccgccacgtttagcgctagcaaacttctccagaatctcgctcagtgtggaatgcagtcctctatgagcgtggaggaacagagacctagcaagcagttgctcacgggaaatactgacaaacctatcggcatgatcgaccggcttaacagtcctttgctgagtaacaaaacgaatgccgtggaagagaacaaggccttttcttctcagccaaccggccctgaaccagggctatctgggtcagagatcgagaatctccttgagcggagaacggttctccagctgctcctcggcaatcctaacaagggaaagagtgaaaaaaaagaaaagacgcctctccgtgatgagagcacacaggagcactcagagcgtgccctgtctgagcagatccttatggtgaaaataaagtccgagccttgtgatgatctgcagatacccaataccaacgtgcacctgtcacacgatgctaagagtgcaccctttttaggaatggctcctgcagtgcaacggagcgctccagctttgccagtgtccgaagactttaaatctgagcccgtgtcaccacaggacttcagcttcagcaaaaacggtcttttatcaagactgttacgccaaaatcaggatagttatcttgcggacgacagtgacagaagccaccggaataacgagatggccctcctggagtctaaaaacctctgtatggtacccaagaaacgaaagttgtacacagaaccacttgagaacccatttaagaagatgaagaacaatattgtagacgcagctaacaatcacagcgccccggaggtcctttacggctccctgttgaaccaggaggaactgaagttttctcggaacgacctggagttcaagtaccctgccggccatggctctgcctcggagagcgagcatcggtcttgggccagggaatctaagtcatttaatgttcttaaacagctgctgctgtcagagaactgcgttcgggacctgtctcctcacagatccaatagtgttgccgacagcaaaaagaagggccataagaacaacgtgaccaacagcaagcccgaatttagtatctcctccctgaatggcctgatgtacagttcaactcagccatccagctgtatggacaatcgaacattttcatatcccggcgtcgtgaagacacccgttagtcctaccttccctgagcacctggggtgtgcaggcagtaggcctgagtcaggcctattaaatggctgcagtatgccctccgagaaagggcccatcaagtgggtcatcacagacgccgagaagaatgagtacgaaaaggattctccacgtctgactaagacaaatcctatcttatattacatgctgcagaagggaggaaactcagtcacgagccgagagacgcaggacaaggatatctggcgcgaggctagctctgccgaatctgtaagccaggtgacagctaaggaggaactcctaccaactgcagagacaaaagcctccttctttaacctgcggtctccttataattctcacatgggcaataatgcttcacgcccccactccgccaacggggaggtgtatggcctgctgggatctgtcctcacaattaagaaagagtccgagtag

SEQ ID NO: 277227 - DNA, 201 bp, Artificial Sequence
  derived and/or modified sequence
atgacccacggcgaagagttaggcagcgatgttcatcaagactccatcgtgctgacttaccttgaaggcctgttgatgcaccaggcggccgggggatcaggcaccgccgttgacaaaaaatctgcaggccataatgaggaggaccagaacttcaatataagcggaagcgcattccctacgtgccagagtaacgggccctag

SEQ ID NO: 277228 - DNA, 3477 bp, Artificial Sequence
  derived and/or modified sequence
atgacccatggagaggagctgggcagtgatgtgcaccaggacagcatcgtgctgacctacctggagggcctgctgatgcaccaggccgccggcggcagcggcacagctgtggacaagaagtctgctggccacaatgaggaggaccagaacttcaacatcagcggcagcgccttccccacctgccagagcaatggacctgtgctgaacacccacacctaccagggcagcggcatgctgcacctgaagaaggcccggctgctgcagagcagcgaggactggaatgctgccaagaggaagaggctgagtgacagcatcatgaacctgaatgtgaagaaggaggccctgctggccggcatggtggacagcgtgcccaagggcaagcaggacagcaccctgctggccagcctgctgcagagcttcagcagccggctgcagacagtggccctgagccagcagatccggcagagcctgaaggagcagggctacgccctgagccatgacagcctgaaggtggagaaggacctgcgctgctacggcgtggccagcagccacctgaagaccctgctgaagaagagcaaggtgaaggaccagaagccagacaccaacctgcctgatgtgaccaagaacctgatccgggacagatttgctgagagcccccaccacgtgggccagagcggcaccaaggtgatgtctgagcccctgagctgtgccgcccggctgcaggccgtggcctccatggtggagaagagggccagccctgccaccagccccaagcccagcgtggcctgcagccagctggccctgctgctgagcagcgaggcccacctgcagcagtacagccgggagcacgccctgaagacccagaatgccaaccaggccgccagcgagcggctggccgccatggcccggctgcaggagaatggccagaaggatgtgggcagctaccagctgcccaagggcatgagcagccacctgaatggccaggcccggaccagcagcagcaagctgatggccagcaagagcagcgccaccgtcttccagaaccccatgggcatcatccccagcagccccaagaatgccggctacaagaacagcctggagaggaacaacatcaagcaggccgccaacaacagcctgctgctgcacctgctgaagagccagaccatccccaagcccatgaatggccacagccacagcgagcggggcagcatctttgaggagagcagcacccccaccaccattgatgagtacagcgacaacaaccccagcttcacagatgacagcagtggagatgagagcagctacagcaactgtgtgcccatcgacctgagctgcaagcacaggacagagaagtctgagagtgaccagcctgtgtccctggacaacttcacccagagcctgctgaacacctgggaccccaaggtgcctgatgtggacatcaaggaggaccaggacaccagcaagaacagcaagctgaacagccaccagaaggtgaccctgctgcagctgctgctgggccacaagaatgaagaaaatgtggagaagaacaccagcccccagggcgtgcacaatgatgtgtccaagttcaacacccagaactatgcccggaccagcgtcatcgagagccccagcaccaacagaaccacccctgtgtccaccccacccctgctgaccagcagcaaggccggcagccccatcaacctgagccagcacagcctggtgatcaagtggaacagccccccctacgtgtgcagcacccagagcgagaagctgaccaacacagccagcaaccacagcatggacctgaccaagagcaaggaccccccaggagagaagccagcccagaatgaaggagcccagaacagcgccaccttcagcgccagcaagctgctgcagaacctggcccagtgtggcatgcagagctccatgtctgtggaggagcagaggcccagcaagcagctgctgaccggcaacacagacaagcccatcggcatgattgaccggctgaacagccccctgctgagcaacaagaccaatgctgtggaggagaacaaggccttcagcagccagcccaccggccctgagcccggcctgagcggcagcgagattgagaacctgctggagaggagaacagtgctgcagctgctgctgggcaaccccaacaagggcaagtctgagaagaaggagaagacccccctgagagatgagagcacccaggagcacagcgagcgggccctgtctgagcagatcctgatggtgaagatcaagtctgagccctgtgatgacctgcagatccccaacaccaacgtgcacctgagccatgatgccaagagcgcccccttcctgggcatggccccagctgtgcagaggtctgccccagccctgcctgtgtctgaggacttcaagtctgagcctgtgagcccccaggacttctccttcagcaagaatggcctgctgagccggctgctgcggcagaaccaggacagctacctggctgatgacagcgacaggagccacaggaacaatgagatggccctgctggagagcaagaacctgtgcatggtgcccaagaagaggaagctgtacacagagcccctggagaaccccttcaagaagatgaagaacaacatcgtggatgctgccaacaaccacagcgcccctgaggtgctgtatggcagcctgctgaaccaggaggagctgaagttcagcagaaatgacctggagttcaagtacccagctggccacggcagcgccagcgagagcgagcaccgctcctgggcccgggagagcaagagcttcaacgtgctgaagcagctgctgctgtctgagaactgtgtgcgggacctgagcccccacaggagcaacagcgtggccgacagcaagaagaagggccacaagaacaacgtgaccaacagcaagccagagttcagcatcagcagcctgaatggcctgatgtacagcagcacccagcccagcagctgcatggacaacagaaccttctcctacccaggagtggtgaagacccctgtgagccccaccttccctgagcacctgggctgtgccggcagcaggcctgagagcggcctgctgaatggctgcagcatgcccagcgagaagggccccatcaagtgggtgatcacagatgctgagaagaatgaatatgagaaggacagcccccggctgaccaagaccaaccccatcctgtactacatgctgcagaagggcggcaacagcgtgaccagccgggagacccaggacaaggacatctggagggaggccagcagcgctgagagcgtgtcccaggtgacagccaaggaggagctgctgcccacagctgagaccaaggccagcttcttcaacctgcggagcccctacaacagccacatgggcaacaatgccagccggccccacagcgccaacggggaggtgtatggcctgctgggctctgtgctgaccatcaagaaggagagcgagtag

SEQ ID NO: 277229 - DNA, 201 bp, Artificial Sequence
  derived and/or modified sequence
atgacccatggagaggagctgggcagtgatgtgcaccaggacagcatcgtgctgacctacctggagggcctgctgatgcaccaggccgccggcggcagcggcacagctgtggacaagaagtctgctggccacaatgaggaggaccagaacttcaacatcagcggcagcgccttccccacctgccagagcaatggcccctag

SEQ ID NO: 277230 - DNA, 3477 bp, Artificial Sequence
  derived and/or modified sequence
atgacccacggcgaggagctgggcagcgacgtgcaccaggacagcattgtcctcacgtacctggaaggtcttctgatgcatcaagctgctgggggcagcgggacagcagttgacaaaaaaagcgcaggccacaatgaggaagaccagaattttaacatctccggcagtgcatttcccacgtgccagtccaacggtcccgtgcttaatacccacacatatcagggcagtgggatgctgcatttaaagaaagccaggctgcttcagagttccgaggattggaatgccgcgaagaggaaaagactttcggactcaattatgaacctaaacgtaaagaaagaagccctgctcgctggtatggtcgattcggtgcccaaaggaaagcaggattccactttgctcgcctctctgctccagtccttcagctccagactccagacagtagccctgtcccagcagatccgtcagagtctgaaagagcagggttacgccctttcgcacgatagtctgaaggtagaaaaagacttgagatgttatggagtagcttcttcccatctcaagaccttgcttaagaagagcaaagtaaaagatcagaaacctgataccaatctgccagatgttacaaagaacctgatcagagatagatttgccgagtctccccaccatgtgggtcagtcaggaaccaaggtgatgtctgaacccctatcttgcgccgccaggctgcaggcagtggccagcatggtagagaaacgagcttcccctgcgaccagtccaaagccctccgtcgcctgttctcagctcgcgctactgttgtcttccgaggcccacctacaacaatatagtagagaacacgcccttaagacacagaacgcaaaccaggctgcatccgagaggctagctgccatggcccggctgcaagaaaatggacagaaagacgtcggctcttaccaactccccaaaggcatgtcttcccacttgaatgggcaagcgaggacctcaagctccaaactcatggcatcaaaaagcagcgccactgtgtttcagaatcctatgggcatcatcccctcttccccgaagaacgctggctacaaaaacagcttagagcggaacaatatcaaacaggctgcgaacaactctctgttgctccaccttttgaaaagccagactattcccaaaccgatgaatggccactcccattctgaaaggggcagtattttcgaggagtcttctacccccactacgatcgacgagtacagcgataacaatccgtctttcacggatgatagctccggcgacgaaagtagctacagcaactgcgtaccaatcgacctgtcttgtaaacatagaacggagaaatccgagagtgaccagccagtctcactcgacaattttactcagtctttgctgaacacatgggacccgaaggtgcctgacgtggacattaaggaggaccaggacaccagcaaaaatagtaagctaaactcacaccagaaggtgacactgctacagctgctccttggccacaaaaatgaagagaatgtggagaagaacacatctccgcaaggagtgcacaatgatgtcagtaagttcaacacccagaactacgcccgcacaagtgtcattgagagtcccagcactaacaggaccacgcccgtgtcaacgccccccctgctcacttcaagcaaagctggcagcccaatcaatctgtcacagcatagcctggtgatcaaatggaacagcccaccttatgtatgctccacacagagcgaaaagctcactaataccgcctcaaatcactctatggacctcactaagtccaaggatccccccggcgagaaacctgctcagaatgagggagcccagaacagcgcaaccttctctgctagcaaattgctgcagaacctcgcccagtgtgggatgcaaagcagcatgtccgtcgaagaacagcgcccttcaaagcaactgctcactgggaacactgacaagccaataggaatgatcgaccgcctgaacagtcccctcctctcaaataagacaaatgcagtcgaggagaataaagcatttagtagccagccaacaggccctgaacctggcctgtccgggtcagagattgaaaatcttctggaacggcgtaccgttctgcagctgctgctgggaaatcctaacaaaggaaaaagcgaaaaaaaggagaaaaccccgctcagagatgaaagtacccaagagcatagcgaaagagctctgtctgagcagattcttatggtcaagattaagtccgaaccttgcgacgacctgcaaatccccaacactaacgtacatctgtcccacgatgccaaatctgctccttttctgggaatggcaccggccgtgcagcgctccgcccctgccctcccggtctccgaggactttaagagtgaaccagtgtcgccccaggatttctcattctccaaaaacgggctgctgtcgagactgctgcgacagaaccaggacagttacctggcagacgactccgataggagccacaggaacaatgagatggcactgttagagagcaagaatttgtgtatggtcccgaaaaagcgaaaactgtacacggagccccttgaaaacccattcaagaaaatgaaaaataatattgtggacgccgccaacaaccactcagcccccgaggtgctgtacgggtctctgctgaaccaggaagagctgaaattttcccggaatgacctggagtttaaataccccgctggtcatggctccgccagcgaatcagaacacaggtcttgggctcgcgaatcaaagtctttcaatgtcctgaagcagctgctgttgagtgaaaactgcgtgcgggacctctctccgcataggagcaactccgtagcagacagtaagaagaaaggccacaaaaacaacgttacgaatagcaaaccggaattctctatcagtagcctcaacggcttaatgtatagctctacgcaacctagcagttgtatggataaccgcacgttcagctaccctggcgtggttaaaaccccagtgtctccaacattccctgagcacctgggctgtgcggggtctcgtcctgaatctgggctcttgaacggctgctccatgccaagtgaaaaaggcccgatcaagtgggtcatcacggatgcagaaaagaatgagtatgagaaagacagtccacgactgacgaaaacgaatcccatcttatactatatgctgcagaagggggggaactcagtgactagtcgggagacacaagataaggacatctggcgcgaagcatctagcgccgaatccgtgagtcaggtgaccgcgaaagaggaactgctgccaacagccgaaacaaaggcctctttctttaatctgcgctccccttacaatagccacatggggaacaacgcctcgcgcccacattccgcgaacggagaggtctatggcctgttagggtctgtgctcactatcaaaaaggagtctgagtag

SEQ ID NO: 277231 - DNA, 3477 bp, Artificial Sequence
  derived and/or modified sequence
atgacccacggcgaggagctgggcagcgacgtgcaccaggacagcatcgtgttgacatacttggagggattgctgatgcatcaggccgctgggggaagcggtaccgcagttgataaaaagtctgccggtcataacgaggaggatcagaatttcaatataagtggttccgcattcccaacttgccagtctaatgggcctgtcctcaatacccacacttatcagggtagtggcatgctgcatttgaaaaaggcacgccttctacagtccagtgaggattggaacgctgctaagagaaagagactctctgactccatcatgaaccttaatgtgaaaaaggaggccttgctggcaggaatggtggattctgtgcccaagggcaaacaggactctaccctcctggctagtctgcttcagagctttagctcccgattgcagacagtggcactgtctcaacagattcgccagagcctcaaagagcagggttacgcgttgagtcatgactctttaaaagttgaaaaagatctgaggtgctacggtgtggcttccagccatcttaaaaccctcctgaagaagagcaaggttaaggatcagaagcccgacactaacctccccgacgtgactaagaacttgatccgagaccgctttgcggaaagcccccaccacgtgggacaaagcgggacaaaagtgatgagtgagcccctctcctgtgccgctagattgcaggccgtggcctcgatggtcgaaaagagagcatcccccgcaaccagtcctaagcccagtgtggcttgttcccaactcgcccttctgttgtcttctgaggcacaccttcaacaatattctagagaacatgcgcttaagacacagaacgcgaatcaggccgcgtcagagaggctcgcggccatggcccgcctgcaggagaacgggcaaaaggacgtgggatcgtaccagctccccaaaggcatgtcatcccatctgaacgggcaggcccggacttcatcatcaaagctgatggcttctaagtccagtgccacagtcttccagaaccctatgggcatcattccatctagtccgaaaaatgccggctacaagaacagtctggaacggaataacatcaagcaggcggctaacaactctctccttctgcaccttctcaaatcacagactattcccaagcccatgaatggtcatagccactcagagcggggatctatcttcgaagaatcatccacccccaccactatagatgagtatagcgataacaacccgtcgttcacggacgattcctccggcgacgagtcgagctattcaaactgcgttcctattgacctgagctgtaagcacagaactgagaaatcagagtccgatcagccagtatccctggacaactttacccagagcctcctgaacacctgggatcccaaggtgccggacgtcgatataaaggaggaccaagacacctccaaaaattccaaattgaacagtcatcagaaagtgaccctattgcagctgctattgggtcacaaaaacgaagagaatgtggagaagaatacaagtccacaaggcgttcataatgatgtttccaaatttaacacccagaactacgctaggacgtccgttatagagagtccctccactaatcgcacgacccccgtgtctactccaccactgctaactagcagcaaggcaggaagccctatcaatctgtcacaacactcactggttatcaaatggaatagccctccttatgtgtgttctacccaatccgaaaagctcaccaacaccgctagcaatcattcgatggatcttacaaaatctaaagacccacccggcgagaagccggctcagaacgaaggggctcagaactccgccacattcagcgcatcaaaactcctccaaaacctggctcagtgtggaatgcagagctcaatgtcagtggaggagcagcgtccgtctaagcagctgctcacaggaaataccgacaaaccaatcggaatgattgatcgcctgaacagtcctctgctcagcaacaagactaatgccgtggaggaaaataaagccttcagctcacaacctacaggtcctgaacccggcctttctgggagtgagattgagaaccttctggaacgtcgtacagtcttacagctgctacttggtaacccaaataaaggtaagtctgagaaaaaggaaaaaacacccttgcgcgacgaaagcacccaggagcacagcgaacgcgctctgagcgaacagatcttaatggtgaagatcaagagcgagccctgcgatgatctgcagatacctaatacgaacgtgcatctatcccacgatgcaaagtccgcccctttcctggggatggcccccgccgtgcaaagatccgcacctgcactgcctgtgtcagaagactttaagagtgagccagtaagcccacaagattttagcttttccaaaaacgggctactctcccgccttttacgacaaaaccaagattcttaccttgccgatgatagcgatcggtctcatcgcaacaatgagatggccctgcttgagtctaaaaatctgtgcatggtgccgaaaaaacgcaagctgtataccgagccactcgagaacccctttaaaaagatgaaaaacaatatcgtggatgcggccaataatcattctgccccggaagtgttgtatggctccttgttaaatcaggaggaactcaaattcagccgaaacgatcttgaatttaagtatcctgccggacacggcagtgctagtgaaagcgaacatcggagctgggcaagggagagcaaatcattcaatgtgctgaaacagctgctcttgagcgagaactgtgtgcgagatttatctccccatcgatccaattcagtagccgattctaaaaaaaaggggcataagaacaatgtcaccaattcgaagccagagttcagtatttcaagtctcaacgggcttatgtactcttctacacagccaagttcatgcatggacaatcggaccttttcgtaccctggggtggtgaagacgcccgtgtcacccacattccccgagcacctgggctgtgcggggagccggcccgagtcgggcctgctgaacggctgctccatgcccagcgagaaaggaccaattaaatgggtcattactgacgcagagaagaatgagtatgaaaaggactctccccgtcttactaagacaaacccaatactgtattatatgcttcaaaaggggggcaactctgtcacaagtagggaaacccaggacaaggatatttggcgggaagctagctccgcagagtccgtatcacaagtaactgctaaggaagagctgcttcccaccgctgaaacgaaagctagctttttcaatttgcggagcccttacaatagccacatgggtaataacgcgagcaggccgcattcggctaatggggaggtctacggtcttctcggatcggtgctaacaattaaaaaagagtcagagtag

SEQ ID NO: 277232 - DNA, 3477 bp, Artificial Sequence
  derived and/or modified sequence
atgacccacggcgaggagctgggcagcgacgtgcaccaggacagcattgtgcttacgtacctggaaggcttgctcatgcatcaggcagccggaggatctggcactgccgtcgataaaaagagtgccgggcataacgaggaagatcagaattttaatataagcggcagcgccttccccacatgccagtccaacggcccagtgttgaacacacacacgtaccagggttccggtatgcttcaccttaagaaggctagactgcttcagagcagcgaggattggaacgcagctaagcgcaagaggctgtcagattccatcatgaatctgaatgtgaaaaaggaggcattgctggcgggaatggtggactcggtgcccaaaggaaagcaagactctacgctcttggcaagcctcctgcagtccttctcaagtcgtctgcagacagtggccctgagccagcagattcgacaatcccttaaagaacagggctacgcactttcccatgactcccttaaggtggagaaggatctccgatgctacggcgttgcaagcagccacctgaagaccttgctgaagaagtcaaaagtaaaggatcaaaagccagataccaatctcccagacgtaaccaaaaatctcatcagggacagattcgccgaatccccacaccacgtaggacaatcaggaacaaaggtcatgtccgagcccctgtcgtgcgccgctcgccttcaagccgtggcctccatggttgagaagcgcgcatctccagctacctctccaaagccgtcagtcgcttgttcccaactggctttattactgtcatccgaggcacatctgcagcagtacagtagagagcatgccctcaagacacagaacgctaatcaggcagctagtgaaagactggctgctatggctcggcttcaggaaaacggccaaaaggatgtgggctcgtaccagctgccaaaaggcatgtcgtcacatctgaacggacaggcacgaactagctcctccaagctgatggcatctaagagctcagctacggtattccagaacccgatgggcatcattccatcatcccctaagaacgccggatacaaaaactccctggagagaaacaacattaaacaagccgccaacaactctctgttgcttcacctgctcaaatcacaaaccattcctaaacccatgaatggacactcacattccgaaagagggagcattttcgaggagtctagtacacccaccactatcgacgagtactccgataacaacccgagctttactgatgactcatcaggcgacgaatcatcttactcgaactgcgttcccatcgacctttcctgcaaacatcgcaccgaaaaatccgagtcggatcagcccgtgtctctggacaacttcactcagagcttgctgaacacatgggaccctaaagtaccagacgtggatataaaagaagaccaagacacgtccaagaattccaagctcaactcccaccagaaagtcacactgttgcagctgcttctgggacacaaaaacgaggagaacgtagaaaaaaacacaagcccccagggcgtgcataatgatgtcagtaaattcaacacccagaactatgctcgtacctcagtgattgagtccccatctacgaataggactacacccgttagtacgcccccgcttttaacatcaagcaaagctggcagtccaatcaacctgtcacagcatagcctggtgattaaatggaactctccaccatacgtctgcagtacccagtcagagaagctgaccaatacggcatccaatcactcaatggacctgaccaaatccaaggatcctcctggcgagaagcccgcccaaaacgaaggcgcgcagaacagcgcaaccttctccgcatctaagctgctccagaatttggctcagtgtggaatgcagtcctccatgagcgtcgaggaacagaggccatctaaacagctgctgacaggcaatacagacaaaccaatcgggatgatcgaccggctcaatagcccactcctgtcgaataagaccaacgccgtcgaggaaaacaaggcattcagtagccagcctacagggcctgagcctgggctctctgggtcggagatcgaaaatttgttggagagacgcacagtgctacagctgctgctcggaaaccctaacaaaggcaagtcggagaaaaaggagaagacgcccctgcgtgatgaatccacacaggagcactccgaaagggctctatccgagcagatactaatggtcaagatcaaaagcgagccatgcgatgatcttcagatccctaacaccaatgttcatctgagtcacgacgccaagtctgctccttttctcgggatggcacctgctgtccagcggtctgctcccgcccttccagtaagtgaggatttcaagagcgagcccgtgagtccacaagattttagttttagcaaaaatggcctgctgagcaggctgctgcgccagaatcaggatagctacctggctgacgattcagaccgaagccaccgaaacaatgaaatggccttgctggaatctaagaatttgtgcatggtccctaaaaaaagaaagctgtacacagaacctttagagaatcccttcaaaaagatgaagaacaatattgtcgatgctgcaaacaaccattctgcgccagaggtgctttatgggagcctgttaaatcaggaggaattaaagtttagccgaaatgatctcgaattcaagtacccagccggtcacgggagcgcctccgagtcagaacataggagctgggctagggaaagcaaatctttcaatgttctcaaacagttgttgctttctgaaaactgcgtgcgggacctttccccacatcggtccaacagcgtggcagacagtaagaaaaaaggccacaagaataacgttactaactctaaaccggagtttagcatctcttcactaaacggccttatgtactcctccacccagccctctagctgcatggacaacaggaccttttcatatccaggggtggtgaaaactccagtgagcccaaccttccctgagcatcttggatgcgctggctctcggccggagtctggcctactgaatgggtgtagcatgccttccgagaaggggcctattaaatgggttatcactgatgccgagaaaaatgagtacgaaaaggattccccacgtctgaccaagacaaaccctattctgtattacatgctccagaaaggcggtaacagcgtgacctctcgcgaaacccaggataaagatatctggcgtgaggcctcctcggcggagtctgttagccaggtgacagcaaaggaggaacttttgccaacggcagagaccaaggctagcttcttcaacctcaggtctccctacaacagtcacatggggaacaacgcttccaggccgcattcggctaatggggaggtctatggtcttcttggctctgttttgacgatcaagaaggaaagcgaatag

SEQ ID NO: 277233 - DNA, 201 bp, Artificial Sequence
  derived and/or modified sequence
atgacccacggcgaggagctgggcagcgacgtgcaccaggacagcatcgtattaacctacttggagggcttattgatgcaccaggcagcaggaggatccgggacagcggttgacaagaagagcgctggacataatgaggaggatcaaaacttcaatatttctgggagtgccttcccaacgtgccagtcaaacggcccgtag

SEQ ID NO: 277234 - DNA, 7556 bp, Artificial Sequence
  derived and/or modified sequence
gcaggcgccttcgcggaccgagcctgacggagccggaggctgggagccgcggcggcctggggaagtgtttggattgtgagctatttcagaactgttctcaggactcattattttaacatttgggagaaacacagccagaagatgcacacttgactgaaggaggacagggaatctgaagactccggatgacatcagagctacttttcaacagccttctcaattttctttctcagaaagcagaggctcagagcttggagacagacgaacactgatatttgcatttaatggggaacaaaagatgaagaaggaaaaggaatatattcactaaggattctatctgcttactgctacagacctatgtgttaaggaattcttctcctcctccttgcgtagaagttgatcagcactgtggtcagactgcatttatcttgtcattgccagaagaaatcttggacagaatgtaacagtacgtctctctctgattgcgatggaaggtgataaactgatactcctttattaaagttacatcgcactcaccacagaaaaccattctttaaagtgaatagaaaccaagcccttgtgaacacttctattgaacatgactcatggagaagagcttggctctgatgtgcaccaggattctattgttttaacttacctagaaggattactaatgcatcaggcagcagggggatcaggtactgccgttgacaaaaagtctgctgggcataatgaagaggatcagaactttaacatttctggcagtgcatttcccacctgtcaaagtaatggtccagttctcaatacacatacatatcaggggtctggcatgctgcacctcaaaaaagccagactgttgcagtcttctgaggactggaatgcagcaaagcggaagaggctgtctgattctatcatgaatttaaacgtaaagaaggaagctttgctagctggcatggttgacagtgtgcctaaaggcaaacaggatagcacattactggcctctttgcttcagtcattcagctctaggctgcagactgttgctctgtcacaacaaatcaggcagagcctcaaggagcaaggatatgccctcagtcatgattctttaaaagtggagaaggatttaaggtgctatggtgttgcatcaagtcacttaaaaactttgttgaagaaaagtaaagttaaagatcaaaagcctgatacgaatcttcctgatgtgactaaaaacctcatcagagataggtttgcagagtctcctcatcatgttggacaaagtggaacaaaggtcatgagtgaaccgttgtcatgtgctgcaagattacaggctgttgcaagcatggtggaaaaaagggctagtcctgccacctcacctaaacctagtgttgcttgtagccagttagcattacttctgtcaagcgaagcccatttgcagcagtattctcgagaacacgctttaaaaacgcaaaatgcaaatcaagcagcaagtgaaagacttgctgctatggccagattgcaagaaaatggccagaaggatgttggcagttaccagctcccaaaaggaatgtcaagccatcttaatggtcaggcaagaacatcatcaagcaaactgatggctagcaaaagtagtgctacagtgtttcaaaatccaatgggtatcattccttcttcccctaaaaatgcaggttataagaactcactggaaagaaacaatataaaacaagctgctaacaatagtttgcttttacatcttcttaaaagccagactatacctaagccaatgaatggacacagtcacagtgagagaggaagcatttttgaggaaagtagtacacctacaactattgatgaatattcagataacaatcctagttttacagatgacagcagtggtgatgaaagttcttattccaactgtgttcccatagacttgtcttgcaaacaccgaactgaaaaatcagaatctgaccaacctgtttccctggataacttcactcaatccttgctaaacacttgggatccaaaagtcccagatgtagatatcaaagaagatcaagatacctcaaagaattctaagctaaactcacaccagaaagtaacacttcttcaattgctacttggccataagaatgaagaaaatgtagaaaaaaacaccagccctcagggagtacacaatgatgtgagcaagttcaatacacaaaattatgcaaggacttctgtgatagaaagccccagtacaaatcggactactccagtgagcactccacctttacttacatcaagcaaagcagggtctcccatcaatctctctcaacactctctggtcatcaaatggaattccccaccatatgtctgcagtactcagtctgaaaagctaacaaatactgcatctaaccactcaatggaccttacaaaaagcaaagacccaccaggagagaaaccagcccaaaatgaaggtgcacagaactctgcaacgtttagtgccagtaagctgttacaaaatttagcacaatgtggaatgcagtcatccatgtcagtggaagagcagagacccagcaaacagctgttaactggaaacacagataaaccgataggtatgattgatagattaaatagccctttgctctcaaataaaacaaatgcagttgaagaaaataaagcatttagtagtcaaccaacaggtcctgaaccagggctttctggttctgaaatagaaaatctgcttgaaagacgtactgtcctccagttgctcctggggaaccccaacaaagggaagagtgaaaaaaaagagaaaactcccttaagagatgaaagtactcaggaacactcagagagagctttaagtgaacaaatactgatggtgaaaataaaatctgagccttgtgatgacttacaaattcctaacacaaatgtgcacttgagccatgatgctaagagtgccccattcttgggtatggctcctgctgtgcagagaagcgcacctgccttaccagtgtccgaagactttaaatcggagcctgtttcacctcaggatttttctttctccaagaatggtctgctaagtcgattgctaagacaaaatcaagatagttacctggcagatgattcagacaggagtcacagaaataatgaaatggcacttctagaatcaaagaatctttgcatggtccctaagaaaaggaagctttatactgagccattagaaaatccatttaaaaagatgaaaaacaacattgttgatgctgcaaacaatcacagtgccccagaagtactgtatgggtccttgcttaaccaggaagagctgaaatttagcagaaatgatcttgaatttaaatatcctgctggtcatggctcagccagcgaaagtgaacacaggagttgggccagagagagcaaaagctttaatgttctgaaacagctgcttctctcagaaaactgtgtgcgagatttgtccccgcacagaagtaactctgtggctgacagtaaaaagaaaggacacaaaaataatgtgaccaacagcaaacctgaatttagcatttcttctttaaatggactgatgtacagttccactcagcccagcagttgcatggataacaggacattttcatacccaggtgtagtaaaaactcctgtgagtcctactttccctgagcacttgggctgtgcagggtctagaccagaatctgggcttttgaatgggtgttccatgcccagtgagaaaggacccattaagtgggttatcactgatgcggagaagaatgagtatgaaaaagactctccaagattgaccaaaaccaacccaatactatattacatgcttcaaaaaggaggcaattctgttaccagtcgagaaacacaagacaaggacatttggagggaggcttcatctgctgaaagtgtctcacaggtcacagccaaagaagagttacttcctactgcagaaacgaaagcttctttctttaatttaagaagcccttacaatagccatatgggaaataatgcttctcgcccacacagcgcaaatggagaagtttatggacttctgggaagcgtgctaacgataaagaaagaatcagaataaaatgtacctgccatccagttttggatctttttaaaactaatgagtatgaacttgagatctgtataaataagagcatgatttgaaaaaaagcatggtataattgaaacttttttcattttgaaaagtattggttactggtgatgttgaaatatgcatactaatttttgcttaacattagatgtcatgaggaaactactgaactagcaattggttgtttaacacttctgtatgcatcagataacaactgtgagtagcctatgaatgaaattcttttataaatattaggcataaattaaaatgtaaaactccattcatagtggattaatgcattttgctgcctttattagggtactttattttgcttttcagaagtcagcctacataacacatttttaaagtctaaactgttaaacaactctttaaaggataattatccaataaaaaaaaacctagtgctgattcacagcttattatccaattcaaaaataaattagaaaaatatatgcttacatttttcacttttgctaaaaagaaaaaaaaaaggtgtttatttttaactcttggaagaggttttgtggttcccaatgtgtctgtcccaccctgatccttttcaatatatatttctttaaaccttgtgctacttagtaaaaattgattacaattgagggaagtttgatagatcctttaaaaaaaaggcagatttccattttttgtattttaactactttactaaattaatactcctccttttacagaattagaaaagttaacatttatctttaggtggtttcctgaaaagttgaatatttaagaaattgtttttaacagaagcaaaatggcttttctttggacagttttcaccatctcttgtaaaagttaattctcaccattcctgtggtacctgcgagtgttatgaccaggattccttaaacctgaactcagaccacttgcattagaaccatctggagcacttgttttaaaatgcagattcataggcagcatctcagatctacagaacaagaatctctgctaagtggacctggaatcttccatctgcatcttaacatgctctctaggtgtttcttgtgtttgagaaccatgacttatgactttcctcagaacatgagactgtaaaacaaaaacaaaaaactatgtgatgcctctattttccccaatacagtcacacatcagctcaaaatttgcaatattgtagttcatatattaccgttatgtctttggaaatcgggttcagaacactttttatgacaaaaattgggtggaggggataactttcatatctggctcaacatctcaggaaaatctgtgattatttgtgtgttctaatgagtaacatctacttagttagccttagggatggaaaaacagggccacttaccaaactcaggtgattccaggatggtttggaaacttctcctgaatgcatccttaacctttattaaaaccattgtcctaagaacaatgccaacaaagcttacaacatttagtttaaacccaagaagggcactaaactcagattgactaaataaaaagtacaaagggcacatatacgtgacagaattgtacacaatcactccattggatcttttactttaaagtagtgatgaaaagtacatgttgatactgtcttagaagaaattaatatattagtgaagccacatggggtttcagttgcgaaacaggtctgtttttatgttcagtttgtacaatccacaattcattcaccagatattttgttcttaattgtgaaccaggttagcaaatgacctatcaaaaattattctataatcactactagttaggatattgatttaaaattgttctacttgaagtggtttctaagatttttatattaaaaataggtgtgatttcctaatatgatctaaaaccctaaatggttatttttcctcagaatgatttgtaaatagctactggaaatattatacagtaataggagtgggtattatgcaacatcatggagaagtgaaggcataggcttattctgacataaaattccactggccagttgaatatattctattccatgtccatactatgacaatcttattgtcaacactatataaataagcttttaaacaagtcatttttcttgatcgttgtggaaggtttggagccttagaggtatgtcagaaaaaatatgttggtattctcccttgggtagggggaaatgacctttttacaagagagtgaaatttaggtcagggaaaagaccaagggccagcattgctacttttgtgtgtgtgtgtgtgggttttgttttgtttttttggttggctggttgttttcgttgttgttaacaaaggaatgagaatatgtaatacttaaataaacatgaccacgaagaatgctgttctgatttactagagaatgttcccaatttgaatttagggtgattttaaagaacagtgagaaagggcatacatccacagattcactttgtttatgcatatgtagatacaaggatgcacatatacacattttcaaggactattttagatatctagacaatttcttctaataaagtcatttgtgaaagggtactacagcttattgacatcagtaaggtagcattcattacctgtttattctctgctgcatcttacagaagagtaaactggtgagagtatatattttatatatatatatatatatatatatataatatgtatatatatatatattgacttgttacatgaagatgttaaaatcggtttttaaaggtgatgtaaatagtgatttccttaatgaaaaatacatattttgtattgttctaatgcaacagaaaagccttttaatctctttggttcctgtatattccatgtataagtgtaaatataatcagacaggtttaaaagttgtgcatgtatgtatacagttgcaagtctggacaaatgtatagaataaaccttttatttaagttgtgattacctgctgcatgaaaagtgcatgggggaccctgtgcatctgtgcatttggcaaaatgtcttaacaaatcagatcagatgttcatcctaacatgacagtattccatttctggacatgacgtctgtggtttaagctttgtgaaagaatgtgctttgattcgaagggtcttaaagaatttttttaatcgtcaaccacttttaaacataaagaattcacacaactactttcatgaattttttaatcccattgcaaacattattccaagagtatcccagtattagcaatactggaatataggcacattaccattcatagtaagaattctggtgtttacacaaccaaatttgatgcgatctgctcagtaatataatttgccatttttattagaaatttaatttcttcatgtgatgtcatgaaactgtacatactgcagtgtgaatttttttgttttgttttttaatcttttagtgtttacttcctgcagtgaatttgaataaatgagaaaaaatgcattgtc

SEQ ID NO: 277235 - DNA, 7562 bp, Artificial Sequence
  derived and/or modified sequence
cgacccggccccacgcccgcccgccacccgcgcgcgcccgtccgcccgtggcctcgcgtccgccgctgcgccgtgagcgccgctggtcggagggaagagctcgccggggcgccgggccaggacggggcggcaggcgccttcgcggaccgagcctgacggagccggaggctgggagccgcggcggcctggggaagtgtttggattgtgagctatttcagaactgttctcaggactcattattttaacatttgggagaaacacagccagaagaacactgatatttgcatttaatggggaacaaaagatgaagaaggaaaaggaatatattcactaaggattctatctgcttactgctacagacctatgtgttaaggaattcttctcctcctccttgcgtagaagttgatcagcactgtggtcagactgcatttatcttgtcattgccagaagaaatcttggacagaatgtaacagtacgtctctctctgattgcgatggaaggtgataaactgatactcctttattaaagttacatcgcactcaccacagaaaaccattctttaaagtgaatagaaaccaagcccttgtgaacacttctattgaacatgactcatggagaagagcttggctctgatgtgcaccaggattctattgttttaacttacctagaaggattactaatgcatcaggcagcagggggatcaggtactgccgttgacaaaaagtctgctgggcataatgaagaggatcagaactttaacatttctggcagtgcatttcccacctgtcaaagtaatggtccagttctcaatacacatacatatcaggggtctggcatgctgcacctcaaaaaagccagactgttgcagtcttctgaggactggaatgcagcaaagcggaagaggctgtctgattctatcatgaatttaaacgtaaagaaggaagctttgctagctggcatggttgacagtgtgcctaaaggcaaacaggatagcacattactggcctctttgcttcagtcattcagctctaggctgcagactgttgctctgtcacaacaaatcaggcagagcctcaaggagcaaggatatgccctcagtcatgattctttaaaagtggagaaggatttaaggtgctatggtgttgcatcaagtcacttaaaaactttgttgaagaaaagtaaagttaaagatcaaaagcctgatacgaatcttcctgatgtgactaaaaacctcatcagagataggtttgcagagtctcctcatcatgttggacaaagtggaacaaaggtcatgagtgaaccgttgtcatgtgctgcaagattacaggctgttgcaagcatggtggaaaaaagggctagtcctgccacctcacctaaacctagtgttgcttgtagccagttagcattacttctgtcaagcgaagcccatttgcagcagtattctcgagaacacgctttaaaaacgcaaaatgcaaatcaagcagcaagtgaaagacttgctgctatggccagattgcaagaaaatggccagaaggatgttggcagttaccagctcccaaaaggaatgtcaagccatcttaatggtcaggcaagaacatcatcaagcaaactgatggctagcaaaagtagtgctacagtgtttcaaaatccaatgggtatcattccttcttcccctaaaaatgcaggttataagaactcactggaaagaaacaatataaaacaagctgctaacaatagtttgcttttacatcttcttaaaagccagactatacctaagccaatgaatggacacagtcacagtgagagaggaagcatttttgaggaaagtagtacacctacaactattgatgaatattcagataacaatcctagttttacagatgacagcagtggtgatgaaagttcttattccaactgtgttcccatagacttgtcttgcaaacaccgaactgaaaaatcagaatctgaccaacctgtttccctggataacttcactcaatccttgctaaacacttgggatccaaaagtcccagatgtagatatcaaagaagatcaagatacctcaaagaattctaagctaaactcacaccagaaagtaacacttcttcaattgctacttggccataagaatgaagaaaatgtagaaaaaaacaccagccctcagggagtacacaatgatgtgagcaagttcaatacacaaaattatgcaaggacttctgtgatagaaagccccagtacaaatcggactactccagtgagcactccacctttacttacatcaagcaaagcagggtctcccatcaatctctctcaacactctctggtcatcaaatggaattccccaccatatgtctgcagtactcagtctgaaaagctaacaaatactgcatctaaccactcaatggaccttacaaaaagcaaagacccaccaggagagaaaccagcccaaaatgaaggtgcacagaactctgcaacgtttagtgccagtaagctgttacaaaatttagcacaatgtggaatgcagtcatccatgtcagtggaagagcagagacccagcaaacagctgttaactggaaacacagataaaccgataggtatgattgatagattaaatagccctttgctctcaaataaaacaaatgcagttgaagaaaataaagcatttagtagtcaaccaacaggtcctgaaccagggctttctggttctgaaatagaaaatctgcttgaaagacgtactgtcctccagttgctcctggggaaccccaacaaagggaagagtgaaaaaaaagagaaaactcccttaagagatgaaagtactcaggaacactcagagagagctttaagtgaacaaatactgatggtgaaaataaaatctgagccttgtgatgacttacaaattcctaacacaaatgtgcacttgagccatgatgctaagagtgccccattcttgggtatggctcctgctgtgcagagaagcgcacctgccttaccagtgtccgaagactttaaatcggagcctgtttcacctcaggatttttctttctccaagaatggtctgctaagtcgattgctaagacaaaatcaagatagttacctggcagatgattcagacaggagtcacagaaataatgaaatggcacttctagaatcaaagaatctttgcatggtccctaagaaaaggaagctttatactgagccattagaaaatccatttaaaaagatgaaaaacaacattgttgatgctgcaaacaatcacagtgccccagaagtactgtatgggtccttgcttaaccaggaagagctgaaatttagcagaaatgatcttgaatttaaatatcctgctggtcatggctcagccagcgaaagtgaacacaggagttgggccagagagagcaaaagctttaatgttctgaaacagctgcttctctcagaaaactgtgtgcgagatttgtccccgcacagaagtaactctgtggctgacagtaaaaagaaaggacacaaaaataatgtgaccaacagcaaacctgaatttagcatttcttctttaaatggactgatgtacagttccactcagcccagcagttgcatggataacaggacattttcatacccaggtgtagtaaaaactcctgtgagtcctactttccctgagcacttgggctgtgcagggtctagaccagaatctgggcttttgaatgggtgttccatgcccagtgagaaaggacccattaagtgggttatcactgatgcggagaagaatgagtatgaaaaagactctccaagattgaccaaaaccaacccaatactatattacatgcttcaaaaaggaggcaattctgttaccagtcgagaaacacaagacaaggacatttggagggaggcttcatctgctgaaagtgtctcacaggtcacagccaaagaagagttacttcctactgcagaaacgaaagcttctttctttaatttaagaagcccttacaatagccatatgggaaataatgcttctcgcccacacagcgcaaatggagaagtttatggacttctgggaagcgtgctaacgataaagaaagaatcagaataaaatgtacctgccatccagttttggatctttttaaaactaatgagtatgaacttgagatctgtataaataagagcatgatttgaaaaaaagcatggtataattgaaacttttttcattttgaaaagtattggttactggtgatgttgaaatatgcatactaatttttgcttaacattagatgtcatgaggaaactactgaactagcaattggttgtttaacacttctgtatgcatcagataacaactgtgagtagcctatgaatgaaattcttttataaatattaggcataaattaaaatgtaaaactccattcatagtggattaatgcattttgctgcctttattagggtactttattttgcttttcagaagtcagcctacataacacatttttaaagtctaaactgttaaacaactctttaaaggataattatccaataaaaaaaaacctagtgctgattcacagcttattatccaattcaaaaataaattagaaaaatatatgcttacatttttcacttttgctaaaaagaaaaaaaaaaggtgtttatttttaactcttggaagaggttttgtggttcccaatgtgtctgtcccaccctgatccttttcaatatatatttctttaaaccttgtgctacttagtaaaaattgattacaattgagggaagtttgatagatcctttaaaaaaaaggcagatttccattttttgtattttaactactttactaaattaatactcctccttttacagaattagaaaagttaacatttatctttaggtggtttcctgaaaagttgaatatttaagaaattgtttttaacagaagcaaaatggcttttctttggacagttttcaccatctcttgtaaaagttaattctcaccattcctgtggtacctgcgagtgttatgaccaggattccttaaacctgaactcagaccacttgcattagaaccatctggagcacttgttttaaaatgcagattcataggcagcatctcagatctacagaacaagaatctctgctaagtggacctggaatcttccatctgcatcttaacatgctctctaggtgtttcttgtgtttgagaaccatgacttatgactttcctcagaacatgagactgtaaaacaaaaacaaaaaactatgtgatgcctctattttccccaatacagtcacacatcagctcaaaatttgcaatattgtagttcatatattaccgttatgtctttggaaatcgggttcagaacactttttatgacaaaaattgggtggaggggataactttcatatctggctcaacatctcaggaaaatctgtgattatttgtgtgttctaatgagtaacatctacttagttagccttagggatggaaaaacagggccacttaccaaactcaggtgattccaggatggtttggaaacttctcctgaatgcatccttaacctttattaaaaccattgtcctaagaacaatgccaacaaagcttacaacatttagtttaaacccaagaagggcactaaactcagattgactaaataaaaagtacaaagggcacatatacgtgacagaattgtacacaatcactccattggatcttttactttaaagtagtgatgaaaagtacatgttgatactgtcttagaagaaattaatatattagtgaagccacatggggtttcagttgcgaaacaggtctgtttttatgttcagtttgtacaatccacaattcattcaccagatattttgttcttaattgtgaaccaggttagcaaatgacctatcaaaaattattctataatcactactagttaggatattgatttaaaattgttctacttgaagtggtttctaagatttttatattaaaaataggtgtgatttcctaatatgatctaaaaccctaaatggttatttttcctcagaatgatttgtaaatagctactggaaatattatacagtaataggagtgggtattatgcaacatcatggagaagtgaaggcataggcttattctgacataaaattccactggccagttgaatatattctattccatgtccatactatgacaatcttattgtcaacactatataaataagcttttaaacaagtcatttttcttgatcgttgtggaaggtttggagccttagaggtatgtcagaaaaaatatgttggtattctcccttgggtagggggaaatgacctttttacaagagagtgaaatttaggtcagggaaaagaccaagggccagcattgctacttttgtgtgtgtgtgtgtgggttttgttttgtttttttggttggctggttgttttcgttgttgttaacaaaggaatgagaatatgtaatacttaaataaacatgaccacgaagaatgctgttctgatttactagagaatgttcccaatttgaatttagggtgattttaaagaacagtgagaaagggcatacatccacagattcactttgtttatgcatatgtagatacaaggatgcacatatacacattttcaaggactattttagatatctagacaatttcttctaataaagtcatttgtgaaagggtactacagcttattgacatcagtaaggtagcattcattacctgtttattctctgctgcatcttacagaagagtaaactggtgagagtatatattttatatatatatatatatatatatatataatatgtatatatatatatattgacttgttacatgaagatgttaaaatcggtttttaaaggtgatgtaaatagtgatttccttaatgaaaaatacatattttgtattgttctaatgcaacagaaaagccttttaatctctttggttcctgtatattccatgtataagtgtaaatataatcagacaggtttaaaagttgtgcatgtatgtatacagttgcaagtctggacaaatgtatagaataaaccttttatttaagttgtgattacctgctgcatgaaaagtgcatgggggaccctgtgcatctgtgcatttggcaaaatgtcttaacaaatcagatcagatgttcatcctaacatgacagtattccatttctggacatgacgtctgtggtttaagctttgtgaaagaatgtgctttgattcgaagggtcttaaagaatttttttaatcgtcaaccacttttaaacataaagaattcacacaactactttcatgaattttttaatcccattgcaaacattattccaagagtatcccagtattagcaatactggaatataggcacattaccattcatagtaagaattctggtgtttacacaaccaaatttgatgcgatctgctcagtaatataatttgccatttttattagaaatttaatttcttcatgtgatgtcatgaaactgtacatactgcagtgtgaatttttttgttttgttttttaatcttttagtgtttacttcctgcagtgaatttgaataaatgagaaaaaatgcattgtc

SEQ ID NO: 277236 - DNA, 7671 bp, Artificial Sequence
  derived and/or modified sequence
agacattgcagcagagccccgaactcgggaggcggcggcggaggaggcggcggcgaggcgcagggacgacccggccccacgcccgcccgccacccgcgcgcgcccgtccgcccgtggcctcgcgtccgccgctgcgccgtgagcgccgctggtcggagggaagagctcgccggggcgccgggccaggacggggcggcaggcgccttcgcggaccgagcctgacggagccggaggctgggagccgcggcggcctgggatgcacacttgactgaaggaggacagggaatctgaagactccggatgacatcagagctacttttcaacagccttctcaattttctttctcagaaagcagaggctcagagcttggagacagacgaacactgatatttgcatttaatggggaacaaaagatgaagaaggaaaaggaatatattcactaaggattctatctgcttactgctacagacctatgtgttaaggaattcttctcctcctccttgcgtagaagttgatcagcactgtggtcagactgcatttatcttgtcattgccagaagaaatcttggacagaatgtaacagtacgtctctctctgattgcgatggaaggtgataaactgatactcctttattaaagttacatcgcactcaccacagaaaaccattctttaaagtgaatagaaaccaagcccttgtgaacacttctattgaacatgactcatggagaagagcttggctctgatgtgcaccaggattctattgttttaacttacctagaaggattactaatgcatcaggcagcagggggatcaggtactgccgttgacaaaaagtctgctgggcataatgaagaggatcagaactttaacatttctggcagtgcatttcccacctgtcaaagtaatggtccagttctcaatacacatacatatcaggggtctggcatgctgcacctcaaaaaagccagactgttgcagtcttctgaggactggaatgcagcaaagcggaagaggctgtctgattctatcatgaatttaaacgtaaagaaggaagctttgctagctggcatggttgacagtgtgcctaaaggcaaacaggatagcacattactggcctctttgcttcagtcattcagctctaggctgcagactgttgctctgtcacaacaaatcaggcagagcctcaaggagcaaggatatgccctcagtcatgattctttaaaagtggagaaggatttaaggtgctatggtgttgcatcaagtcacttaaaaactttgttgaagaaaagtaaagttaaagatcaaaagcctgatacgaatcttcctgatgtgactaaaaacctcatcagagataggtttgcagagtctcctcatcatgttggacaaagtggaacaaaggtcatgagtgaaccgttgtcatgtgctgcaagattacaggctgttgcaagcatggtggaaaaaagggctagtcctgccacctcacctaaacctagtgttgcttgtagccagttagcattacttctgtcaagcgaagcccatttgcagcagtattctcgagaacacgctttaaaaacgcaaaatgcaaatcaagcagcaagtgaaagacttgctgctatggccagattgcaagaaaatggccagaaggatgttggcagttaccagctcccaaaaggaatgtcaagccatcttaatggtcaggcaagaacatcatcaagcaaactgatggctagcaaaagtagtgctacagtgtttcaaaatccaatgggtatcattccttcttcccctaaaaatgcaggttataagaactcactggaaagaaacaatataaaacaagctgctaacaatagtttgcttttacatcttcttaaaagccagactatacctaagccaatgaatggacacagtcacagtgagagaggaagcatttttgaggaaagtagtacacctacaactattgatgaatattcagataacaatcctagttttacagatgacagcagtggtgatgaaagttcttattccaactgtgttcccatagacttgtcttgcaaacaccgaactgaaaaatcagaatctgaccaacctgtttccctggataacttcactcaatccttgctaaacacttgggatccaaaagtcccagatgtagatatcaaagaagatcaagatacctcaaagaattctaagctaaactcacaccagaaagtaacacttcttcaattgctacttggccataagaatgaagaaaatgtagaaaaaaacaccagccctcagggagtacacaatgatgtgagcaagttcaatacacaaaattatgcaaggacttctgtgatagaaagccccagtacaaatcggactactccagtgagcactccacctttacttacatcaagcaaagcagggtctcccatcaatctctctcaacactctctggtcatcaaatggaattccccaccatatgtctgcagtactcagtctgaaaagctaacaaatactgcatctaaccactcaatggaccttacaaaaagcaaagacccaccaggagagaaaccagcccaaaatgaaggtgcacagaactctgcaacgtttagtgccagtaagctgttacaaaatttagcacaatgtggaatgcagtcatccatgtcagtggaagagcagagacccagcaaacagctgttaactggaaacacagataaaccgataggtatgattgatagattaaatagccctttgctctcaaataaaacaaatgcagttgaagaaaataaagcatttagtagtcaaccaacaggtcctgaaccagggctttctggttctgaaatagaaaatctgcttgaaagacgtactgtcctccagttgctcctggggaaccccaacaaagggaagagtgaaaaaaaagagaaaactcccttaagagatgaaagtactcaggaacactcagagagagctttaagtgaacaaatactgatggtgaaaataaaatctgagccttgtgatgacttacaaattcctaacacaaatgtgcacttgagccatgatgctaagagtgccccattcttgggtatggctcctgctgtgcagagaagcgcacctgccttaccagtgtccgaagactttaaatcggagcctgtttcacctcaggatttttctttctccaagaatggtctgctaagtcgattgctaagacaaaatcaagatagttacctggcagatgattcagacaggagtcacagaaataatgaaatggcacttctagaatcaaagaatctttgcatggtccctaagaaaaggaagctttatactgagccattagaaaatccatttaaaaagatgaaaaacaacattgttgatgctgcaaacaatcacagtgccccagaagtactgtatgggtccttgcttaaccaggaagagctgaaatttagcagaaatgatcttgaatttaaatatcctgctggtcatggctcagccagcgaaagtgaacacaggagttgggccagagagagcaaaagctttaatgttctgaaacagctgcttctctcagaaaactgtgtgcgagatttgtccccgcacagaagtaactctgtggctgacagtaaaaagaaaggacacaaaaataatgtgaccaacagcaaacctgaatttagcatttcttctttaaatggactgatgtacagttccactcagcccagcagttgcatggataacaggacattttcatacccaggtgtagtaaaaactcctgtgagtcctactttccctgagcacttgggctgtgcagggtctagaccagaatctgggcttttgaatgggtgttccatgcccagtgagaaaggacccattaagtgggttatcactgatgcggagaagaatgagtatgaaaaagactctccaagattgaccaaaaccaacccaatactatattacatgcttcaaaaaggaggcaattctgttaccagtcgagaaacacaagacaaggacatttggagggaggcttcatctgctgaaagtgtctcacaggtcacagccaaagaagagttacttcctactgcagaaacgaaagcttctttctttaatttaagaagcccttacaatagccatatgggaaataatgcttctcgcccacacagcgcaaatggagaagtttatggacttctgggaagcgtgctaacgataaagaaagaatcagaataaaatgtacctgccatccagttttggatctttttaaaactaatgagtatgaacttgagatctgtataaataagagcatgatttgaaaaaaagcatggtataattgaaacttttttcattttgaaaagtattggttactggtgatgttgaaatatgcatactaatttttgcttaacattagatgtcatgaggaaactactgaactagcaattggttgtttaacacttctgtatgcatcagataacaactgtgagtagcctatgaatgaaattcttttataaatattaggcataaattaaaatgtaaaactccattcatagtggattaatgcattttgctgcctttattagggtactttattttgcttttcagaagtcagcctacataacacatttttaaagtctaaactgttaaacaactctttaaaggataattatccaataaaaaaaaacctagtgctgattcacagcttattatccaattcaaaaataaattagaaaaatatatgcttacatttttcacttttgctaaaaagaaaaaaaaaaggtgtttatttttaactcttggaagaggttttgtggttcccaatgtgtctgtcccaccctgatccttttcaatatatatttctttaaaccttgtgctacttagtaaaaattgattacaattgagggaagtttgatagatcctttaaaaaaaaggcagatttccattttttgtattttaactactttactaaattaatactcctccttttacagaattagaaaagttaacatttatctttaggtggtttcctgaaaagttgaatatttaagaaattgtttttaacagaagcaaaatggcttttctttggacagttttcaccatctcttgtaaaagttaattctcaccattcctgtggtacctgcgagtgttatgaccaggattccttaaacctgaactcagaccacttgcattagaaccatctggagcacttgttttaaaatgcagattcataggcagcatctcagatctacagaacaagaatctctgctaagtggacctggaatcttccatctgcatcttaacatgctctctaggtgtttcttgtgtttgagaaccatgacttatgactttcctcagaacatgagactgtaaaacaaaaacaaaaaactatgtgatgcctctattttccccaatacagtcacacatcagctcaaaatttgcaatattgtagttcatatattaccgttatgtctttggaaatcgggttcagaacactttttatgacaaaaattgggtggaggggataactttcatatctggctcaacatctcaggaaaatctgtgattatttgtgtgttctaatgagtaacatctacttagttagccttagggatggaaaaacagggccacttaccaaactcaggtgattccaggatggtttggaaacttctcctgaatgcatccttaacctttattaaaaccattgtcctaagaacaatgccaacaaagcttacaacatttagtttaaacccaagaagggcactaaactcagattgactaaataaaaagtacaaagggcacatatacgtgacagaattgtacacaatcactccattggatcttttactttaaagtagtgatgaaaagtacatgttgatactgtcttagaagaaattaatatattagtgaagccacatggggtttcagttgcgaaacaggtctgtttttatgttcagtttgtacaatccacaattcattcaccagatattttgttcttaattgtgaaccaggttagcaaatgacctatcaaaaattattctataatcactactagttaggatattgatttaaaattgttctacttgaagtggtttctaagatttttatattaaaaataggtgtgatttcctaatatgatctaaaaccctaaatggttatttttcctcagaatgatttgtaaatagctactggaaatattatacagtaataggagtgggtattatgcaacatcatggagaagtgaaggcataggcttattctgacataaaattccactggccagttgaatatattctattccatgtccatactatgacaatcttattgtcaacactatataaataagcttttaaacaagtcatttttcttgatcgttgtggaaggtttggagccttagaggtatgtcagaaaaaatatgttggtattctcccttgggtagggggaaatgacctttttacaagagagtgaaatttaggtcagggaaaagaccaagggccagcattgctacttttgtgtgtgtgtgtgtgggttttgttttgtttttttggttggctggttgttttcgttgttgttaacaaaggaatgagaatatgtaatacttaaataaacatgaccacgaagaatgctgttctgatttactagagaatgttcccaatttgaatttagggtgattttaaagaacagtgagaaagggcatacatccacagattcactttgtttatgcatatgtagatacaaggatgcacatatacacattttcaaggactattttagatatctagacaatttcttctaataaagtcatttgtgaaagggtactacagcttattgacatcagtaaggtagcattcattacctgtttattctctgctgcatcttacagaagagtaaactggtgagagtatatattttatatatatatatatatatatatatataatatgtatatatatatatattgacttgttacatgaagatgttaaaatcggtttttaaaggtgatgtaaatagtgatttccttaatgaaaaatacatattttgtattgttctaatgcaacagaaaagccttttaatctctttggttcctgtatattccatgtataagtgtaaatataatcagacaggtttaaaagttgtgcatgtatgtatacagttgcaagtctggacaaatgtatagaataaaccttttatttaagttgtgattacctgctgcatgaaaagtgcatgggggaccctgtgcatctgtgcatttggcaaaatgtcttaacaaatcagatcagatgttcatcctaacatgacagtattccatttctggacatgacgtctgtggtttaagctttgtgaaagaatgtgctttgattcgaagggtcttaaagaatttttttaatcgtcaaccacttttaaacataaagaattcacacaactactttcatgaattttttaatcccattgcaaacattattccaagagtatcccagtattagcaatactggaatataggcacattaccattcatagtaagaattctggtgtttacacaaccaaatttgatgcgatctgctcagtaatataatttgccatttttattagaaatttaatttcttcatgtgatgtcatgaaactgtacatactgcagtgtgaatttttttgttttgttttttaatcttttagtgtttacttcctgcagtgaatttgaataaatgagaaaaaatgcattgtc

SEQ ID NO: 277237 - DNA, 720 bp, Artificial Sequence
  derived and/or modified sequence
ttgtggttatctcagcagaagacataccgccctcctccttgtattggtcgggacctgggcattagggagtcaaggcaaaggagaaagaaaagagattttacattagtattctatgaaagccttacggtctgcagaacaaattgattactccggtgtacctgtgcttggcaccactgctgtgagagaaagaacactgatatttgcatttaatggggaacaaaagatgaagaaggaaaaggaatatattcactaaggattctatctgcttactgctacagacctatgtgttaaggaattcttctcctcctccttgcgtagaagttgatcagcactgtggtcagactgcatttatcttgtcattgccagaagaaatcttggacagaatgtaacagtacgtctctctctgattgcgatggaaggtgataaactgatactcctttattaaagttacatcgcactcaccacagaaaaccattctttaaagtgaatagaaaccaagcccttgtgaacacttctattgaacatgactcatggagaagagcttggctctgatgtgcaccaggattctattgttttaacttacctagaaggattactaatgcatcaggcagcagggggatcaggtactgccgttgacaaaaagtctgctgggcataatgaagaggatcagaactttaacatttctggcagtgcatttcccacctgtcaaagtaatggtcc

SEQ ID NO: 277238 - DNA, 3477 bp, Artificial Sequence
  derived and/or modified sequence
atgacgcacggtgaagaactgggctccgatgttcatcaggactctattgtgttaacataccttgaagggctcctaatgcaccaggcagccggaggatctggaacagccgtggataagaagtcagctgggcacaacgaggaggaccagaatttcaatattagcgggtcagcctttcctacttgtcagtccaatggcccagttctgaatacccatacctaccagggcagcggaatgcttcatctcaagaaagcgcgactgctacagtctagcgaggactggaacgcggcaaagagaaaacgcctgtcagactcaatcatgaatctcaatgtgaagaaggaggcattgctggcaggcatggtcgactccgtccctaagggaaaacaggactcaacgcttctcgcaagtttgttacagtcgttctcctcacgtctccagaccgttgctttatcccaacagataagacagagcttaaaggaacagggatacgcgctcagccatgattccctaaaggtggagaaggacttgcgttgttacggtgttgctagctcacatttgaagaccctgctgaagaagtctaaggtcaaggaccaaaagcccgatactaatctgccagacgtcacgaagaatctaattcgcgaccggtttgccgaatctccacaccacgtgggacagtccggaaccaaggttatgtccgagcctctttcatgtgctgcgcgattgcaggcggtggcttccatggtggaaaagagagcttcacctgctacaagccccaagcccagcgttgcctgcagccagctggccctcctcctctccagcgaggcccatctccagcagtacagtagggaacacgccctgaagactcagaatgccaatcaggctgcctctgaaaggctggctgccatggccagattgcaggaaaatggccagaaggacgtcggctcttatcagctgcccaaagggatgtccagtcatctgaatggacaagctagaacaagcagctccaaactgatggcgagcaaaagcagcgccacagtgttccagaatcccatggggatcatcccctcatccccaaaaaacgcaggctacaagaattcactcgagcgcaacaacatcaagcaggcagcaaacaatagccttctgctgcatctgttgaaatcccaaactattcccaaaccaatgaacgggcactcgcactcagaacggggaagtattttcgaggagtcgtcgacacctacaactattgatgagtattctgacaacaatccctccttcacggatgattctagtggagacgagtcgtcctatagcaactgcgttcccatcgacctatcctgtaaacaccgaactgagaagtcagagagcgaccagccggtgtccctggacaactttacacaatccctcctgaacacttgggaccccaaggtgcccgatgtggatatcaaagaagatcaggatacgagcaaaaactcaaaactgaatagtcaccaaaaggtgacactgttgcagctgctcttaggccacaaaaatgaggagaacgtggagaagaatacatctccccagggagtgcataatgatgtctcgaagtttaatacccagaattacgccaggacgagcgtcattgagtcgccatccaccaataggacaacgcctgtttctacgccaccgttacttacatcatccaaagccggatctcccatcaatctcagccagcactctttggtgattaagtggaatagtcccccatacgtgtgtagcactcagtcagagaagctgacaaatacagccagtaatcactcaatggatctgaccaagagcaaggacccgccaggcgagaagcctgcacagaacgaaggggctcagaattctgctacgttctccgccagtaaactcctgcaaaacttggcccaatgcggaatgcaaagttctatgtccgtggaggaacaacgccctagtaagcagctactgaccggcaacaccgataaaccaatcggcatgatagacaggctgaactctcccctgctgtctaacaagactaatgccgtcgaggagaataaagcattcagttcacagccaactggacctgaaccaggcctttcagggagcgagattgagaatcttctggagagacggacagtcctgcagctgcttttaggtaaccccaacaaagggaagagcgaaaagaaagaaaaaacaccactcagagacgagagcactcaagagcatagcgaacgcgctctgagcgagcagattctgatggttaagataaaaagcgaaccctgtgacgacctgcaaattcctaacactaacgtgcacttgagtcacgatgccaaatccgcaccctttttaggcatggctccagctgtacagaggtcagctccggctctcccagtctcagaggacttcaagtcagagccagttagtccacaggacttcagctttagtaagaatgggctgcttagcaggttactgcgacagaatcaagacagttatctcgctgatgacagtgatcgatctcaccggaacaatgagatggccctgttagagtctaaaaatctttgcatggttccaaaaaagaggaagctttataccgagccactggagaaccctttcaaaaagatgaaaaacaatattgtcgatgcagcgaacaaccacagcgctcctgaggtcttgtacggtagccttctgaatcaagaggagttgaaatttagccgcaacgatttggaattcaagtaccccgcaggacacggttctgctagcgagagcgaacatcgctcctgggccagggagagtaagtcattcaatgtcctcaagcaactgctgctctcagaaaattgtgtgcgcgatctgagtccgcatagatctaactcagtcgcggatagcaaaaaaaagggacacaagaataatgtgactaattctaagccagagttttccatctcgagtctcaatgggcttatgtactctagtacacaaccatcttcctgcatggataaccgtactttcagttacccgggtgtcgtcaagacaccggtgtcacccaccttccctgaacatctgggatgtgcgggatctaggcctgaaagtggcctcctcaatggctgcagtatgccttccgaaaaaggacctatcaagtgggtaataaccgatgctgaaaaaaatgagtacgagaaggatagccccagactaacgaagaccaaccctattttgtactatatgctccagaagggaggtaactcagtgacctccagggagacgcaggataaggatatttggcgagaagcttccagcgcagaatccgtatctcaggttaccgccaaagaagagttactgcctactgccgaaaccaaggcaagttttttcaacctgcgtagcccctacaactctcacatgggaaataatgcctcacgccctcacagcgctaacggtgaagtatacggtttgctcgggagcgtcctcacaatcaagaaggaatctgagtag

SEQ ID NO: 277239 - DNA, 3477 bp, Artificial Sequence
  derived and/or modified sequence
atgacacatggggaagagctgggctctgacgtccaccaggactccattgtcctcacatacttggaggggctcctgatgcatcaggcagcaggaggatcgggaaccgccgttgacaagaagagcgcaggtcataacgaggaggaccagaatttcaatattagtggaagtgccttccccacttgtcaaagtaacggcccagttctcaacacacatacgtaccaggggagcggtatgctgcacttgaaaaaagctagacttcttcagtcttcggaggattggaatgctgcaaagcggaagaggttgtcagattccatcatgaacctgaatgtcaaaaaggaggccctcctcgctggcatggtcgactctgtacccaaaggcaagcaagactctaccctgcttgcttccctccttcagtcattttcctcccgacttcaaaccgtcgctctgagtcagcaaatcagacagagcctgaaggaacagggatacgctttatcccacgacagcctgaaggtggagaaggatctccgctgctatggtgtggcctctagccaccttaagactctcctcaagaaaagtaaagttaaagatcagaaacccgacactaacctgcctgatgtgactaagaacctgatccgcgaccgattcgccgagtcaccgcaccacgtgggccagagcggcacaaaggtcatgtctgagcccttgtcttgcgccgctcgcttgcaggcagttgcttccatggtggaaaagcgtgcctcgccagcgacatcccctaaacctagtgtagcctgctcgcagctggctctcctgctttctagcgaagctcatttgcagcagtactcaagggaacacgcactcaagacacaaaacgccaatcaagcggcaagcgagcggctcgcggctatggccaggcttcaggagaatggacagaaagatgtggggagctatcagctgcctaagggcatgagtagccacctgaacggacaagccaggacatcctcctcgaagctgatggctagtaaaagttccgctacagtgtttcagaaccccatgggcatcattccctcctcccccaaaaacgccggatacaaaaacagtctcgaacggaataacataaagcaggccgctaataattccctgttacttcacttgctcaagtcccagacaatcccaaagcctatgaatggccacagtcactctgagcgagggagcatttttgaagagtctagtaccccgacgaccatcgacgagtatagtgacaataatccaagctttaccgatgactcttcaggagacgaatcttcctactcaaattgcgtacccattgacctttcttgtaaacaccgaaccgaaaaaagcgaatctgatcagcccgtctcactagataacttcactcaatccctccttaacacgtgggatccgaaggtcccagacgttgacatcaaagaagaccaggacactagcaaaaatagtaaactgaactctcatcagaaggtaacattactacagctcctgctgggccataaaaatgaagaaaatgttgagaagaataccagcccccaaggggtgcataatgacgtcagtaagtttaatacccagaattacgccagaaccagtgtcatcgagtcaccctctacaaacagaacaacccccgtctctactcctcccctgctgaccagcagtaaggccggaagtcccattaatctgagccagcactcactggtgataaagtggaattcccctccctatgtgtgtagcacccaatcggaaaagttgacaaacacggcaagcaatcactcaatggacctgaccaaaagcaaagatcctcccggtgagaaaccagctcagaatgagggagcccagaactcagctacattttccgcgtcgaaactgctgcagaacctcgctcaatgcggaatgcagtccagtatgagtgtagaagagcaacgtccatccaagcagttgttaaccggtaatacagacaagcccatcggtatgatcgacagacttaactcaccacttctgtcaaataaaactaatgccgtggaagagaacaaggcattcagttctcagccgacgggtcccgaaccaggcctgtcagggagtgaaatcgagaatctgctggagcggcgaaccgtgttgcagcttctgctcggcaatcccaataagggcaaatcagaaaagaaagagaagacacctctgagagacgagtccacgcaggagcacagtgaaagggctctgtccgagcaaattctcatggtcaagataaaatcagagccttgtgatgacctgcaaattccaaataccaatgtgcatctgagccacgacgcaaaatcagctccattcctcggcatggcccctgccgtccagcggagcgccccagccctgccagtgtccgaagactttaaaagcgaacctgttagtccccaggactttagctttagcaaaaatgggctgctttccagattgctgagacagaaccaagatagctatctggccgacgacagcgatagatcccaccgaaacaacgagatggcgctgctggaatcgaagaacctgtgtatggtccctaaaaaacgtaagttatacactgagccgctggaaaaccccttcaagaagatgaagaacaacatagtggatgcggctaataaccactccgcccctgaggttctgtacgggtcactgttaaatcaggaggagctgaaattctccagaaacgacctagaattcaaatatccagcaggccacgggtcagcctcagaaagtgagcaccgctcatgggcccgtgagtctaaatctttcaatgtgctgaagcagctgctgctctctgaaaattgtgtccgggatctgtcgcctcaccggtctaactccgtagccgattccaaaaaaaagggccataaaaataacgtgactaactctaagcctgagttctctatcagtagcctgaatggcttaatgtatagctccacccagccaagcagctgtatggataaccgtacattctcttatccgggtgtggttaaaaccccagtgtcaccgactttcccagaacacctgggttgcgctgggtcccgtccggaaagtggactgctcaacggatgttccatgcctagcgaaaaggggcctattaagtgggtgataacagacgctgaaaagaacgaatacgaaaaagactctccacggttgacaaaaacaaatcccatcctctattatatgctgcaaaaaggtgggaatagcgtcaccagtcgcgaaacccaggataaggatatttggagagaagctagcagcgccgagagtgtcagccaagtcaccgccaaggaggaacttctacccaccgccgaaactaaagccagtttcttcaatctacggtctccctacaattcccatatgggcaacaatgcctctaggcctcactccgcgaatggcgaggtgtacggcctgcttgggtccgttctgaccataaagaaggagtctgagtag

SEQ ID NO: 277240 - DNA, 3477 bp, Artificial Sequence
  derived and/or modified sequence
atgactcacggcgaagagctcggcagcgatgtgcatcaagactccatcgtgctcacatatctggaaggtctgcttatgcatcaagctgccggaggctctggcaccgctgtagataagaagtccgccggacataatgaagaagaccagaattttaacatcagtggatctgcctttcctacttgccaatctaacggaccagtcctgaacactcacacatatcagggcagtggcatgcttcacctgaaaaaagctagattgctccaaagtagcgaggactggaatgcagccaagaggaagaggctgagtgactctataatgaaccttaacgtgaaaaaggaagccttactggcaggcatggtggattctgtgcccaagggaaagcaggacagtaccctattggccagcctgctgcagtctttcagtagtagacttcaaaccgtggccctctcccagcagattcggcaatctctgaaggaacaggggtacgcgctttcacatgattctctgaaggtggagaaggacctcagatgctatggcgtggcctcttcccatcttaaaactctgctaaaaaaatctaaggtcaaggaccagaagcccgatactaatctcccagacgtcaccaaaaacttaattcgggacaggttcgccgagtccccgcatcacgtcggtcagtctggcacaaaagtgatgtccgagcccttatcttgcgcagcaaggctccaggctgttgccagcatggtggaaaaacgtgcatcgcctgctaccagtcccaagccttcagtggcatgttcacagctcgccctcctgttgagctctgaggcgcacctgcagcaatacagccgtgagcatgcgctgaaaacccagaatgccaaccaggcagcctcagaacggctagcggctatggctaggttgcaagagaacgggcagaaagatgttggcagttatcagctacccaaggggatgagctctcatctgaatggacaggcgagaacctcatcttcgaagctaatggcaagcaagtccagtgctactgtgtttcagaatcctatggggataattccatcatccccgaaaaatgctggttataagaattccctggagcgcaataatatcaaacaggcagctaacaatagcctgctgttacacctactaaagtctcagactattccgaagcccatgaacggacactctcactctgaaagagggtcaatcttcgaagagtcttcaacacccacaaccattgatgagtacagtgacaataacccctctttcaccgatgatagctccggggatgaaagttcctactctaattgtgtaccgattgatctctcttgcaagcaccgcacggaaaaaagtgaatccgaccaacctgtctcgctcgataacttcacacagtctctgctgaacacctgggaccctaaagtgccagatgtcgacatcaaagaggatcaagacacctccaagaactcgaagctgaattcccaccagaaggtcaccctgctccagttattgctcggacataaaaacgaagaaaatgtggagaaaaacacgagtccgcaaggagttcacaatgacgtaagcaagttcaacacccagaattatgcccgaaccagtgttattgaatctcctagtactaatcggactacaccggtgtccacacccccactgctgactagctccaaggctggtagtcccatcaatctgagccagcattctcttgtcattaaatggaactcccccccttacgtttgctcaacacagagtgaaaagctcactaatacagcgtccaatcactccatggatctcaccaagtcaaaagaccctccgggtgaaaagccagcccagaatgagggagcccagaattctgccacattctcagcgagcaagcttctgcagaatcttgcccagtgcggcatgcagtctagcatgtctgtcgaagagcagcgaccatcgaagcagctattaactggcaataccgacaaacctatagggatgatcgatcgtcttaacagtccactgctgtcgaataaaacgaacgctgtggaggaaaataaagccttctccagccagcccactggtccagaaccaggacttagcggttccgagattgaaaatctgctcgaaagaaggaccgtgctgcagctcctgctgggcaaccctaacaaggggaaaagtgaaaagaaagagaagacccccttacgcgatgagtcaactcaggagcattcagagagagcactgtcagagcagattctgatggtaaagataaagagtgagccatgcgatgacttacagatccccaatacgaatgtgcacctttcacacgatgctaaatctgcgccttttttaggcatggcaccagctgtgcagcggagcgcccctgcccttccagtgtccgaggacttcaagtccgagcctgtatcaccccaagacttcagcttttcaaaaaacggactcttaagtagactcctgcgacagaaccaggacagttaccttgccgacgattccgacagaagtcacagaaataacgagatggccctgctggagtctaaaaatctttgtatggtccccaaaaaacggaagttgtacactgagccccttgagaatccatttaagaagatgaagaacaatatcgtggacgcggctaacaatcactccgctccagaggtgctgtatggtagtttactaaatcaggaggagcttaagttttctcgtaatgatcttgaattcaaataccctgcaggacacggatctgcctcagagagcgaacatcggtcgtgggctcgggaatctaagtcttttaatgtgctgaaacagctgctcttatccgaaaattgtgttcgagatttgtcgccacacaggtctaattcagtggccgacagcaagaagaaaggacataaaaataacgtgaccaattcaaaacccgaattttccatctcctctctcaatgggctgatgtactcatctacgcagccttcctcttgtatggacaatcgtacgtttagctaccctggggtcgtaaagaccccggtttcccccaccttccccgaacacttagggtgcgccggaagtagaccggagagcggcctattgaacggttgttccatgccaagcgaaaagggacccatcaagtgggtaattacagacgctgagaagaatgaatacgaaaaggatagcccaagactgacaaagaccaatcccatactatactacatgctgcagaaggggggaaattctgtgaccagccgcgagacacaagacaaagacatctggcgcgaagctagttccgccgagtccgtgtcacaggtgacagctaaagaagagcttttgccaactgctgagacaaaggcctccttttttaatttaaggtcaccctataactctcatatgggaaataacgcttcacgcccacactccgcgaatggggaggtgtacggactcctgggaagcgtgctgacaattaagaaagaatccgaatag

SEQ ID NO: 277241 - DNA, 201 bp, Artificial Sequence
  derived and/or modified sequence
atgacgcacggagaagaactcggttccgacgtgcatcaggactccattgtgctgacctatctagaaggccttctgatgcatcaggctgctggcggtagcggaactgctgttgacaagaaatcagcaggacataatgaggaggatcagaatttcaacatttctggctcagccttccccacatgccaatctaacggcccttag

SEQ ID NO: 277242 - protein, 468 aa, Artificial Sequence
  derived and/or modified sequence
MPAAPRGPAQGEAAARTRSRDASTSRRFTPPSTALSPGKMSEALPLGAPDAGAALAGKLRSGDRSMVEVLADHPGELVRTDSPNFLCSVLPTHWRCNKTLPIAFKVVALGDVPDGTLVTVMAGNDENYSAELRNATAAMKNQVARFNDLRFVGRSGRGKSFTLTITVFTNPPQVATYHRAIKITVDGPREPRRHRQKLDDQTKPGSLSFSERLSELEQLRRTAMRVSPHHPAPTPNPRASLNHSTAFNPQPQSQMQDTRQIQPSPPWSYDQSYQYLGSIASPSVHPATPISPGRASGMTTLSAELSSRLSTAPDLTAFSDPRQFPALPSISDPRMHYPGAFTYSPTPVTSGIGIGMSAMGSATRYHTYLPPPYPGSSQAQGGPFQASSPSYHLYYGASAGSYQFSMVGGERSPPRILPPCTNASTGSALLNPSLPNQSDVVEAEGSHSNSPTNMAPSARLEEAVWRPY

SEQ ID NO: 277243 - DNA, 1407 bp, Artificial Sequence
  derived and/or modified sequence
atgcccgccgcccccagaggccccgcccagggcgaggccgccgccagaaccagaagcagagacgccagcaccagcagaagattcaccccccccagcaccgccctgagccccggcaagatgagcgaggccctgcccctgggcgcccccgacgccggcgccgccctggccggcaagctgagaagcggcgacagaagcatggtggaggtgctggccgaccaccccggcgagctggtgagaaccgacagccccaacttcctgtgcagcgtgctgcccacccactggagatgcaacaagaccctgcccatcgccttcaaggtggtggccctgggcgacgtgcccgacggcaccctggtgaccgtgatggccggcaacgacgagaactacagcgccgagctgagaaacgccaccgccgccatgaagaaccaggtggccagattcaacgacctgagattcgtgggcagaagcggcagaggcaagagcttcaccctgaccatcaccgtgttcaccaaccccccccaggtggccacctaccacagagccatcaagatcaccgtggacggccccagagagcccagaagacacagacagaagctggacgaccagaccaagcccggcagcctgagcttcagcgagagactgagcgagctggagcagctgagaagaaccgccatgagagtgagcccccaccaccccgcccccacccccaaccccagagccagcctgaaccacagcaccgccttcaacccccagccccagagccagatgcaggacaccagacagatccagcccagccccccctggagctacgaccagagctaccagtacctgggcagcatcgccagccccagcgtgcaccccgccacccccatcagccccggcagagccagcggcatgaccaccctgagcgccgagctgagcagcagactgagcaccgcccccgacctgaccgccttcagcgaccccagacagttccccgccctgcccagcatcagcgaccccagaatgcactaccccggcgccttcacctacagccccacccccgtgaccagcggcatcggcatcggcatgagcgccatgggcagcgccaccagataccacacctacctgccccccccctaccccggcagcagccaggcccagggcggccccttccaggccagcagccccagctaccacctgtactacggcgccagcgccggcagctaccagttcagcatggtgggcggcgagagaagcccccccagaatcctgcccccctgcaccaacgccagcaccggcagcgccctgctgaaccccagcctgcccaaccagagcgacgtggtggaggccgagggcagccacagcaacagccccaccaacatggcccccagcgccagactggaggaggccgtgtggagaccctactag

SEQ ID NO: 277244 - DNA, 1407 bp, Artificial Sequence
  derived and/or modified sequence
atgcccgctgcacctcgcggccccgcacaaggcgaagccgcagctcgaaccaggtccagggatgcgagtacgagtaggagatttactcctcctagtaccgcgctttctcctggtaagatgtccgaagctttgcccttgggtgcgcctgatgccggcgccgcattggcaggaaaattgagatctggcgatcggtcaatggtggaggtactggcagatcaccccggcgagctggtcagaaccgacagcccaaactttctgtgttcagtcctgcccacacactggagatgtaacaagaccctccccatcgcgttcaaagtggtggcactcggagacgtgccagacggcaccctagtgaccgtgatggcgggtaatgacgagaattattccgccgaactgagaaacgcgacagcagcgatgaagaaccaggtcgcccggttcaatgatctgcgtttcgtaggacgctccgggaggggcaagtcgttcactctaacaatcacagttttcaccaacccccctcaggtggccacatatcacagggccataaaaatcacggtcgatggcccccgggagcctagacggcaccggcagaaactagacgaccaaacaaaacctggcagcctctcattttctgaacggttaagtgaattggagcaattacggagaaccgccatgcgggtctctccacatcaccccgctcccactccgaatccccgagcctcactgaatcacagcacagcatttaacccacaaccacagtcgcagatgcaggatacgaggcagatacagccaagtcccccatggtcctatgaccagagttaccagtatcttggttccatagctagcccttccgtccaccccgccacaccaatctctcccgggcgcgcgagtgggatgaccaccctgtcagcagagctgtccagtcgcctgtcaactgcgccggatttgacagccttctctgacccccggcaattcccagcattgccgagcatttcagaccctcgcatgcattatcccggtgcgtttacgtacagcccgacacccgtcacttctgggatcggcatagggatgtctgccatgggctccgctacccgctaccatacgtatctgccacctccatatcctgggtctagccaagctcaggggggaccgttccaggcctcatccccgtcgtaccatctgtattacggcgcatcagccggctcctaccagttttctatggtgggcggagagcggtcaccccccagaatcctgcctccttgcactaatgcctctaccggatcagccttacttaatccatccctccctaaccagtccgacgttgtggaggcggagggaagccactctaatagtcctaccaatatggctccctcggctcgtcttgaggaggctgtgtggcgtccttattag

SEQ ID NO: 277245 - DNA, 1407 bp, Artificial Sequence
  derived and/or modified sequence
atgcctgctgccccccggggccctgcccagggcgaggccgccgcccggaccaggagcagagatgccagcaccagccgccgcttcaccccacccagcacagccctgagccctgggaagatgtctgaggccctgcccctgggcgccccagatgctggagctgccctggccggcaagctgcggagcggggaccgctccatggtggaggtgctggccgaccaccctggagagctggtgaggacagacagccccaacttcctgtgcagcgtgctgcccacccactggcgctgcaacaagaccctgcccatcgccttcaaggtggtggccctgggagatgtgcctgatggcaccctggtgacagtgatggctggaaatgatgagaactacagcgctgagctgagaaatgccacagctgccatgaagaaccaggtggcccgcttcaatgacctgcgctttgtgggccgcagcggccggggcaagagcttcaccctgaccatcaccgtcttcaccaaccccccccaggtggccacctaccaccgggccatcaagatcaccgtggatggcccccgggagccccggcggcaccggcagaagctggatgaccagaccaagccaggcagcctgtccttcagcgagcggctgtctgagctggagcagctgcggaggacagccatgagggtgagcccccaccacccagcccccacccccaacccccgggccagcctgaaccacagcacagccttcaacccccagccccagagccagatgcaggacacccggcagatccagcccagccccccctggagctatgaccagagctaccagtacctgggcagcatcgccagccccagcgtgcacccagccacccccatcagccctggccgggccagcggcatgaccaccctgtctgctgagctgagcagccggctgagcacagccccagacctgacagccttcagtgacccccggcagtttcctgccctgcccagcatcagtgaccccaggatgcactacccaggggccttcacctacagccccacccctgtgaccagcggcatcggcatcggcatgtctgccatgggcagcgccacccgctaccacacctacctgcccccaccctacccaggcagcagccaggcccagggcggccccttccaggccagcagccccagctaccacctgtactatggagccagcgctggcagctaccagttctccatggtgggcggggagaggagccccccacgcatcctgcccccctgcaccaatgccagcactggaagtgccctgctgaaccccagcctgcccaaccagagtgatgtggtggaggccgagggcagccacagcaacagccccaccaacatggcccccagcgcccggctggaggaggccgtgtggaggccctactag

SEQ ID NO: 277246 - DNA, 1407 bp, Artificial Sequence
  derived and/or modified sequence
atgcccgccgccccccggggccccgcccagggcgaggccgccgcccggacgcgcagcagagacgcctcaacttccagacgcttcactccaccttctaccgctctgagcccgggcaagatgagtgaggctctgcctctgggcgcacccgacgccggggcagccttggccggaaagctccgttccggagacagatctatggtggaagttctggccgatcaccccggagagctggtgcggaccgattcccccaactttttatgtagcgtgctccctacccattggaggtgcaacaagactttgcccattgcctttaaagtggttgccctgggggatgtgcctgacgggacactggtaaccgtgatggccggcaatgacgagaattatagtgcggaactgagaaacgcgaccgccgctatgaaaaatcaggttgctcgctttaacgacctgcgattcgtgggcaggagcggcagagggaaatcctttactcttactattacggtcttcacaaaccccccccaggtagcaacctaccacagggcaatcaagataactgtggatgggcctcgagagccaaggcggcataggcaaaaactggacgatcagactaagcccgggtccctgtcattctcagaaagactaagcgaactcgaacagctccggaggacagctatgagggtgtccccccaccaccccgcccccacgccgaacccaagagccagcctgaaccactccactgcctttaaccctcagccacagtcccagatgcaggataccagacagatccagccttcaccaccctggtcttatgaccagagttaccagtacctcgggtccatcgcaagcccatcagtgcatcctgcgacacctatttcccccgggcgcgcctccggtatgacgaccttgtccgccgagctgagttcgcggctgtcaacagcgcctgacctgacggcattcagcgatcctaggcagttcccagctctccccagcatctcagacccgcgaatgcattatccaggggcatttacctattcacctacaccagtgacttcaggcattggcataggcatgtctgcaatggggtccgctaccaggtaccacacttacctgcccccgccttatccgggcagttcccaggcacagggagggccattccaggccagcagtccgtcttaccatttgtactacggcgcctctgcagggtcttaccaattcagcatggtgggtggcgaacgctcacccccaaggatattacccccttgcactaacgcatctactggtagtgccctgctgaacccttctctgcctaatcagtccgatgtagtggaagcggaggggtcacactccaactcacctaccaacatggccccctcagcgaggctagaggaggccgtctggagaccatattag

SEQ ID NO: 277247 - DNA, 1407 bp, Artificial Sequence
  derived and/or modified sequence
atgccggcagctccccgaggccctgcccagggcgaggccgctgcccgtacccgatccagggatgcttccacgtctaggcggttcacaccaccttccactgcactttctcccggtaagatgtcagaagcactgcctctcggagcccctgacgccggagcagcattggccggaaaactgcggtcaggcgatagaagcatggtggaggtactggctgatcatccgggtgagctcgtacgcactgactcacctaactttctgtgcagtgttctgcccactcactggcgctgcaacaaaaccctccccatcgcctttaaggttgtggccctaggggatgtccccgacgggaccctcgtcacagtgatggcaggtaacgacgaaaactactccgccgagctgcggaacgctactgcagccatgaaaaaccaagtggctagattcaatgacttgcgctttgtgggccgttccggacggggaaagagcttcacattaactattactgttttcactaaccctcctcaggtagcgacctaccatagagcgatcaagataacagtagacgggcctcgcgagccgagacggcataggcagaaactggatgatcagacaaagcctgggtccttgagcttcagtgagcggttatctgaactggaacaactccggagaaccgccatgagggtgtctccccatcacccagctcccactcccaacccacgggctagcctgaatcatagcacggcgtttaacccccagccacagtctcagatgcaagatactcggcagatccagccctcccctccctggtcatacgaccaatcgtatcagtatctgggctctatagctagtccttccgtgcacccggctactccaatttctcctggcagagcgtccggcatgactactctgtctgccgaactgtcctctaggctgagcaccgcacccgatctgaccgcattcagtgacccgaggcagtttcccgctctgccttccatctctgatcccagaatgcactatcctggcgcattcacctactcccccacgcctgtgacctctggaataggtattggaatgtccgccatgggcagtgcgacccggtatcacacctacctaccccctccatatcctggctctagccaggcccaaggaggtccgtttcaagcatcatccccatcgtatcatctgtattatggcgcaagtgctggctcctatcagttctcaatggtggggggagaacggtcccctccaagaattctccctccttgtaccaacgcatccaccgggagtgcattgctgaatccctcacttccaaatcaatccgacgtagttgaagccgagggaagtcacagcaatagcccaacaaacatggcgccatctgcccgtttggaggaggccgtatggcgaccgtactag

SEQ ID NO: 277248 - DNA, 5741 bp, Artificial Sequence
  derived and/or modified sequence
atgcccgcagcaccgcggggaccggcgcagggggaagcggccgcccgcacgcgaagccgggatgccagcacgagccgccgcttcacgccgccttccaccgcgctgagcccaggcaagatgagcgaggcgttgccgctgggcgccccggacgccggcgctgccctggccggcaagctgaggagcggcgaccgcagcatggtggaggtgctggccgaccacccgggcgagctggtgcgcaccgacagccccaacttcctctgctccgtgctgcctacgcactggcgctgcaacaagaccctgcccatcgctttcaaggtggtggccctaggggatgttccagatggcactctggtcactgtgatggctggcaatgatgaaaactactcggctgagctgagaaatgctaccgcagccatgaagaaccaggttgcaagatttaatgacctcaggtttgtcggtcgaagtggaagagggaaaagcttcactctgaccatcactgtcttcacaaacccaccgcaagtcgccacctaccacagagccatcaaaatcacagtggatgggccccgagaacctcgaagacatcggcagaaactagatgatcagaccaagcccgggagcttgtccttttccgagcggctcagtgaactggagcagctgcggcgcacagccatgagggtcagcccacaccacccagcccccacgcccaaccctcgtgcctccctgaaccactccactgcctttaaccctcagcctcagagtcagatgcaggatacaaggcagatccaaccatccccaccgtggtcctacgatcagtcctaccaatacctgggatccattgcctctccttctgtgcacccagcaacgcccatttcacctggacgtgccagcggcatgacaaccctctctgcagaactttccagtcgactctcaacggcacccgacctgacagcgttcagcgacccgcgccagttccccgcgctgccctccatctccgacccccgcatgcactatccaggcgccttcacctactccccgacgccggtcacctcgggcatcggcatcggcatgtcggccatgggctcggccacgcgctaccacacctacctgccgccgccctaccccggctcgtcgcaagcgcagggaggcccgttccaagccagctcgccctcctaccacctgtactacggcgcctcggccggctcctaccagttctccatggtgggcggcgagcgctcgccgccgcgcatcctgccgccctgcaccaacgcctccaccggctccgcgctgctcaaccccagcctcccgaaccagagcgacgtggtggaggccgagggcagccacagcaactcccccaccaacatggcgccctccgcgcgcctggaggaggccgtgtggaggccctactgaggcgccaggcctggcccggctgggccccgcgggccgccgccttcgcctccgggcgcgcgggcctcctgttcgcgacaagcccgccgggatcccgggccctgggcccggccaccgtcctggggccgagggcgcccgacggccaggatctcgctgtaggtcaggcccgcgcagcctcctgcgcccagaagcccacgccgccgccgtctgctggcgccccggccctcgcggaggtgtccgaggcgacgcacctcgagggtgtccgccggccccagcacccaggggacgcgctggaaagcaaacaggaagattcccggagggaaactgtgaatgcttctgatttagcaatgctgtgaataaaaagaaagattttatacccttgacttaactttttaaccaagttgtttattccaaagagtgtggaattttggttggggtggggggagaggagggatgcaactcgccctgtttggcatctaattcttatttttaatttttccgcaccttatcaattgcaaaatgcgtatttgcatttgggtggtttttatttttatatacgtttatataaatatatataaattgagcttgcttctttcttgctttgaccatggaaagaaatatgattcccttttctttaagttttatttaacttttcttttggacttttgggtagttgtttttttttgttttgttttgtttttttgagaaacagctacagctttgggtcatttttaactactgtattcccacaaggaatccccagatatttatgtatcttgatgttcagacatttatgtgttgataattttttaattatttaaatgtacttatattaagaaaaatatcaagtactacattttcttttgttcttgatagtagccaaagttaaatgtatcacattgaagaaggctagaaaaaaagaatgagtaatgtgatcgcttggttatccagaagtattgtttacattaaactccctttcatgttaatcaaacaagtgagtagctcacgcagcaacgtttttaataggatttttagacactgagggtcactccaaggatcagaagtatggaattttctgccaggctcaacaagggtctcatatctaacttcctccttaaaacagagaaggtcaatctagttccagagggttgaggcaggtgccaataattacatctttggagaggatttgatttctgcccagggatttgctcaccccaaggtcatctgataatttcacagatgctgtgtaacagaacacagccaaagtaaactgtgtaggggagccacatttacataggaaccaaatcaatgaatttaggggttacgattatagcaatttaagggcccaccagaagcaggcctcgaggagtcaatttgcctctgtgtgcctcagtggagacaagtgggaaaacatggtcccacctgtgcgagaccccctgtcctgtgctgctcactcaacaacatctttgtgttgctttcaccaggctgagaccctaccctatggggtatatgggcttttacctgtgcaccagtgtgacaggaaagattcatgtcactactgtccgtggctacaattcaaaggtatccaatgtcgctgtaaattttatggcactatttttattggaggatttggtcagaatgcagttgttgtacaactcataaatactaactgctgattttgacacatgtgtgctccaaatgatctggtggttatttaacgtacctcttaaaattcgttgaaacgatttcaggtcaactctgaagagtatttgaaagcaggacttcagaacagtgtttgatttttattttataaatttaagcattcaaattaggcaaatctttggctgcaggcagcaaaaacagctggacttatttaaaacaacttgtttttgagttttcttatatatatattgattatttgttttacacacatgcagtagcactttggtaagagttaaagagtaaagcagcttatgttgtcaggtcgttcttatctagagaagagctatagcagatctcggacaaactcagaatatattcactttcatttttgacaggattccctccacaactcagtttcatatattattccgtattacatttttgcagctaaattaccataaaatgtcagcaaatgtaaaaatttaatttctgaaaagcaccattagcccatttcccccaaattaaacgtaaatgttttttttcagcacatgttaccatgtctgacctgcaaaaatgctggagaaaaatgaaggaaaaaattatgtttttcagtttaattctgttaactgaagatattccaactcaaaaccagcctcatgctctgattagataatcttttacattgaacctttactctcaaagccatgtgtggagggggcttgtcactattgtaggctcactggattggtcatttagagtttcacagactcttaccagcatatatagtatttaattgtttcaaaaaaaatcaaactgtagttgttttggcgataggtctcacgcaacacatttttgtatgtgtgtgtgtgtgcgtgtgtgtgtgtgtgtgtgaaaaattgcattcattgacttcaggtagattaaggtatctttttattcattgccctcaggaaagttaaggtatcaatgagacccttaagccaatcatgtaataactgcatgtgtctggtccaggagaagtattgaataagccatttctactgcttactcatgtccctatttatgatttcaacatggatacatatttcagttctttctttttctcactatctgaaaatacatttccctccctctcttccccccaatatctccctttttttctctcttcctctatcttccaaaccccactttctccctcctccttttcctgtgttctcttaagcagatagcacatacccccacccagtaccaaatttcagaacacaagaaggtccagttcttcccccttcacataaaggaacatggtttgtcagcctttctcctgtttatgggtttcttccagcagaacagagacattgccaaccatattggatctgcttgctgtccaaaccagcaaactttcctgggcaaatcacaatcagtgagtaaatagacagcctttctgctgccttgggtttctgtgcagataaacagaaatgctctgattagaaaggaaatgaatggttccactcaaatgtcctgcaatttaggattgcagatttctgccttgaaatacctgtttctttgggacattccgtcctgatgatttttatttttgttggtttttatttttggggggaatgacatgtttgggtcttttatacatgaaaatttgtttgacaataatctcacaaaacatattttacatctgaacaaaatgcctttttgtttaccgtagcgtatacatttgttttgggatttttgtgtgtttgttgggaattttgtttttagccaggtcagtattgatgaggctgatcatttggctctttttttccttccagaagagttgcatcaacaaagttaattgtatttatgtatgtaaatagattttaagcttcattataaaatattgttaatgcctataactttttttcaatttttttgtgtgtgtttctaaggactttttcttaggtttgctaaatactgtagggaaaaaaatgcttctttctactttgtttattttagactttaaaatgagctacttcttattcacttttgtaaacagctaatagcatggttccaattttttttaagttcactttttttgttctaggggaaatgaatgtgcaaaaaaagaaaaagaactgttggttatttgtgttattctggatgtataaaaatcaatggaaaaaaataaactttcaaattgaaatgacggtataacacatctactgaaaaagcaacgggaaatgtggtcctatttaagccagcccccacctagggtctatttgtgtggcagttattgggtttggtcacaaaacatcctgaaaattcgtgcgtgggcttctttctccctggtacaaacgtatggaatgcttcttaaaggggaactgtcaagctggtgtcttcagccagatgacatgagagaatatcccagaaccctctctccaaggtgtttctagatagcacaggagagcaggcactgcactgtccacagtccacggtacacagtcgggtgggccgcctcccctctcctgggagcattcgtcgtgcccagcctgagcagggcagctggactgctgctgttcaggagccaccagagccttcctctctttgtaccacagtttcttctgtaaatccagtgttacaatcagtgtgaatggcaaataaacagtttgacaagtacatacaccata

SEQ ID NO: 277249 - protein, 191 aa, Artificial Sequence
  derived and/or modified sequence
MNPSRDVHDASTSRRFTPPSTALSPGKMSEALPLGAPDAGAALAGKLRSGDRSMVEVLADHPGELVRTDSPNFLCSVLPTHWRCNKTLPIAFKVVALGDVPDGTLVTVMAGNDENYSAELRNATAAMKNQVARFNDLRFVGRSGRGKSFTLTITVFTNPPQVATYHRAIKITVDGPREPRNSLTWPRYPHI

SEQ ID NO: 277250 - protein, 433 aa, Artificial Sequence
  derived and/or modified sequence
MATSGDCPRSESQGEEPAECSEAGLLQEGVQPEEFVAIADYAATDETQLSFLRGEKILILRQTTADWWWGERAGCCGYIPANHVGKHVDEYDPEDTWQDEEYFGSYGTLKLHLEMLADQPRTTKYHSVILQNKESLTDKVILDVGCGTGIISLFCAHYARPRAVYAVEASEMAQHTGQLVLQNGFADIITVYQQKVEDVVLPEKVDVLVSEWMGTCLLFEFMIESILYARDAWLKEDGVIWPTMAALHLVPCSADKDYRSKVLFWDNAYEFNLSALKSLAVKEFFSKPKYNHILKPEDCLSEPCTILQLDMRTVQISDLETLRGELRFDIRKAGTLHGFTAWFSVHFQSLQEGQPPQVLSTGPFHPTTHWKQTLFMMDDPVPVHTGDVVTGSVVLQRNPVWRRHMSVALSWAVTSRQDPTSQKVGEKVFPIWR

SEQ ID NO: 277251 - DNA, 1302 bp, Artificial Sequence
  derived and/or modified sequence
atggcgacttccggcgattgcccccgatctgagagccaaggggaagaacccgccgaatgttctgaggcgggacttttgcaagaaggcgttcaacccgaagaattcgtcgccattgccgattatgccgccacagatgaaacacaactatccttcctgaggggggagaagattctgatcctgagacagactaccgctgactggtggtggggtgagagagcaggctgctgcggatatatccccgcaaatcacgtagggaagcatgtagatgagtacgatcctgaggacacatggcaggatgaggaatattttggatcatacggcacgttaaagcttcacctggaaatgctggccgatcaaccaaggaccacaaagtatcattcggtaattctgcagaataaagaatctctcacggataaagtcatcttggatgttggttgcggaactggcataatcagtctcttttgcgctcactacgctcgaccccgtgcggtctacgcagtcgaggcctccgaaatggctcagcacaccggacagctggtcctccaaaacgggtttgcagatatcataactgtttaccagcagaaagtggaggatgttgtgctgcctgaaaaggttgacgttcttgtttctgaatggatgggaacctgcctgctctttgaatttatgatcgagtcaatactgtacgccagggatgcctggctgaaagaggatggcgtcatatggcctacaatggctgctctgcatctggtgccctgttcagctgataaagattacagaagtaaggtgctcttctgggacaatgcttatgagttcaatctctcagcattgaaaagtcttgccgtaaaggagttcttctccaagccaaaatataatcacatacttaagccagaagactgcctttcagagccttgcaccatactgcagttggacatgcgaactgtgcagatcagtgacttggagactttacggggtgaactcagattcgatattaggaaggccggcaccttacatggtttcactgcctggttctcagtgcattttcagagcctgcaggaggggcagcccccgcaggtgctgtcaactggcccgtttcatcccaccacgcactggaagcagaccttgttcatgatggatgatccagtgccagtccatacaggagacgtagtaactggttctgtagtgttacagagaaatcctgtctggcggcgacatatgtctgtggccctgtcctgggctgtgacctcaagacaagacccaactagccagaaggtgggagaaaaggtgtttccaatctggcgatag

SEQ ID NO: 277252 - DNA, 1302 bp, Artificial Sequence
  derived and/or modified sequence
atggccacttccggggactgcccacgctcggagagccagggagaggaacccgcggagtgttccgaagcgggcctgctccaggagggggtccagcctgaggagttcgtagcgattgcggactacgccgccactgacgagacccagctgtccttcctgcggggcgagaagatattaatactgcgccagacaacagctgactggtggtggggcgaaagggctggctgctgcgggtatatacctgcaaaccacgtgggcaagcacgttgatgagtacgaccctgaagacacctggcaggacgaggaatatttcgggagctacggcactttgaagttgcaccttgaaatgctggccgatcagcctaggaccaccaagtaccacagtgtcattctacaaaataaagaatcgctgacagataaagtgatcctggatgtcggctgcggaaccggtattatttctctgttctgcgctcactatgcccgccccagagcagtttatgctgtcgaggcctctgaaatggcacagcatacaggacaacttgtgctccagaatggctttgcagatatcattaccgtgtatcaacaaaaggtggaagacgtggtgttgccagaaaaagtcgacgtactggtctctgagtggatgggaacatgcctgctgttcgaatttatgatcgagagcattctctatgccagggacgcttggttaaaggaggatggcgttatctggccaacaatggctgctctgcaccttgtgccatgttctgcagataaggattacaggagcaaagttctgttttgggacaatgcttatgagttcaacctgtctgctctaaagagtctggccgtaaaggagttcttctccaagcctaagtacaaccacatcctcaagcccgaggattgtctaagcgagccctgtaccattctacagcttgatatgcgaaccgtgcagatctcagaccttgaaacacttagaggagagctgaggtttgatatccgcaaagctggtaccctgcatggattcaccgcctggttcagtgtgcatttccagtcgctgcaggaaggacaacctccgcaggtgctctccactggaccatttcacccaacgacacattggaaacagacgctcttcatgatggatgatcctgttcccgtgcatacaggagacgtcgtgaccgggtctgtggtactccagaggaaccctgtgtggcgaagacacatgtctgtcgccttgagttgggccgttacatcacgccaggaccctacctctcaaaaggttggcgaaaaggtgttccctatctggaggtag

SEQ ID NO: 277253 - DNA, 1302 bp, Artificial Sequence
  derived and/or modified sequence
atggccacatcaggggattgcccaaggagtgaatcccagggcgaagagccggcggagtgttcggaggccggcctgttgcaggagggagttcagcctgaggagttcgtggctattgcagattatgccgccaccgacgaaacacagctctcatttttgagaggcgaaaaaattttgatactgcgccagaccaccgccgactggtggtggggagagagggctgggtgctgcggctacattccagccaaccatgtgggaaagcacgtagatgaatacgatcccgaggatacctggcaagacgaggagtatttcgggtcgtatgggactttaaagttgcacctcgaaatgctggccgatcagccgagaactaccaaatatcacagtgtcattctccagaacaaggagtctttgacagataaagtcattctcgacgtgggatgtggcactgggatcatctctctgttttgcgcacattacgctcgcccacgcgccgtctatgctgtggaggcatcggaaatggcccagcacactgggcagctggtgctgcaaaatgggtttgcggatattattacggtataccagcaaaaggttgaggatgtagtcttacctgagaaagttgatgttctggtcagtgagtggatgggcacctgcctgctgttcgaattcatgatcgagtcaattttgtatgcccgtgacgcgtggctgaaggaagatggggttatttggcctacgatggcagccttgcacctggtcccgtgctcagccgataaagattaccgctctaaggtcctcttttgggataatgcatatgaatttaatctgagtgcattaaaaagcttggcggtgaaggagttcttttctaagcccaagtataatcacattcttaaaccggaggactgcctgtccgagccgtgtactatcctgcaactcgatatgcgcaccgtgcagatcagcgatttggagaccctcaggggagagctgcgtttcgacattcgcaaggcaggcaccctccacggcttcacagcctggttcagcgtgcacttccagtccctccaggagggacagcctccacaggtgctgtccacggggccgttccacccaactactcattggaaacaaacgctgttcatgatggacgatccagtaccagtgcacaccggggacgtcgtgactgggtccgtagtcctgcagcggaatcctgtgtggcgtcggcacatgagcgtggcactgtcctgggctgtgacctctcggcaagatccgacaagccagaaagtcggggagaaggtgtttcctatttggcgctag

SEQ ID NO: 277254 - DNA, 1302 bp, Artificial Sequence
  derived and/or modified sequence
atggccaccagcggggactgccccaggtctgagagccagggcgaggagccagcagaatgttctgaggccggcctgctgcaggagggcgtgcagcctgaggagtttgtggccatcgctgactatgctgccacagatgagacccagctgtccttcctgcggggggagaagatcctgatcctgcggcagaccacagctgactggtggtggggcgagagagctggctgctgcggctacatcccagccaaccacgtgggcaagcacgtggatgaatatgaccctgaggacacctggcaggatgaggagtacttcggcagctatggcaccctgaagctgcacctggagatgctggccgaccagcccaggaccaccaagtaccacagcgtcatcctgcagaacaaggagagcctgacagacaaggtgatcctggatgtgggctgcggcaccggcatcatcagcctcttctgtgcccactacgcccggcccagggctgtgtatgctgtggaggccagcgagatggcccagcacacaggccagctggtgctgcagaatggatttgctgacatcatcaccgtgtaccagcagaaggtggaggatgtggtgctgcctgagaaggtggatgtgctggtgtctgagtggatgggcacctgcctgctgtttgagttcatgattgagagcatcctgtatgccagagatgcctggctgaaggaggatggagtcatctggcccaccatggccgccctgcacctggtgccctgcagcgctgacaaggactaccgcagcaaggtgctcttctgggacaatgcctatgagttcaacctgagcgccctgaagagcctggccgtgaaggagttcttcagcaagcccaagtacaaccacatcctgaagccagaggactgcctgtctgagccctgcaccatcctgcagctggacatgaggacagtgcagatcagtgacctggagaccctgcggggggagctgcgctttgacatcaggaaggccggcaccctgcacggcttcaccgcctggttctctgtgcacttccagagcctgcaggagggccagcccccccaggtgctgagcacaggccccttccaccccaccacccactggaagcagaccctcttcatgatggatgatcctgtgcctgtgcacactggagatgtggtgacaggctctgtggtgctgcagagaaatcctgtgtggaggaggcacatgtctgtggccctgtcctgggccgtgaccagccggcaggaccccaccagccagaaggtgggggagaaggtgttccccatctggaggtag

SEQ ID NO: 277255 - DNA, 1302 bp, Artificial Sequence
  derived and/or modified sequence
atggccaccagcggcgactgcccccggagcgagagccagggcgaggaaccagctgagtgtagcgaggccggtcttttgcaggagggagtccagcctgaggagtttgtcgccattgccgactacgctgctacagacgaaactcagctcagctttctaagaggggaaaaaatcctgatcctacgccagactacggccgactggtggtggggcgagcgggcaggctgctgcgggtatatccccgctaatcatgtgggcaaacacgtggatgaatacgatcctgaagatacttggcaggatgaagagtatttcggttcttacggaactctcaagctgcacctggagatgctggccgaccagccgcgcaccactaagtatcactctgtcatcctgcagaacaaggaaagtctcacagataaggtgatcttggatgtggggtgtggaaccggtataatatcactattttgcgcccactatgcacggcctagagccgtgtatgctgtggaagcttccgaaatggctcagcacacgggccagttagtgctacagaatggattcgctgacattataacagtgtaccagcagaaagtcgaagacgttgtgctccctgaaaaagtggatgtactagtctccgagtggatgggcacatgtctgctatttgaattcatgatagagagtattctgtatgccagagatgcctggctgaaggaagacggggttatctggcccactatggccgccctccaccttgtaccgtgctcggcagacaaggattatcggagtaaggtactgttctgggacaacgcttacgagtttaacctgtccgctctgaagagcctggcagttaaagaattttttagtaagcccaaatacaatcacattttaaagcccgaagattgcctgtctgagccatgcacaatcctccaacttgatatgagaacagtccagatcagcgatctcgaaacactgagaggtgagctgcggtttgatatccgcaaggcaggaacgctccatggcttcaccgcatggttttcagtccattttcaaagcctgcaggaagggcagcctccacaggtcttgtccactggccctttccatccaactactcattggaaacagacattgttcatgatggacgatccagttcccgtacataccggagatgttgtaacaggctcagtggtgcttcaaaggaacccggtgtggagacggcacatgagtgtcgcactgtcttgggccgtgacatctcgccaggatccaacctcccagaaagtgggggagaaggtctttcctatatggcgctag

SEQ ID NO: 277256 - DNA, 1302 bp, Artificial Sequence
  derived and/or modified sequence
atggccaccagcggcgactgcccccggagcgagagccagggcgaggaaccagcagaatgttccgaagccggattattacaggaaggggtccagccagaggagttcgtcgctattgctgactatgcagccactgacgagacccaactatcttttctgagaggtgagaaaattctcatcctccgacaaaccacggccgactggtggtggggcgagagggcaggctgctgtggatacattcctgcaaaccatgtcggaaagcacgtagacgaatacgatccagaggacacttggcaggacgaagagtatttcgggtcgtatggaaccctcaagctccacctggaaatgctggcagatcagcccaggactactaagtaccactctgtgatcctgcagaacaaggagtctcttacagataaagtgattctggatgtgggatgtggcaccggcattatctcacttttttgtgcacattatgccagacctcgtgcggtatacgccgtggaagctagtgagatggcccaacacaccgggcagctcgtcctacagaacgggtttgcggatatcatcacagtgtatcaacagaaggtcgaggatgtcgtgctgcctgaaaaggtcgatgtgctggtctctgagtggatgggtacctgccttttatttgaattcatgattgagagtatcttatacgcccgggatgcttggcttaaggaagatggagtgatctggcccactatggctgctcttcacctagtgccatgtagcgctgataaggattataggtcgaaggtcttgttctgggacaatgcctatgagtttaacctgagtgctctgaaatccctcgcggtaaaggagtttttttccaaaccaaagtacaaccacattctaaagccagaagattgcctgagtgaaccgtgcactatcctgcagctcgacatgcgaactgtgcagatttccgatctcgagactctgaggggcgaacttcggtttgacatcagaaaagccggcactctccacggctttaccgcttggttcagcgttcatttccagagtttacaagagggacagcccccacaggttctaagtacaggcccttttcatcccaccacccactggaagcagaccctgtttatgatggatgaccccgtgccggtccatacaggtgacgtggttactggatccgtcgtgttgcagcgaaatccggtgtggaggcgccacatgagtgtggccctctcttgggctgtaacatctcgccaggatcccacaagccagaaggtcggagagaaagtgttccccatatggcgttag

SEQ ID NO: 277257 - DNA, 1302 bp, Artificial Sequence
  derived and/or modified sequence
atggccaccagcggcgactgcccccggagcgagagccagggcgaggagcctgccgaatgctctgaagctgggctattacaggaaggagtgcagcccgaagagtttgttgccatagcggattatgccgctacggatgaaacccaactgagctttctcagaggagaaaaaatacttattctgcggcagaccactgcggactggtggtggggggaacgagccggatgttgtggctatattcctgcgaaccacgtgggaaagcacgtggatgagtacgatcccgaggacacttggcaggatgaagaatactttggctcatacgggacgctcaaactgcacctggagatgctcgccgaccagcctagaaccacaaaataccactccgttatcttacagaacaaagagtctctgaccgataaggtgatccttgacgtcggctgcggaacgggcataatcagtctattctgcgctcattacgccagacctcgtgccgtgtatgccgtagaggcaagtgagatggcgcagcataccggccagcttgtgctgcagaacggctttgccgatatcatcacagtgtaccagcaaaaagttgaggatgtggtcttgccagaaaaggtagatgtgctggtaagcgagtggatgggaacctgccttttatttgagttcatgatcgaatcaatactttacgccagggacgcatggctgaaagaggacggagtgatctggcctacaatggccgcgttacatttggtgccttgttctgccgataaagattaccgctcaaaagtgttgttttgggataatgcttatgagtttaatctgagtgccttgaagagtctggccgtgaaggagttcttctctaagccaaagtataatcacatcctgaagccagaggattgcctttcagagccttgcacaatccttcagcttgatatgaggacagtccagatctctgacctggaaaccctcaggggggaactgaggttcgacatcaggaaagccggcacattgcatggcttcacggcatggttctctgtacattttcaatccctccaggaggggcagcctccccaggtgctgtcgaccgggccattccatccaaccacgcattggaaacaaaccctgttcatgatggacgatccagtgcccgttcacaccggggacgtggtaacaggctccgtcgttttgcagaggaacccagtctggagacgccatatgtccgtggcactgtcatgggctgtcacaagccgccaggatccaacatctcagaaagtgggagagaaggtatttcccatctggcggtag

SEQ ID NO: 277258 - DNA, 1302 bp, Artificial Sequence
  derived and/or modified sequence
atggccacaagcggtgattgcccccgttccgagtcccagggcgaagagcccgctgagtgctctgaggcaggtctactccaagagggggtgcagccagaggaattcgtggccattgccgactacgcagcaactgacgaaacccagctgagctttcttaggggcgagaaaattctcattctgcggcagacaaccgccgattggtggtggggagagcgggctggttgctgtggctacatcccggctaatcacgttggcaaacatgttgatgagtatgatccagaggatacttggcaggatgaagaatattttggtagctatgggactttgaagcttcatctcgaaatgttagccgaccagcctcggactaccaagtatcattcggtgatactgcaaaacaaggagtcactgaccgacaaggtgattttagatgtggggtgcggcaccgggataataagtctgttctgcgcacattacgccaggccaagggccgtgtacgctgttgaggcaagcgagatggcacaacacaccggccagctggtgctgcaaaatgggttcgccgatataattaccgtgtatcagcagaaggtcgaggacgtggtattgcctgaaaaagtagacgtgctcgtcagcgaatggatgggaacctgcttgctgttcgaattcatgattgagtcaatcctctacgccagggacgcgtggcttaaggaggacggagtcatatggccaaccatggccgctctgcatctggtgccttgcagcgcagataaggattatcgctcaaaggtcttgttctgggacaatgcctacgagttcaacttgtctgcactcaagagtctcgctgtgaaggagtttttcagcaagcctaagtataaccatattctgaagcccgaggactgtctgtctgaaccctgcactatcctgcagctcgacatgcggaccgttcagatatcagatctcgagaccctgcgaggggagctaaggttcgacatccgtaaggcagggaccctgcatggtttcacagcttggttctctgtgcatttccaaagccttcaggagggccagccccctcaagtgttaagcacgggaccatttcaccccactactcattggaagcagaccctctttatgatggatgaccctgtgccagtgcatacaggcgacgtggtcacgggctcagtggtcctacagcgcaaccccgtgtggaggcgccatatgtcggtcgccctgagttgggccgttacttcacgtcaggatcccactagccagaaggtgggcgaaaaagtgttccctatctggaggtag

SEQ ID NO: 277259 - DNA, 1302 bp, Artificial Sequence
  derived and/or modified sequence
atggcaacctccggggactgccctcgctcggagagccagggtgaggagccagcagagtgttccgaagccggacttctacaagaaggcgtacagcccgaggagtttgtggccattgcagactatgctgcaaccgacgagacccaattaagcttcctacggggtgagaaaatcctcatcctacgccagacaacagctgactggtggtggggcgaaagagcaggatgctgcggctacattcctgccaatcacgtgggtaagcatgtggatgagtacgatcccgaggacacttggcaggatgaggagtatttcggatcctacggaacattgaagctccatttggagatgctggcagaccagccacggaccaccaagtaccactcggttatacttcaaaacaaagagtctttaaccgataaggtgattctggatgtcggctgtgggactggcataataagccttttttgcgcacattacgcacggccaagggcagtttacgcagttgaggcctccgaaatggcccagcacacaggccagctcgtgctccagaacggattcgccgacatcatcaccgtgtaccagcagaaggtagaggatgtcgtgctgccagagaaggtggacgtgctcgtgtccgagtggatgggtacatgcctgctatttgaatttatgatagaatccatcctttacgcaagggacgcctggttaaaagaggacggcgtgatctggcctacaatggcggctctgcacttagtgccctgttccgcggataaggattatcgcagcaaggtgctgttttgggataatgcctatgagttcaaccttagcgctctgaagtcactggcggtaaaggaattttttagtaagccaaagtataatcacatcctcaagcccgaggactgtttgtcagagccctgcactatattgcagctcgacatgaggacggtccagattagtgacctggagactctcaggggcgaactccgatttgacatccggaaggccggtaccttacatggattcactgcgtggttttctgttcacttccagtctttgcaagaggggcagccgcctcaggtgctgtccacaggcccatttcaccccacaacgcactggaaacagacccttttcatgatggatgaccctgtgcctgtgcacaccggagacgttgtgaccggtagtgtggtcctgcagaggaatccagtctggaggcgccacatgtccgtggctctttcctgggccgtaactagcaggcaggacccaactagtcagaaagtcggggaaaaagtattccccatctggaggtag

SEQ ID NO: 277260 - DNA, 1302 bp, Artificial Sequence
  derived and/or modified sequence
atggccaccagtggagactgcccccgttcagagtcccaaggtgaggaacctgctgaatgctctgaagctggactgctgcaggaaggggtacagcctgaggagttcgtggccattgcagattatgctgctacagacgaaacacagctgtctttcctgagaggagagaaaatcctcatcttaagacagactactgccgattggtggtggggcgaacgcgctggttgttgtggctatattccagcaaatcatgtgggaaaacatgttgacgaatatgacccagaggatacttggcaggatgaggagtattttggaagttacgggacactcaagcttcatcttgaaatgctggcggatcagcctcgtacaactaagtatcatagcgtaatcctgcagaacaaagagtcccttactgacaaagtgatacttgatgtcgggtgcgggactgggatcatttctctgttctgtgcacattacgcacggcctcgcgcagtttatgccgtggaggcttctgaaatggcccagcacactgggcagctggtcctccagaacggattcgcagatatcatcaccgtctatcagcagaaagtggaagatgtggttcttccagaaaaagtcgacgtccttgtaagcgaatggatggggacttgtctgctctttgagttcatgatcgaatcgattctatatgcaagagatgcgtggctaaaagaggacggcgtgatctggccaactatggccgcactgcatctggtgccttgctccgccgacaaagattataggtcaaaggtgcttttctgggataacgcctatgaattcaatcttagcgccctaaagagcctggctgtaaaggaatttttctccaagccgaagtacaatcacatcctgaagccagaagactgtctgtcagaaccctgcacgattctccaactcgatatgagaactgtccaaataagcgatcttgaaaccctccgcggtgagctccgctttgatatccgaaaagctggaaccctccacgggtttacggcctggtttagcgttcattttcagagcctgcaagagggacagccgccacaagttttgtctacgggcccatttcatccaaccacacactggaaacagactctcttcatgatggacgatcccgtgccagttcatacaggcgatgtagtgactgggagtgtcgtgctgcagcggaatcccgtgtggcggcgtcacatgtcagtcgctcttagctgggctgtcacctctcgtcaagacccgactagccagaaggttggtgaaaaagtttttccgatttggcgctag

SEQ ID NO: 277261 - DNA, 2688 bp, Artificial Sequence
  derived and/or modified sequence
acttatccagaagaaaggcagagggcgcacactgcgcagcgcggatgggaaagttaactgaattatttgcgggaagacagaggaggtggggggtcccccaagccccagccattttgtggctcgtaggggttgtcgcttcccaagccgtgaatggcccaaacccgccccccgccccaggtcggactcctgccccgcgcccctctgggtcggaccccaagccgagccccccaaccccgcggctgggctgggcgattggggacgagctccacacatggagaacctggcctcgcctcgcaagaccgcgggacgcgcagatgtgaagtgcgcctgcgcggggcgcagccccagctgcagacgatctgtgagcgacgcgccggcgcaagtcgagggcggtggcttggcttccctggaatgggggacgtcttaggactgcgcctgcgcggggcgccgggccctgggcggggccttcccggctgacggcctgcgtgcactgcgcttgcgcgggttgagggcggtggctcaggctcctggaaaggaccgtccacccctccgcgctggcggtgtggacgcggaactcagcggagaaacgcgattgagagcagtgtgtggattacactatcactggaaaaatacgaattgagaagaaggaaaagactggaagatgcagaccttggttcctgttagtggaaacactgtaaggtcccagaaatggaaaagaaaatgaaataaatcagcagttatgaggcagagcctaagagaactatggcaacatcaggtgactgtcccagaagtgaatcgcagggagaagagcctgctgagtgcagtgaggccggtctcctgcaggagggagtacagccagaggagtttgtggccatcgcggactacgctgccaccgatgagacccagctcagttttttgagaggagaaaaaattcttatcctgagacaaaccactgcagattggtggtggggtgagcgtgcgggctgctgtgggtacattccggcaaaccatgtggggaagcacgtggatgagtacgaccccgaggacacgtggcaggatgaagagtacttcggcagctatggaactctgaaactccacttggagatgttggcagaccagccacgaacaactaaataccacagtgtcatcctgcagaataaagaatccctgacggataaagtcatcctggacgtgggctgtgggactgggatcatcagtctcttctgtgcacactatgcgcggcctagagcggtgtacgcggtggaggccagtgagatggcacagcacacggggcagctggtcctgcagaacggctttgctgacatcatcaccgtgtaccagcagaaggtggaggatgtggtgctgcccgagaaggtggacgtgctggtgtctgagtggatggggacctgcctgctgtttgagttcatgatcgagtccatcctgtatgcccgggatgcctggctgaaggaggacggggtcatttggcccaccatggctgcgttgcaccttgtgccctgcagtgctgataaggattatcgtagcaaggtgctcttctgggacaacgcgtacgagttcaacctcagcgctctgaaatctttagcagttaaggagtttttttcaaagcccaagtataaccacattttgaaaccagaagactgtctctctgaaccgtgcactatattgcagttggacatgagaaccgtgcaaatttctgatctagagaccctgaggggcgagctgcgcttcgacatcaggaaggcggggaccctgcacggcttcacggcctggtttagcgtccacttccagagcctgcaggaggggcagccgccgcaggtgctcagcaccgggcccttccaccccaccacacactggaagcagacgctgttcatgatggacgacccagtccctgtccatacaggagacgtggtcacgggttcagttgtgttgcagagaaacccagtgtggagaaggcacatgtctgtggctctgagctgggctgtcacttccagacaagaccccacatctcaaaaagttggagaaaaagtcttccccatctggagatgacagttgatgctttatttggaaagcagtgtgcatatcttgaggggtgatgaacacaagcaaaccaagttgcacctggcttctgcacactcctgcgaaagtcggtgaacattcactccacattgacccctccctagcctggcaggtgacgtcagggtccttcacagacaaacacgcttgggctcggcaggagctgccgtggccacccccgctgcccagtgtctgccctctagaagtaggctgtgtttccaggtgttcacccgtggtgcccacagtgccgacccgtggctgggtcggagctccatgttcctaagctaggtctaggtctacactcctaggacgcacgcatatcagcccgtgtaccctgtgacagtgactgtccccacctcctatgttagtggtgcccttactgccgtcgctcatccactcgtgtgggacgtaggattgcacagggctgtgccagtggcgtgtagggaacactgccctggctcagcgtgcgagctaaggtggtgatgtatgcgatgggactctgcatgggatagtacagttgtgtagacgtcttccaaataaattatgtgttggtccatcgcacatgctcaataaatatttttaaatgagtgaatgtca

SEQ ID NO: 277262 - DNA, 2880 bp, Artificial Sequence
  derived and/or modified sequence
gcgtgcactgcgcttgcgcgggttgagggcggtggctcaggctcctggaaaggaccgtccacccctccgcgctggcggtgtggacgcggaactcagcggagaaacgcgattgaggtaggtgtcctgatgggcagctcagatggctggactgcacgtaaggaaggacaggccaggtgaggcgtcctcgcactgcgtgtgcgtcgctggcggacagaggcctccgcccccttttgggacctccgagcgccttcgcgatctcagccactttccctggcgtccaaacgggagctcggtccccgtcacacccttccctgcgtgccgcaccccttcccggccactcccgccgtccagcgccttctacggccacgcccaccccaccaccatctctgtcacgcccttcgcggccacgcccacctgcctggcggcccctgccccgaagctcgcggcgctgtcccagcctgaccctctcgtgcccctgcgtccacgcgtggccctctcgcttcctgcccccttctcaccccccttcactggccacctgttccaaccctccatgatcctgttcctcccgagggcatcttaggagggcagggtcctgcgcgcactgcggcctccactccgaccccgtcccagtttggacccaggtcttccaatgaaaatataattatgcaaatcagtaagcatttgtaactacgaatatcacaaaaataagcttcaagtctggatttagaagtgaagcatgcattttaaacaaagaattgctatgcaattttaaaaacacattgatcccagagcagtgtgtggattacactatcactggaaaaatacgaattgagaagaaggaaaagactggaagatgcagaccttggttcctgttagtggaaacactgtaaggtcccagaaatggaaaagaaaatgaaataaatcagcagttatgaggcagagcctaagagaactatggcaacatcaggtgactgtcccagaagtgaatcgcagggagaagagcctgctgagtgcagtgaggccggtctcctgcaggagggagtacagccagaggagtttgtggccatcgcggactacgctgccaccgatgagacccagctcagttttttgagaggagaaaaaattcttatcctgagacaaaccactgcagattggtggtggggtgagcgtgcgggctgctgtgggtacattccggcaaaccatgtggggaagcacgtggatgagtacgaccccgaggacacgtggcaggatgaagagtacttcggcagctatggaactctgaaactccacttggagatgttggcagaccagccacgaacaactaaataccacagtgtcatcctgcagaataaagaatccctgacggataaagtcatcctggacgtgggctgtgggactgggatcatcagtctcttctgtgcacactatgcgcggcctagagcggtgtacgcggtggaggccagtgagatggcacagcacacggggcagctggtcctgcagaacggctttgctgacatcatcaccgtgtaccagcagaaggtggaggatgtggtgctgcccgagaaggtggacgtgctggtgtctgagtggatggggacctgcctgctgtttgagttcatgatcgagtccatcctgtatgcccgggatgcctggctgaaggaggacggggtcatttggcccaccatggctgcgttgcaccttgtgccctgcagtgctgataaggattatcgtagcaaggtgctcttctgggacaacgcgtacgagttcaacctcagcgctctgaaatctttagcagttaaggagtttttttcaaagcccaagtataaccacattttgaaaccagaagactgtctctctgaaccgtgcactatattgcagttggacatgagaaccgtgcaaatttctgatctagagaccctgaggggcgagctgcgcttcgacatcaggaaggcggggaccctgcacggcttcacggcctggtttagcgtccacttccagagcctgcaggaggggcagccgccgcaggtgctcagcaccgggcccttccaccccaccacacactggaagcagacgctgttcatgatggacgacccagtccctgtccatacaggagacgtggtcacgggttcagttgtgttgcagagaaacccagtgtggagaaggcacatgtctgtggctctgagctgggctgtcacttccagacaagaccccacatctcaaaaagttggagaaaaagtcttccccatctggagatgacagttgatgctttatttggaaagcagtgtgcatatcttgaggggtgatgaacacaagcaaaccaagttgcacctggcttctgcacactcctgcgaaagtcggtgaacattcactccacattgacccctccctagcctggcaggtgacgtcagggtccttcacagacaaacacgcttgggctcggcaggagctgccgtggccacccccgctgcccagtgtctgccctctagaagtaggctgtgtttccaggtgttcacccgtggtgcccacagtgccgacccgtggctgggtcggagctccatgttcctaagctaggtctaggtctacactcctaggacgcacgcatatcagcccgtgtaccctgtgacagtgactgtccccacctcctatgttagtggtgcccttactgccgtcgctcatccactcgtgtgggacgtaggattgcacagggctgtgccagtggcgtgtagggaacactgccctggctcagcgtgcgagctaaggtggtgatgtatgcgatgggactctgcatgggatagtacagttgtgtagacgtcttccaaataaattatgtgttggtccatcgcacatgctcaataaatatttttaaatgagtgaatgtca

SEQ ID NO: 277263 - DNA, 2131 bp, Artificial Sequence
  derived and/or modified sequence
cgggccctgggcggggccttcccggctgacggcctgcgtgcactgcgcttgcgcgggttgagggcggtggctcaggctcctggaaaggaccgtccacccctccgcgctggcggtgtggacgcggaactcagcggagaaacgcgattgagaaatggaaaagaaaatgaaataaatcagcagttatgaggcagagcctaagagaactatggcaacatcaggtgactgtcccagaagtgaatcgcagggagaagagcctgctgagtgcagtgaggccggtctcctgcaggagggagtacagccagaggagtttgtggccatcgcggactacgctgccaccgatgagacccagctcagttttttgagaggagaaaaaattcttatcctgagacaaaccactgcagattggtggtggggtgagcgtgcgggctgctgtgggtacattccggcaaaccatgtggggaagcacgtggatgagtacgaccccgaggacacgtggcaggatgaagagtacttcggcagctatggaactctgaaactccacttggagatgttggcagaccagccacgaacaactaaataccacagtgtcatcctgcagaataaagaatccctgacggataaagtcatcctggacgtgggctgtgggactgggatcatcagtctcttctgtgcacactatgcgcggcctagagcggtgtacgcggtggaggccagtgagatggcacagcacacggggcagctggtcctgcagaacggctttgctgacatcatcaccgtgtaccagcagaaggtggaggatgtggtgctgcccgagaaggtggacgtgctggtgtctgagtggatggggacctgcctgctgtttgagttcatgatcgagtccatcctgtatgcccgggatgcctggctgaaggaggacggggtcatttggcccaccatggctgcgttgcaccttgtgccctgcagtgctgataaggattatcgtagcaaggtgctcttctgggacaacgcgtacgagttcaacctcagcgctctgaaatctttagcagttaaggagtttttttcaaagcccaagtataaccacattttgaaaccagaagactgtctctctgaaccgtgcactatattgcagttggacatgagaaccgtgcaaatttctgatctagagaccctgaggggcgagctgcgcttcgacatcaggaaggcggggaccctgcacggcttcacggcctggtttagcgtccacttccagagcctgcaggaggggcagccgccgcaggtgctcagcaccgggcccttccaccccaccacacactggaagcagacgctgttcatgatggacgacccagtccctgtccatacaggagacgtggtcacgggttcagttgtgttgcagagaaacccagtgtggagaaggcacatgtctgtggctctgagctgggctgtcacttccagacaagaccccacatctcaaaaagttggagaaaaagtcttccccatctggagatgacagttgatgctttatttggaaagcagtgtgcatatcttgaggggtgatgaacacaagcaaaccaagttgcacctggcttctgcacactcctgcgaaagtcggtgaacattcactccacattgacccctccctagcctggcaggtgacgtcagggtccttcacagacaaacacgcttgggctcggcaggagctgccgtggccacccccgctgcccagtgtctgccctctagaagtaggctgtgtttccaggtgttcacccgtggtgcccacagtgccgacccgtggctgggtcggagctccatgttcctaagctaggtctaggtctacactcctaggacgcacgcatatcagcccgtgtaccctgtgacagtgactgtccccacctcctatgttagtggtgcccttactgccgtcgctcatccactcgtgtgggacgtaggattgcacagggctgtgccagtggcgtgtagggaacactgccctggctcagcgtgcgagctaaggtggtgatgtatgcgatgggactctgcatgggatagtacagttgtgtagacgtcttccaaataaattatgtgttggtccatcgcacatgctcaataaatatttttaaatgagtgaatgtca

SEQ ID NO: 277264 - DNA, 1302 bp, Artificial Sequence
  derived and/or modified sequence
atggccaccagcggcgactgccccagaagcgagagccagggcgaggagcccgccgagtgcagcgaggccggcctgctgcaggagggcgtgcagcccgaggagttcgtggccatcgccgactacgccgccaccgacgagacccagctgagcttcctgagaggcgagaagatcctgatcctgagacagaccaccgccgactggtggtggggcgagagagccggctgctgcggctacatccccgccaaccacgtgggcaagcacgtggacgagtacgaccccgaggacacctggcaggacgaggagtacttcggcagctacggcaccctgaagctgcacctggagatgctggccgaccagcccagaaccaccaagtaccacagcgtgatcctgcagaacaaggagagcctgaccgacaaggtgatcctggacgtgggctgcggcaccggcatcatcagcctgttctgcgcccactacgccagacccagagccgtgtacgccgtggaggccagcgagatggcccagcacaccggccagctggtgctgcagaacggcttcgccgacatcatcaccgtgtaccagcagaaggtggaggacgtggtgctgcccgagaaggtggacgtgctggtgagcgagtggatgggcacctgcctgctgttcgagttcatgatcgagagcatcctgtacgccagagacgcctggctgaaggaggacggcgtgatctggcccaccatggccgccctgcacctggtgccctgcagcgccgacaaggactacagaagcaaggtgctgttctgggacaacgcctacgagttcaacctgagcgccctgaagagcctggccgtgaaggagttcttcagcaagcccaagtacaaccacatcctgaagcccgaggactgcctgagcgagccctgcaccatcctgcagctggacatgagaaccgtgcagatcagcgacctggagaccctgagaggcgagctgagattcgacatcagaaaggccggcaccctgcacggcttcaccgcctggttcagcgtgcacttccagagcctgcaggagggccagcccccccaggtgctgagcaccggccccttccaccccaccacccactggaagcagaccctgttcatgatggacgaccccgtgcccgtgcacaccggcgacgtggtgaccggcagcgtggtgctgcagagaaaccccgtgtggagaagacacatgagcgtggccctgagctgggccgtgaccagcagacaggaccccaccagccagaaggtgggcgagaaggtgttccccatctggagatag

SEQ ID NO: 277265 - DNA, 1722 bp, Artificial Sequence
  derived and/or modified sequence
atggggaggcattgcgggtatctggcgctggtgtctgcccttgcatccggcgccgactggttgttcattccagaagccccgcctgaggatggctgggagaacttcatgtgtgagaggctgggagagactcgaagcagaggcagccggctcaatatcatcataattgccgagggtgcaattgaccgcaatggaaagcccattagcagttcttacgtgaaagatctggtggttcaaaggcttgggttcgacactagggtgactgtcctgggccatgttcagcggggtgggacccccagcgcattcgaccggatcctgtcgtctaagatgggcatggaagctgtaatggcattgctggaggctacgcccgatacgcctgcttgcgttgttactctgtcgggaaaccagtcagtcaggctgccactcatggagtgcgtgcaaatgaccaaagaggtgcaaaaagccatggacgacaagaggttcgatgaagctactcagcttaggggcgggagcttcgagaacaactggaatatttacaaactgctcgcacatcaaaagccaccaaaggagaagagtaatttctcccttgctatcctcaacgtgggagcccccgcagccggaatgaacgctgcggtccgaagtgccgttaggacagggatatcacacggccacaccgtatatgtggtacatgatggattcgagggcctcgccaagggccaagtccaagaagtgggttggcacgacgtggcgggatggctcggcagggggggttctatgctcggaactaagcggacactgcctaagggccagctggagtcaattgtggaaaatatccgtatctacggtatccacgccctgctggtggttggcggatttgaagcgtatgaaggagttcttcagctcgtggaggcgcgaggccgctacgaggaactgtgcatcgtgatgtgtgtgatccctgctaccatttcaaacaacgtgcccggcaccgacttcagcttagggagtgacaccgccgtgaatgccgcaatggagtcgtgtgacagaatcaaacagtcagctagcggcacaaagaggcgggtgttcatcgtcgaaacaatgggcggctactgtggttacctggcgactgtcactggtatagccgtaggggctgacgccgcgtacgtctttgaggacccatttaacattcatgatctgaaggtgaacgtggaacacatgacagagaagatgaaaactgatatccagcggggactcgtcctgaggaacgaaaaatgccacgattattatacgaccgagtttctctataacctgtattcatcagagggtaagggagtgttcgattgtaggacgaacgtactgggccacctccaacagggcggagctccaacaccatttgacagaaattacgggacaaagttaggcgtcaaagctatgctttggctgagcgagaagctccgggaagtctatcgcaagggtcgggtgttcgcaaacgctcccgactccgcgtgtgtgatcggtctcaaaaagaaggcagtggccttttccccggtgactgagctgaaaaaggacacagactttgagcacaggatgcccagagaacagtggtggctcagcttgaggctaatgttaaaaatgttggcccagtacaggatttctatggccgcctatgtgtctggggagttggagcatgtcacaaggcggacattgagtatggacaagggattctag

SEQ ID NO: 277266 - DNA, 1722 bp, Artificial Sequence
  derived and/or modified sequence
atgggccgccactgcggctacctggccctggtgtctgccctggccagcggggctgactggctgttcatccctgaggcccccccagaagatggctgggagaacttcatgtgtgagcggctgggggagaccaggagccggggcagccggctgaacatcatcatcatcgccgagggcgccatcgacagaaatggcaagcccatcagcagcagctatgtgaaggacctggtggtgcagaggctgggctttgacaccagggtgacagtgctgggccacgtgcagagaggaggcaccccatctgcctttgaccgcatcctgagcagcaagatgggcatggaggccgtgatggccctgctggaggccaccccagacaccccagcctgtgtggtgaccctgagcggcaaccagagcgtgcggctgcccctgatggagtgtgtgcagatgaccaaggaggtgcagaaggccatggatgacaagagatttgatgaggccacccagctgcggggcggcagctttgagaacaactggaacatctacaagctgctggcccaccagaagccacccaaggagaagagcaacttcagcctggccatcctgaatgtgggcgccccagctgctggcatgaatgctgctgtgcgctctgctgtgaggacaggcatcagccacggccacacagtgtatgtggtgcatgatggctttgagggcctggccaagggccaggtgcaggaggtgggctggcatgatgtggccggctggctgggccggggcggctccatgctgggcaccaagaggaccctgcccaagggccagctggagagcatcgtggagaacatccgcatctacggcatccacgccctgctggtggtgggcggctttgaggcctatgagggcgtgctgcagctggtggaggcccggggccgctatgaggagctgtgcatcgtgatgtgtgtgatcccagccaccatcagcaacaacgtgcccggcacagacttcagcctgggcagtgacacagctgtgaatgctgccatggagagctgtgaccgcatcaagcagagcgccagcggcaccaagagaagagtcttcatcgtggagaccatgggcggctactgcggctacctggccaccgtgactggaattgctgtgggcgcagatgctgcctacgtgtttgaggaccccttcaacatccatgacctgaaggtgaatgtggagcacatgacagagaagatgaagacagacatccagaggggcctggtgctgagaaatgagaagtgccacgactactacaccacagagttcctgtacaacctgtacagcagcgagggcaaaggagtgtttgactgcaggaccaacgtgctgggccacctgcagcagggcggggcccccaccccatttgacagaaattatggcaccaagctgggcgtgaaggccatgctgtggctgtctgagaagctgcgggaggtgtacaggaagggccgggtgtttgccaatgccccagattctgcctgtgtgattggcctgaagaagaaggctgtggccttcagccctgtgacagagctgaagaaggacacagactttgagcacaggatgccccgggagcagtggtggctgagcctgcggctgatgctgaagatgctggcccagtaccgcatctccatggccgcctacgtgtctggagagctggagcacgtgaccaggaggaccctgtccatggacaagggcttctag

SEQ ID NO: 277267 - DNA, 1722 bp, Artificial Sequence
  derived and/or modified sequence
atgggccggcactgcggctacctggccctggtgagcgccctggcctcaggggccgactggcttttcatccctgaagctccgccagaagacgggtgggaaaacttcatgtgcgaaaggttgggggagacacgttctcggggatcccgtctgaacataatcataattgccgagggcgccattgatagaaatggaaaaccaatttcgagttcatacgttaaggatctcgtggtgcagagacttggatttgatactcgtgttaccgtcctgggccacgtgcaaagaggcggaactccaagtgcattcgacagaatcctgagttctaagatgggtatggaggccgtcatggcccttctggaggctaccccagatacaccggcttgcgtggttaccctaagcggaaaccagagcgtccgtcttccgctcatggagtgcgtgcaaatgacgaaagaggtccaaaaagctatggacgacaagcggttcgacgaagcgacacagctgaggggcggatcatttgaaaacaactggaacatctacaagctgctggctcaccagaaaccccctaaagaaaagtcaaatttctcccttgctattctcaacgtcggcgctcccgctgccggaatgaatgccgccgtgcgatcagcagtgcggactggcatcagtcacggccataccgtttacgtcgtgcatgatggctttgagggcttagcaaaaggacaggtgcaggaagtcggatggcatgatgtggctggatggttaggtcgaggtggaagcatgctgggaacgaagcgtaccttgcctaaaggccagctggaatcgatagtcgaaaatatacgcatttatggaatccacgctctgctggtcgtgggcggcttcgaggcctatgagggcgtactgcaactggtcgaagccaggggacgttacgaagagctatgtattgttatgtgcgttatccccgcgaccataagtaataatgttcccggcaccgacttttctttgggctccgacaccgccgtgaatgctgctatggaatcttgtgaccgcataaagcaatccgccagtggtacaaagagacgggtctttatagttgagactatgggcggatactgtggatacctggccacagtgactggcatcgcagtgggagctgatgccgcatacgtgttcgaagatcctttcaatatccacgatctaaaagtgaatgtggagcacatgactgagaagatgaaaacagacatccagagagggctcgtgcttcggaatgaaaagtgccacgattactatacaacggaattcctatataacttgtactcctccgaagggaaaggtgttttcgactgccggacaaatgtacttgggcacctgcagcagggcggcgcacccacgccctttgacaggaattatggcaccaaattgggagtgaaggcaatgctgtggctcagtgagaaactgagagaggtgtatcgaaagggtagggtgttcgcgaatgccccagattctgcgtgtgtgatcggactaaaaaagaaggcagttgctttttccccagtcaccgaactcaagaaagatactgacttcgagcatcgaatgccgagggaacagtggtggctgagcctgagactaatgcttaagatgttggcccagtacagaatcagcatggcggcttacgtctccggcgagcttgagcacgtaacaagacgtactctcagcatggataaagggttctag

SEQ ID NO: 277268 - DNA, 1722 bp, Artificial Sequence
  derived and/or modified sequence
atgggtcgccactgtgggtacctggcgcttgtgtccgccttagctagcggtgccgactggcttttcataccagaggcccctccagaagacggctgggagaattttatgtgcgaaagattaggtgaaacacggtccagaggttctcgtttgaatattattatcatcgcggagggtgcaattgatagaaacggtaaaccaatctcctcgtcctatgtaaaagatttggtggtacaacgccttgggttcgataccagagttaccgtcctgggacacgttcagcgaggcggtactccgtcagcttttgatcggatcctgtccagtaaaatgggcatggaagccgtgatggccctgctcgaagccacacccgataccccggcttgcgtcgtgacattgtcaggcaaccagagcgtgcggcttccactgatggagtgtgtgcagatgaccaaggaagtgcagaaagcgatggatgataagagatttgacgaagccactcagctccgtggtggcagctttgagaataattggaatatctacaaactgctggcacaccagaaaccccctaaggagaaatcgaacttctccctcgcaattcttaacgtcggcgctccagccgcaggcatgaacgcggctgtccgctctgcagtacggacaggcattagtcacggccacaccgtctatgttgtgcatgacggctttgagggcttggctaagggtcaggttcaagaggtgggttggcatgacgtggcaggttggctggggagaggagggagcatgttggggactaaaagaactttacctaaagggcagctggagtcgatagtggagaatattcgcatctacggcatccacgctctactcgtggtcggaggcttcgaggcatacgaaggagtcctccaacttgtggaggccagagggcgttatgaagaactgtgcatcgtgatgtgtgtgattcctgcgacaatctccaataacgtgccaggaactgacttttccctcgggagcgacaccgcagttaatgccgcaatggaatcctgtgaccgtataaaacagagtgcttccgggacaaaaagaagagtttttattgtggaaacaatgggcggttactgcggctatctggccacagttaccggaatcgcggtcggggctgatgcagcgtatgtattcgaagaccctttcaacatccacgaccttaaggtgaatgtcgaacatatgaccgagaaaatgaaaaccgatattcagcggggactggtcctcaggaatgagaagtgccacgactattacacgaccgaatttctttataacctttacagcagcgaagggaaaggggtttttgattgtcggactaacgtgctagggcacctgcagcagggaggggctcccactcccttcgacagaaattacgggacaaaattaggcgtaaaggctatgctgtggctttccgaaaagctgcgggaagtgtatcgaaagggacgcgtgttcgctaacgcccctgattccgcatgtgtcattggcctcaagaaaaaagcagtggcattcagcccggtgacagagttgaaaaaagatacagactttgagcacaggatgccaagagaacaatggtggttatccctgaggctgatgcttaagatgttggcccaatatcgaatctcaatggccgcttacgtcagcggggagctggaacatgttacacgcagaacgctgtccatggacaaaggcttctag

SEQ ID NO: 277269 - DNA, 1722 bp, Artificial Sequence
  derived and/or modified sequence
atgggcagacactgcggctacctggccctggtgagcgccctggccagcggcgccgactggctgttcatccccgaggccccccccgaggacggctgggagaacttcatgtgcgagagactgggcgagaccagaagcagaggcagcagactgaacatcatcatcatcgccgagggcgccatcgacagaaacggcaagcccatcagcagcagctacgtgaaggacctggtggtgcagagactgggcttcgacaccagagtgaccgtgctgggccacgtgcagagaggcggcacccccagcgccttcgacagaatcctgagcagcaagatgggcatggaggccgtgatggccctgctggaggccacccccgacacccccgcctgcgtggtgaccctgagcggcaaccagagcgtgagactgcccctgatggagtgcgtgcagatgaccaaggaggtgcagaaggccatggacgacaagagattcgacgaggccacccagctgagaggcggcagcttcgagaacaactggaacatctacaagctgctggcccaccagaagccccccaaggagaagagcaacttcagcctggccatcctgaacgtgggcgcccccgccgccggcatgaacgccgccgtgagaagcgccgtgagaaccggcatcagccacggccacaccgtgtacgtggtgcacgacggcttcgagggcctggccaagggccaggtgcaggaggtgggctggcacgacgtggccggctggctgggcagaggcggcagcatgctgggcaccaagagaaccctgcccaagggccagctggagagcatcgtggagaacatcagaatctacggcatccacgccctgctggtggtgggcggcttcgaggcctacgagggcgtgctgcagctggtggaggccagaggcagatacgaggagctgtgcatcgtgatgtgcgtgatccccgccaccatcagcaacaacgtgcccggcaccgacttcagcctgggcagcgacaccgccgtgaacgccgccatggagagctgcgacagaatcaagcagagcgccagcggcaccaagagaagagtgttcatcgtggagaccatgggcggctactgcggctacctggccaccgtgaccggcatcgccgtgggcgccgacgccgcctacgtgttcgaggaccccttcaacatccacgacctgaaggtgaacgtggagcacatgaccgagaagatgaagaccgacatccagagaggcctggtgctgagaaacgagaagtgccacgactactacaccaccgagttcctgtacaacctgtacagcagcgagggcaagggcgtgttcgactgcagaaccaacgtgctgggccacctgcagcagggcggcgcccccacccccttcgacagaaactacggcaccaagctgggcgtgaaggccatgctgtggctgagcgagaagctgagagaggtgtacagaaagggcagagtgttcgccaacgcccccgacagcgcctgcgtgatcggcctgaagaagaaggccgtggccttcagccccgtgaccgagctgaagaaggacaccgacttcgagcacagaatgcccagagagcagtggtggctgagcctgagactgatgctgaagatgctggcccagtacagaatcagcatggccgcctacgtgagcggcgagctggagcacgtgaccagaagaaccctgagcatggacaagggcttctag

SEQ ID NO: 277270 - protein, 390 aa, Artificial Sequence
  derived and/or modified sequence
MLILCQAESRAVVYSNTRAPALGGESDMLGMAEPHRKHKDKQRTGRCMVTTDHKVSIDCPWSIYSTVIALTFSVPFRTTHSLLSSGTRKYVQVCVQNLSELDFQLSDSYLVDTGDSTDLQLVPLNTQSQQPIYSKQSVFFVWELKWTEEPPPSLHCRFSVGFSPASEEQLSISLKPYTYEFKVENFFTLYNVKAEIFPPSGMEYCRTGSLCSLEVLITRLSDLLEVDKDEALTESDEHFSTKLMYEVVDNSSNWAVCGKSCGVISMPVAARATHRVHMEVMPLFAGYLPLPDVRLFKYLPHHSAHSSQLDADSWIENDSLSVDKHGDDQPDSSSLKSRGSVHSACSSEHKGLPMPRLQALPAGQVFNSSSGTQVLVIPSQDDHVLEVSVT

SEQ ID NO: 277271 - DNA, 1173 bp, Artificial Sequence
  derived and/or modified sequence
atgctgatcctgtgccaggccgagagcagagccgtggtgtacagcaacaccagagcccccgccctgggcggcgagagcgacatgctgggcatggccgagccccacagaaagcacaaggacaagcagagaaccggcagatgcatggtgaccaccgaccacaaggtgagcatcgactgcccctggagcatctacagcaccgtgatcgccctgaccttcagcgtgcccttcagaaccacccacagcctgctgagcagcggcaccagaaagtacgtgcaggtgtgcgtgcagaacctgagcgagctggacttccagctgagcgacagctacctggtggacaccggcgacagcaccgacctgcagctggtgcccctgaacacccagagccagcagcccatctacagcaagcagagcgtgttcttcgtgtgggagctgaagtggaccgaggagcccccccccagcctgcactgcagattcagcgtgggcttcagccccgccagcgaggagcagctgagcatcagcctgaagccctacacctacgagttcaaggtggagaacttcttcaccctgtacaacgtgaaggccgagatcttcccccccagcggcatggagtactgcagaaccggcagcctgtgcagcctggaggtgctgatcaccagactgagcgacctgctggaggtggacaaggacgaggccctgaccgagagcgacgagcacttcagcaccaagctgatgtacgaggtggtggacaacagcagcaactgggccgtgtgcggcaagagctgcggcgtgatcagcatgcccgtggccgccagagccacccacagagtgcacatggaggtgatgcccctgttcgccggctacctgcccctgcccgacgtgagactgttcaagtacctgccccaccacagcgcccacagcagccagctggacgccgacagctggatcgagaacgacagcctgagcgtggacaagcacggcgacgaccagcccgacagcagcagcctgaagagcagaggcagcgtgcacagcgcctgcagcagcgagcacaagggcctgcccatgcccagactgcaggccctgcccgccggccaggtgttcaacagcagcagcggcacccaggtgctggtgatccccagccaggacgaccacgtgctggaggtgagcgtgacctag

SEQ ID NO: 277272 - DNA, 1173 bp, Artificial Sequence
  derived and/or modified sequence
atgctcattttatgtcaagcagagagccgagccgtggtctatagcaacaccagggcaccagccttgggcggtgaatcagacatgctgggaatggcagagccgcatcggaaacacaaagacaagcagcgcaccgggcggtgcatggtgactacagaccataaggtgagtattgattgcccttggagcatctacagtactgtgattgcattaactttctctgtcccatttcgtaccacacattctctgctgtcctccggcacgaggaagtacgttcaggtgtgcgttcaaaatctctctgagctcgactttcagctgtctgactcatacctggtggataccggggactccaccgacctccagcttgtacctttaaacacccagtcccaacagccgatatactccaaacagagtgttttctttgtctgggagctgaagtggaccgaagagcccccaccatcactgcactgcaggttttccgtcgggtttagtcccgcctcagaggagcagctctccatcagcctcaagccgtatacctacgagttcaaggtagagaactttttcaccctgtataacgtgaaagcggagatcttcccaccctctggcatggagtactgtagaaccggttccctttgttcactggaggtgctcatcactcgcctatccgacctgctcgaggtcgataaggatgaggctctcacggagtcagacgaacacttctcgaccaagctcatgtatgaagttgtcgataactcatctaattgggccgtgtgtggaaaatcttgtggcgtgatttctatgccggtggcagcacgggccacacaccgcgttcatatggaggtgatgcctctgtttgctggctaccttccgttaccagacgtccgccttttcaagtatctcccacaccacagcgcacacagctcacaactggacgctgattcatggatcgagaatgattctttaagcgtagataaacacggcgacgaccaacccgatagtagctctctcaaaagtcgcgggagtgtacactctgcttgctcttctgagcacaagggactgcctatgccacggttgcaggccttgcctgctggacaggtctttaacagttcgtcaggtacccaggtactggtgatcccgtcccaggatgaccatgttctggaggtatcggtgacatag

SEQ ID NO: 277273 - DNA, 1173 bp, Artificial Sequence
  derived and/or modified sequence
atgctgatcctgtgccaggccgagagcagagctgtggtgtacagcaacacccgggccccagccctgggcggggagagtgacatgctgggcatggccgagccccacaggaagcacaaggacaagcagaggacaggccgctgcatggtgaccacagaccacaaggtgtccattgactgcccctggagcatctacagcaccgtcatcgccctgaccttctctgtgcccttccgcaccacccacagcctgctgagcagcggcaccaggaaatatgtgcaggtgtgtgtgcagaacctgtctgagctggacttccagctgagtgacagctacctggtggacacaggagacagcacagacctgcagctggtgcccctgaacacccagagccagcagcccatctacagcaagcagagcgtcttctttgtgtgggagctgaagtggacagaggagcccccacccagcctgcactgccgcttctctgtgggcttcagccctgccagcgaggagcagctgagcatcagcctgaagccctacacctatgagttcaaggtggagaacttcttcaccctgtacaacgtgaaggccgagatcttcccccccagcggcatggagtactgcaggacaggcagcctgtgcagcctggaggtgctgatcacccggctgagtgacctgctggaggtggacaaggatgaggccctgacagaaagtgatgagcacttcagcaccaagctgatgtatgaggtggtggacaacagcagcaactgggccgtgtgtgggaagagctgtggggtcatctccatgcctgtggccgcccgggccacccaccgggtgcacatggaggtgatgcccctgtttgctggctacctgcccctgcctgatgtgcggctcttcaagtacctgccccaccacagcgcccacagcagccagctggatgctgacagctggattgaaaatgacagcctgtctgtggacaagcatggagatgaccagcctgacagcagcagcctgaagagccggggctctgtgcacagcgcctgcagcagcgagcacaagggcctgcccatgccccggctgcaggccctgcctgctggccaggtgttcaacagcagcagcggcacccaggtgctggtgatccccagccaggatgaccacgtgctggaggtgtctgtgacctag

SEQ ID NO: 277274 - DNA, 1173 bp, Artificial Sequence
  derived and/or modified sequence
atgctgatcctgtgccaggccgagagccgggccgtggtgtacagcaacactcgagcccccgcacttggcggggaatctgatatgctgggcatggctgaaccccatcgaaaacataaggacaaacaaaggacagggaggtgtatggtcacaactgaccacaaagtgtcaatcgactgtccctggtctatctattccaccgtaatcgcattaacattttccgtccctttcaggactacccattccttgctcagttccgggacccggaagtacgtccaggtgtgtgtgcagaacttgtcagaactggacttccagttgagcgattcctacttggtggatacgggcgacagcactgatcttcagctggtccctctgaacacccagtcgcagcagccaatttattccaagcagtcggtcttcttcgtatgggagcttaaatggaccgaagaacctccgcccagcctgcattgtcgattctccgttggattcagcccagcatccgaggagcagctgtccatttctctcaaaccttatacatacgagtttaaagttgaaaactttttcacgctgtataacgtcaaggccgagatttttccaccttccggaatggaatactgtcgcaccggtagtctgtgcagtcttgaggtactaattacccggctctctgatttgctggaggtggacaaagatgaggctctgaccgaaagcgatgagcatttctctaccaagctcatgtacgaagtagttgacaattcttctaactgggccgtttgcggaaaatcttgcggggtgatcagcatgccagtcgccgctagagcaactcacagggtgcacatggaagtaatgcctctgtttgctggttaccttcccctaccggacgtgcgtctttttaagtaccttccacaccactcggcccactcttctcagctcgatgctgacagctggatcgagaacgacagcttgagtgttgacaaacacggtgatgatcagccagatagcagctccctgaagtcccgagggagtgttcacagcgcttgctcatcagagcacaaagggctacctatgcctcggttacaggcactacctgcaggacaagtctttaatagctcaagtggaacccaggtgttggtcatcccttcgcaggatgaccacgtcctggaggtgtccgtgacgtag

SEQ ID NO: 277275 - DNA, 1173 bp, Artificial Sequence
  derived and/or modified sequence
atgctgatcctctgtcaggctgaaagcagagccgttgtctactctaacactagagcacccgctctgggaggggagtcagacatgcttggcatggcagagccacatcgcaaacacaaagacaaacaaaggaccggtcggtgcatggtcacaacggatcacaaggtgtcgattgactgcccatggtctatatacagcacggtaatagccctcaccttttcagtgccttttcgaacaacgcattcactactgtcctctgggactcggaagtatgtccaggtctgcgtgcagaacttgagcgagttggactttcagcttagcgattcatacctggtggacacaggagattccaccgaccttcagctggttccactgaacacccagagtcagcagccaatttattctaagcagtcagtgttctttgtatgggagcttaagtggacggaagagcccccacccagcctccactgcagattcagcgtcggattctcacctgcaagcgaggaacagttgagcatatcactcaaaccatatacttatgagttcaaagtcgagaacttcttcacgttgtacaacgttaaagccgaaatcttcccgccatctggaatggagtactgtcgaactggctccctgtgctcactggaagtgctcatcacaagactctccgatttgttagaagtcgataaggatgaagccttgactgagagtgacgagcacttttctaccaaactcatgtatgaagtggtagataacagtagcaactgggccgtgtgcggcaagagttgtggggtgataagcatgccagtggccgctcgcgcaacccacagggtccacatggaagtcatgcctctatttgccggttatctgcctctgcccgatgttcgactgtttaagtatttaccgcaccactccgctcactcctcccaattggatgctgatagctggattgagaatgactccctcagcgtggacaagcacggcgatgaccagcctgatagcagtagcctcaaatccaggggttctgtccactcggcctgttcgtccgagcataaaggtctgccgatgcctaggctgcaagccctccccgctggccaggtgtttaattcatcctctgggactcaggtgctggtgattccaagtcaggacgatcacgttttagaggtcagcgtcacctag

SEQ ID NO: 277276 - DNA, 2215 bp, Artificial Sequence
  derived and/or modified sequence
ctgataactccttgaacacgactgggattatctgcagaaacgtccacatgctcctgagaaggcaggagagcagctcctctctagagatgccctcaggggtggctctggaggagggtgcccacgtgctgaggtgcagccacgtgaccctggaaccaggggccaaccagataacattcaggactcaggccaaggaacctggaacgtatacactcaggcagctgtgcgcctcggtgggctccgtgtggttcgtcctccctgcacgtggagccgctggctgatagccttctggcaggcattcctcagagagtcaagttcactgtcactaccggccattatacgataaagaatggagacagcctgcagcttagcaatgccgaagccatgctcatcctgtgccaggcggagagcagggctgtggtctactccaacacgagagccccagcactcggaggggagagtgacatgctggggatggcagagccccacaggaagcataaggacaaacagagaactggccgctgcatggttaccacagaccacaaagtgtcgattgactgcccgtggtccatctactccacagtcatcgcactgaccttcagcgtacccttcaggaccacacacagcctcctgtcctcaggaacacggaaatatgttcaagtttgtgtccagaatttgtcagaacttgactttcagctgtcagatagttatcttgtagataccggtgatagtaccgacctgcaactagtaccactgaacacgcagtcccagcagcccatctacagcaagcagtcggtgttcttcgtctgggaactcaagtggacagaagagcctcccccttctctgcattgccggttctctgttggattttccccagcttctgaggaacagctgtctatctccttaaagccgtatacttatgaatttaaagtggaaaatttttttacattatacaacgtgaaggctgagatctttcccccttcgggaatggagtattgcagaacaggctccctctgctccctggaggttttgatcacgaggctctcagacctcttggaggtggataaagatgaagcactgactgaatctgatgagcatttttcgacaaagcttatgtatgaagttgtcgacaacagtagcaactgggcagtgtgtgggaaaagctgcggtgtcatctccatgccagtggctgctcgggccactcacagggtccacatggaagtgatgccgctcttcgccgggtatctccccctgcccgacgtcaggctgttcaagtacctcccccatcattctgcacactcctcccaactggacgctgacagctggatagaaaacgacagcctgtcagtagacaagcacggggacgaccagccggacagcagcagcctcaagagcaggggcagcgtgcattcggcctgcagcagcgagcacaaaggcctacccatgccccggctgcaggcactgccggccggccaggtcttcaactccagctcgggcacacaagtcctggtcatccccagccaagatgaccacgtcctggaagtcagtgtaacatgacaacgccagggtgaacacacgccacttcccagctaggagtgcactttatgggactgtgactggactcttccgttctggctccagccagaccttcagtggtcctgcctggccgtggggacatcagagagtgtcatcacgcagctggccagctgagttctgttgttgttttcatgccgcctgtgatctcagattcctgcttttctcaccccgtccccatgctggtgtccgacgccgcttactcagagccctggcctccctccccctacctcacacgctgctcatgaaagtttccacccacgctgtctccacggaacagcctccgtctgctggctcttcgtggaaggccatttgtctttcaggtagacactcagcagccctcacggtcttagtgacgtgtgtgcctttctggtcacacagctgcccagtttcctgatcggggtggatttgtgtcccctaaggggtaaaacagccgtttaccgcagatcctctcattgtgcttttctagaataacacccttctaggggaggcgggtgggggagggagggatcataaccccttctgtgccttgggatgccggagctgggggacctggaggcccatcagccggagccacgtgaaaggtactgaagaaagctgagacccggctgtgaggagcgcctca

SEQ ID NO: 277277 - protein, 1503 aa, Artificial Sequence
  derived and/or modified sequence
MEPSALRKAGSEQEEGFEGLPRRVTDLGMVSNLRRSNSSLFKSWRLQCPFGNNDKQESLSSWIPENIKKKECVYFVESSKLSDAGKVVCQCGYTHEQHLEEATKPHTFQGTQWDPKKHVQEMPTDAFGDIVFTGLSQKVKKYVRVSQDTPSSVIYHLMTQHWGLDVPNLLISVTGGAKNFNMKPRLKSIFRRGLVKVAQTTGAWIITGGSHTGVMKQVGEAVRDFSLSSSYKEGELITIGVATWGTVHRREGLIHPTGSFPAEYILDEDGQGNLTCLDSNHSHFILVDDGTHGQYGVEIPLRTRLEKFISEQTKERGGVAIKIPIVCVVLEGGPGTLHTIDNATTNGTPCVVVEGSGRVADVIAQVANLPVSDITISLIQQKLSVFFQEMFETFTESRIVEWTKKIQDIVRRRQLLTVFREGKDGQQDVDVAILQALLKASRSQDHFGHENWDHQLKLAVAWNRVDIARSEIFMDEWQWKPSDLHPTMTAALISNKPEFVKLFLENGVQLKEFVTWDTLLYLYENLDPSCLFHSKLQKVLVEDPERPACAPAAPRLQMHHVAQVLRELLGDFTQPLYPRPRHNDRLRLLLPVPHVKLNVQGVSLRSLYKRSSGHVTFTMDPIRDLLIWAIVQNRRELAGIIWAQSQDCIAAALACSKILKELSKEEEDTDSSEEMLALAEEYEHRAIGVFTECYRKDEERAQKLLTRVSEAWGKTTCLQLALEAKDMKFVSHGGIQAFLTKVWWGQLSVDNGLWRVTLCMLAFPLLLTGLISFREKRLQDVGTPAARARAFFTAPVVVFHLNILSYFAFLCLFAYVLMVDFQPVPSWCECAIYLWLFSLVCEEMRQLFYDPDECGLMKKAALYFSDFWNKLDVGAILLFVAGLTCRLIPATLYPGRVILSLDFILFCLRLMHIFTISKTLGPKIIIVKRMMKDVFFFLFLLAVWVVSFGVAKQAILIHNERRVDWLFRGAVYHSYLTIFGQIPGYIDGVNFNPEHCSPNGTDPYKPKCPESDATQQRPAFPEWLTVLLLCLYLLFTNILLLNLLIAMFNYTFQQVQEHTDQIWKFQRHDLIEEYHGRPAAPPPFILLSHLQLFIKRVVLKTPAKRHKQLKNKLEKNEEAALLSWEIYLKENYLQNRQFQQKQRPEQKIEDISNKVDAMVDLLDLDPLKRSGSMEQRLASLEEQVAQTAQALHWIVRTLRASGFSSEADVPTLASQKAAEEPDAEPGGRKKTEEPGDSYHVNARHLLYPNCPVTRFPVPNEKVPWETEFLIYDPPFYTAERKDAAAMDPMGDTLEPLSTIQYNVVDGLRDRRSFHGPYTVQAGLPLNPMGRTGLRGRGSLSCFGPNHTLYPMVTRWRRNEDGAICRKSIKKMLEVLVVKLPLSEHWALPGGSREPGEMLPRKLKRILRQEHWPSFENLLKCGMEVYKGYMDDPRNTDNAWIETVAVSVHFQDQNDVELNRLNSNLHACDSGASIRWQVVDRRIPLYANHKTLLQKAAAEFGAHY

SEQ ID NO: 277278 - DNA, 4512 bp, Artificial Sequence
  derived and/or modified sequence
atggagcccagcgccctgagaaaggccggcagcgagcaggaggagggcttcgagggcctgcccagaagagtgaccgacctgggcatggtgagcaacctgagaagaagcaacagcagcctgttcaagagctggagactgcagtgccccttcggcaacaacgacaagcaggagagcctgagcagctggatccccgagaacatcaagaagaaggagtgcgtgtacttcgtggagagcagcaagctgagcgacgccggcaaggtggtgtgccagtgcggctacacccacgagcagcacctggaggaggccaccaagccccacaccttccagggcacccagtgggaccccaagaagcacgtgcaggagatgcccaccgacgccttcggcgacatcgtgttcaccggcctgagccagaaggtgaagaagtacgtgagagtgagccaggacacccccagcagcgtgatctaccacctgatgacccagcactggggcctggacgtgcccaacctgctgatcagcgtgaccggcggcgccaagaacttcaacatgaagcccagactgaagagcatcttcagaagaggcctggtgaaggtggcccagaccaccggcgcctggatcatcaccggcggcagccacaccggcgtgatgaagcaggtgggcgaggccgtgagagacttcagcctgagcagcagctacaaggagggcgagctgatcaccatcggcgtggccacctggggcaccgtgcacagaagagagggcctgatccaccccaccggcagcttccccgccgagtacatcctggacgaggacggccagggcaacctgacctgcctggacagcaaccacagccacttcatcctggtggacgacggcacccacggccagtacggcgtggagatccccctgagaaccagactggagaagttcatcagcgagcagaccaaggagagaggcggcgtggccatcaagatccccatcgtgtgcgtggtgctggagggcggccccggcaccctgcacaccatcgacaacgccaccaccaacggcaccccctgcgtggtggtggagggcagcggcagagtggccgacgtgatcgcccaggtggccaacctgcccgtgagcgacatcaccatcagcctgatccagcagaagctgagcgtgttcttccaggagatgttcgagaccttcaccgagagcagaatcgtggagtggaccaagaagatccaggacatcgtgagaagaagacagctgctgaccgtgttcagagagggcaaggacggccagcaggacgtggacgtggccatcctgcaggccctgctgaaggccagcagaagccaggaccacttcggccacgagaactgggaccaccagctgaagctggccgtggcctggaacagagtggacatcgccagaagcgagatcttcatggacgagtggcagtggaagcccagcgacctgcaccccaccatgaccgccgccctgatcagcaacaagcccgagttcgtgaagctgttcctggagaacggcgtgcagctgaaggagttcgtgacctgggacaccctgctgtacctgtacgagaacctggaccccagctgcctgttccacagcaagctgcagaaggtgctggtggaggaccccgagagacccgcctgcgcccccgccgcccccagactgcagatgcaccacgtggcccaggtgctgagagagctgctgggcgacttcacccagcccctgtaccccagacccagacacaacgacagactgagactgctgctgcccgtgccccacgtgaagctgaacgtgcagggcgtgagcctgagaagcctgtacaagagaagcagcggccacgtgaccttcaccatggaccccatcagagacctgctgatctgggccatcgtgcagaacagaagagagctggccggcatcatctgggcccagagccaggactgcatcgccgccgccctggcctgcagcaagatcctgaaggagctgagcaaggaggaggaggacaccgacagcagcgaggagatgctggccctggccgaggagtacgagcacagagccatcggcgtgttcaccgagtgctacagaaaggacgaggagagagcccagaagctgctgaccagagtgagcgaggcctggggcaagaccacctgcctgcagctggccctggaggccaaggacatgaagttcgtgagccacggcggcatccaggccttcctgaccaaggtgtggtggggccagctgagcgtggacaacggcctgtggagagtgaccctgtgcatgctggccttccccctgctgctgaccggcctgatcagcttcagagagaagagactgcaggacgtgggcacccccgccgccagagccagagccttcttcaccgcccccgtggtggtgttccacctgaacatcctgagctacttcgccttcctgtgcctgttcgcctacgtgctgatggtggacttccagcccgtgcccagctggtgcgagtgcgccatctacctgtggctgttcagcctggtgtgcgaggagatgagacagctgttctacgaccccgacgagtgcggcctgatgaagaaggccgccctgtacttcagcgacttctggaacaagctggacgtgggcgccatcctgctgttcgtggccggcctgacctgcagactgatccccgccaccctgtaccccggcagagtgatcctgagcctggacttcatcctgttctgcctgagactgatgcacatcttcaccatcagcaagaccctgggccccaagatcatcatcgtgaagagaatgatgaaggacgtgttcttcttcctgttcctgctggccgtgtgggtggtgagcttcggcgtggccaagcaggccatcctgatccacaacgagagaagagtggactggctgttcagaggcgccgtgtaccacagctacctgaccatcttcggccagatccccggctacatcgacggcgtgaacttcaaccccgagcactgcagccccaacggcaccgacccctacaagcccaagtgccccgagagcgacgccacccagcagagacccgccttccccgagtggctgaccgtgctgctgctgtgcctgtacctgctgttcaccaacatcctgctgctgaacctgctgatcgccatgttcaactacaccttccagcaggtgcaggagcacaccgaccagatctggaagttccagagacacgacctgatcgaggagtaccacggcagacccgccgcccccccccccttcatcctgctgagccacctgcagctgttcatcaagagagtggtgctgaagacccccgccaagagacacaagcagctgaagaacaagctggagaagaacgaggaggccgccctgctgagctgggagatctacctgaaggagaactacctgcagaacagacagttccagcagaagcagagacccgagcagaagatcgaggacatcagcaacaaggtggacgccatggtggacctgctggacctggaccccctgaagagaagcggcagcatggagcagagactggccagcctggaggagcaggtggcccagaccgcccaggccctgcactggatcgtgagaaccctgagagccagcggcttcagcagcgaggccgacgtgcccaccctggccagccagaaggccgccgaggagcccgacgccgagcccggcggcagaaagaagaccgaggagcccggcgacagctaccacgtgaacgccagacacctgctgtaccccaactgccccgtgaccagattccccgtgcccaacgagaaggtgccctgggagaccgagttcctgatctacgacccccccttctacaccgccgagagaaaggacgccgccgccatggaccccatgggcgacaccctggagcccctgagcaccatccagtacaacgtggtggacggcctgagagacagaagaagcttccacggcccctacaccgtgcaggccggcctgcccctgaaccccatgggcagaaccggcctgagaggcagaggcagcctgagctgcttcggccccaaccacaccctgtaccccatggtgaccagatggagaagaaacgaggacggcgccatctgcagaaagagcatcaagaagatgctggaggtgctggtggtgaagctgcccctgagcgagcactgggccctgcccggcggcagcagagagcccggcgagatgctgcccagaaagctgaagagaatcctgagacaggagcactggcccagcttcgagaacctgctgaagtgcggcatggaggtgtacaagggctacatggacgaccccagaaacaccgacaacgcctggatcgagaccgtggccgtgagcgtgcacttccaggaccagaacgacgtggagctgaacagactgaacagcaacctgcacgcctgcgacagcggcgccagcatcagatggcaggtggtggacagaagaatccccctgtacgccaaccacaagaccctgctgcagaaggccgccgccgagttcggcgcccactactag

SEQ ID NO: 277279 - DNA, 4512 bp, Artificial Sequence
  derived and/or modified sequence
atggagccttcagccctccggaaggcaggatctgaacaggaagaggggtttgagggtctccctagacgggtcactgatctgggcatggtctctaacttgcggcgcagcaactcttccttatttaagtcctggagattacagtgtcccttcggaaacaatgacaaacaggagagcctttcatcctggattcccgagaacattaagaagaaagaatgcgtgtactttgtggagagcagcaagttgtccgatgcaggtaaagtggtatgtcagtgcggatacacgcatgaacaacatttagaggaagccactaaaccccacaccttccaaggtacccagtgggatccaaaaaaacacgttcaggaaatgcctacggacgcctttggagatattgtgttcactgggctgagtcagaaagtgaagaagtacgtgagggtgtctcaggatactcccagtagcgtaatctaccacctcatgacacagcactggggattggacgtgcccaatctactgatttccgtcaccgggggggcaaaaaattttaatatgaagcctaggttaaagtctatcttccgacgcggacttgtgaaggtggctcaaaccacaggagcttggatcatcacaggcggttcgcatacgggtgtgatgaaacaagtgggggaagccgttcgggatttctccctctcgagcagttacaaagagggggagctgattactatcggggtggccacttggggcacagtgcatagacgtgagggtttaatccatcctacaggtagcttccctgcagagtacatcctcgacgaggatgggcagggcaatctcacctgcttggattcaaaccactctcactttatcctagtcgatgatggcacccacggccagtatggcgttgaaatcccgctgcggacacgcttagagaagttcatttctgagcaaacaaaagaaaggggcggagtggcgataaagatccctatcgtatgcgtagtcctggagggtggaccgggaaccctgcacacgatcgacaatgccactacaaacggaacaccctgcgttgtcgtggaaggctcaggcagggttgctgatgtcatcgcccaggtggccaatctacccgtgtccgatattactatctctctgattcaacaaaagttgtcagtctttttccaagaaatgttcgagaccttcaccgaaagccgtattgtggaatggaccaagaaaatacaggacattgtgcgccggcggcagctgttaacagtgtttagggagggaaaagacggtcaacaggacgtggatgtggcaatcctgcaggccctcctaaaggctagccgttcccaggaccactttggccatgagaactgggatcaccagctgaagttggctgttgcttggaaccgagtcgatatcgcgcgtagcgagatcttcatggacgagtggcaatggaagcctagcgatctgcatcctacaatgactgcagcgctgatcagcaacaagccggaatttgtgaagttgtttcttgaaaacggtgtccaactaaaagagttcgttacttgggatacattactgtacttatatgaaaacttggacccatcctgtctgtttcacagcaaacttcagaaggtgctcgtcgaggaccccgaacgacccgcttgtgccccagccgccccaaggctgcagatgcatcatgtcgcccaggtactgcgagaacttctgggggatttcactcagccactgtacccgcgacctcgccataacgatagactcaggttactactgcccgtgccacacgtgaagcttaacgtgcaaggcgttagcctacgatctctttacaaacgctctagtggccacgtcacattcacaatggatcctatcagagacctgctgatctgggctatagtacagaacaggagagaactggcagggatcatctgggctcagagtcaggactgcattgcagcagccctcgcctgcagtaaaatccttaaagagctaagcaaagaggaagaggataccgattcgtctgaagaaatgctcgccttggccgaagagtatgaacaccgggccattggtgtgtttactgaatgttaccgcaaggacgaagagagagcacagaagcttctgacgagagttagtgaggcctggggaaagacaacatgcctgcaattggctctcgaggcgaaagacatgaagttcgtttcccatggaggcattcaagcattcctcaccaaggtatggtgggggcagttgtctgtcgataacgggctctggagagtcactctgtgcatgttagccttccctctgctgctgactgggcttatctcttttcgtgagaagaggcttcaggacgtcggtaccccagcggctcgagcaagagcgttcttcaccgcacccgtggtggtttttcacttaaacattcttagttactttgcgttcctctgccttttcgcctacgtactcatggtcgattttcaacccgtgccctcctggtgcgaatgcgccatttacctgtggctgttttctttagtatgtgaggaaatgaggcaattgttctatgaccccgacgagtgcggactgatgaagaaagcagctctttacttttccgacttctggaacaaacttgacgtgggcgccattctgctttttgtggccggtttgacctgccggctgatccctgcaacgctatacccaggcagagtgatattatcactcgatttcattctgttctgcttgcggctcatgcacatctttaccatcagcaagaccctcgggcctaagattatcatcgtaaaacggatgatgaaggacgtttttttcttcctgttcctcttggccgtgtgggtagtctcctttggtgtggccaagcaagccatcctgatccacaacgagcggcgggtggactggttattcagaggggctgtgtaccactcctatttgacaatcttcggccagattccgggctatattgatggcgttaattttaacccggaacattgctcgcctaatggtacagatccatacaaaccaaaatgtccagagtctgacgccacccaacaacgccctgcttttccagagtggttgacagtcttactattatgcctgtatctcctgtttaccaatattctgcttttgaatctgttgatcgcaatgtttaattacaccttccagcaagtgcaagagcacaccgaccagatctggaaattccaaaggcatgatttgatcgaggagtatcatggccgcccagcagcccccccacccttcatacttcttagccatctgcagctttttataaagagggtggttctgaaaacaccagctaagcggcacaagcagctaaagaataagctggaaaagaatgaagaggccgcccttttgtcctgggagatctacttgaaggagaactacctacagaaccggcagttccaacagaaacagcgacccgagcagaaaattgaggatatcagtaacaaagtggatgctatggtcgatctgttggatttggacccattgaagagaagtggcagcatggaacagcgcctcgcttcactggaggagcaggtggcgcagacagctcaggcgctgcactggatcgtccggactctgcgcgctagcgggttttccagcgaagcagatgtgcccaccctggcttcgcaaaaggccgccgaggaacccgacgctgagcctgggggacgtaaaaagacagaagagcccggggactcttatcacgtgaacgctcgtcacctgctataccctaactgtcccgtgacccgatttccagtgcccaatgagaaggtaccgtgggaaaccgagtttcttatatacgatcctccattctataccgccgaacgcaaggacgccgctgccatggatcctatgggcgacacgctcgaaccgctttcaactattcagtacaacgttgtcgatggtttgcgagaccgccgctcatttcatggaccgtatactgtgcaggccggcttgccattaaaccctatgggacgaaccggtcttagaggcagaggatccctgagctgctttggccccaatcataccttgtaccctatggtgactcgctggcgaagaaacgaagacggtgcgatctgcaggaaaagtatcaagaaaatgctggaggtcttggtcgtgaaactcccactgtccgaacattgggcgttgccgggaggctcccgggagccaggagagatgctgccacgaaagttgaagaggatcctccgccaggaacactggcccagttttgaaaatttgctgaagtgcggaatggaagtttataagggctacatggatgatcctcgtaataccgataacgcctggatcgagacagtggccgtgagcgtgcattttcaggatcaaaacgatgttgaactgaacaggctcaatagtaatcttcacgcttgtgattccggcgcgtctattaggtggcaggtggttgacaggcggatcccactgtacgccaatcataagaccctgttgcagaaggctgcagcagaattcggtgctcactactag

SEQ ID NO: 277280 - DNA, 4512 bp, Artificial Sequence
  derived and/or modified sequence
atggagccttccgctctgcgcaaagctggctccgagcaagaagagggatttgagggcttgccgagacgcgtgactgacctggggatggtgagcaacctgcggcggtctaactcgtctcttttcaagtcgtggaggttgcagtgtccctttggcaacaacgacaagcaggagagtctgtcgtcctggatccctgaaaacattaaaaagaaagagtgtgtttactttgtcgaatcctctaagctgtctgacgccggtaaggttgtgtgccagtgcggttacacccacgagcagcacctggaggaggccacaaaaccacacacctttcagggcactcaatgggatccgaagaagcatgttcaagagatgcccactgacgcatttggagacatcgtcttcacagggctgtcacaaaaggtgaagaagtacgtgagagtgtcccaggacaccccttcctcagtcatatatcatctgatgacccagcattggggactggatgttccaaacctactgataagcgtcaccggcggcgcaaaaaacttcaacatgaagccacggctgaagtccattttccggcggggtctggtcaaggtcgcacagactacgggagcgtggatcatcactggaggtagccatacaggcgtgatgaaacaggtaggagaagccgtgagggatttctctctttcgagctcatataaggagggggagctcattaccattggcgtggccacatggggtacagttcacaggagagagggcctgatccaccccaccggatcgtttcctgccgagtatatccttgatgaggacgggcaaggaaacctcacatgcctcgactccaaccattcacacttcatactggtcgatgacggcactcatggccaatacggcgtggaaatccccttgagaacaaggctcgaaaagttcatctccgaacaaacaaaggaaaggggaggagtagcgataaaaatccctatagtgtgtgtggtgctggagggtggtcccggcactctccacactattgataatgccacaaccaacgggacgccttgcgtagtcgttgagggatctgggagagtagccgacgtgatcgcccaggtggcaaacttgcccgtctcagacatcactattagtctgattcagcagaaactgtcagtgttctttcaagagatgttcgagacatttaccgagtctaggattgtggagtggaccaagaagattcaggacatagtgaggagaagacagctgcttaccgtgttccgggaaggtaaagacgggcaacaagacgtagatgttgcaattctgcaggcattgctgaaggccagcagaagtcaggaccacttcggccacgagaactgggaccatcagttgaagctggcagtggcatggaaccgcgtcgacatcgccaggagcgagatttttatggacgagtggcagtggaagcctagcgacctccacccaaccatgactgcggctcttatatctaataagccggaatttgtgaagttatttctggagaacggagtccagctcaaagaattcgtcacatgggataccctattatacctatatgagaatttagatccttcctgtctcttccatagtaagctgcaaaaagtattggtggaggatccggagcggcccgcatgtgcccctgcagcccccaggctgcagatgcaccacgttgcacaagtcctgagggagcttctcggcgacttcacccagcccctgtacccccgtcccaggcacaacgaccgcctccgactgctactacctgtgcctcacgttaagctgaatgtccagggggtatccttgcgatctctatacaaaaggtcctccggtcacgttactttcaccatggatcctattcgcgacttacttatttgggccatcgtacagaaccgccgggagctcgccggcattatttgggcacagagccaggactgtattgctgccgccctcgcctgttctaaaatactgaaagagttgagcaaggaagaagaagatacagattcctctgaggagatgctggcactggctgaagagtacgagcacagggcaatcggtgtcttcactgagtgttataggaaagatgaagaaagggcacagaaactgctgactcgggtttctgaggcttggggcaaaacaacctgtcttcagctggcactggaagctaaggatatgaagttcgtttcccatgggggcatccaggccttcctgaccaaagtctggtggggacagctgtcagtggacaatggtctgtggcgagtgaccttgtgcatgctggcttttccgctcctgcttactggcttaatctcctttcgggagaaacgtctgcaggacgtggggacaccagcagccagggcccgggcattctttaccgcccctgtagtggtgttccacttgaacattcttagctactttgcttttctttgtctctttgcatacgtactgatggtggatttccaaccagtaccgagctggtgcgagtgcgcaatatacctctggctgtttagcctggtgtgtgaggaaatgagacagttgttctatgaccccgacgagtgcgggctgatgaaaaaagccgctctctacttctctgacttctggaacaagctggacgtcggcgccattttactattcgttgccggactgacgtgtagactgatacccgctactctgtatcccggtcgtgtgatcctgtccttagatttcatcctgttttgccttcgcctgatgcacattttcacaatatccaaaaccttgggcccaaaaattatcatcgtgaaaagaatgatgaaggacgtcttctttttcctctttttactggctgtgtgggttgtgagctttggtgtggccaaacaggcgatcctgatccacaacgagagacgcgtcgactggttgtttagaggagccgtctatcacagctatctgaccatttttggtcagattcccgggtacatcgatggagtgaactttaatccagagcactgcagccccaacggcaccgatccgtataagccaaagtgtcctgagagtgatgccactcagcagcgacctgcgtttcctgagtggcttaccgtcttgctactttgtttgtacctgctgttcaccaatatcctccttctgaatcttctcatcgccatgttcaactatacattccagcaggtccaggagcacaccgatcagatctggaaatttcagcggcatgacctcatcgaggagtaccatggccgacccgcagccccaccgcccttcatcctgctgtcccaccttcagcttttcatcaagcgggttgtcctcaagacccctgccaagcgacacaagcagctcaagaacaagctcgagaagaatgaggaagccgcactgctaagttgggagatatacttgaaggagaattacctgcagaatcgtcaattccaacaaaaacagagaccagaacagaagattgaagacattagcaataaagtggacgccatggtggatttattagatctggatcctcttaagaggtctggaagtatggaacagcggctggcctccctcgaagagcaggtagctcaaacggcccaggcgctgcactggattgttcggacgttacgggcttccggttttagttcagaggccgatgtgccaacgctcgcgtcacagaaggcagcggaggagcctgatgctgaacctggcggtaggaaaaagacagaggaaccgggcgatagctatcatgtcaacgcccgccatctgctgtaccctaattgccccgtcacgcgattccccgtgccaaacgagaaggtcccttgggagaccgagtttttgatttacgatccaccattctatactgcagagcgcaaagacgccgccgcgatggatccaatgggagacaccctggagccattatctactattcagtataatgtggtcgacgggctccgcgatcgccgctcctttcacgggccgtacacagtgcaggcgggactgccactgaatcctatgggccgcactggactcagaggtcgaggaagtctgagctgttttggaccaaaccatacgctgtacccaatggttaccaggtggagacgcaacgaagacggagcgatctgtcggaagtcaatcaagaagatgctggaagtgttggtcgtgaagttaccgctgtccgaacattgggccctgccagggggcagccgggaaccaggtgaaatgctccctcggaaattgaaaagaattctacgccaggaacactggccttcctttgagaacctgctgaagtgtgggatggaagtgtataaaggatacatggacgatccccgtaacacagataatgcttggatcgagaccgtggccgtcagtgtccatttccaggatcagaacgacgtggagctcaaccgcctgaattccaacctccacgcctgcgattctggcgccagcataagatggcaggtcgtcgacagacgaatccctctgtacgccaaccataagacccttctgcagaaggcggcggccgagttcggagcccattactag

SEQ ID NO: 277281 - DNA, 4512 bp, Artificial Sequence
  derived and/or modified sequence
atggagcccagcgccctgaggaaggccggcagcgagcaggaggagggctttgagggcctgccccggcgggtgacagacctgggcatggtgagcaacctgcggcgcagcaacagcagcctcttcaagtcctggaggctgcagtgccccttcggcaacaatgacaagcaggagagcctgagctcctggatccctgagaacatcaagaagaaggaatgtgtgtactttgtggagagcagcaagctgagtgatgctgggaaggtggtgtgccagtgtggctacacccatgagcagcacctggaggaggccaccaagccccacaccttccagggcacccagtgggaccccaagaagcacgtgcaggagatgcccacagatgcctttggagacatcgtgttcaccggcctgagccagaaggtgaagaagtatgtgcgggtgtcccaggacacccccagcagcgtcatctaccacctgatgacccagcactggggcctggatgtgcccaacctgctgatctctgtgactggaggagccaagaacttcaacatgaagccccggctgaagagcatcttcagaagaggcctggtgaaggtggcccagaccactggagcctggatcatcactggaggcagccacactggagtgatgaagcaggtgggggaggccgtgcgggacttcagcctgagcagcagctacaaggagggggagctgatcaccatcggcgtggccacctggggcaccgtgcacagaagagagggcctcatccaccccaccggcagcttccctgctgagtacatcctggatgaagatggccagggcaacctgacctgcctggacagcaaccacagccacttcatcctggtggatgatggcacccacggccagtatggagtggagatccccctgcggacccggctggagaagttcatcagcgagcagaccaaggagcggggcggcgtggccatcaagatccccatcgtgtgtgtggtgctggagggcggccctggcaccctgcacaccatcgacaatgccaccaccaacggcaccccctgtgtggtggtggagggcagcggccgggtggctgatgtgattgcccaggtggccaacctgcctgtgtctgacatcaccatcagcctcatccagcagaagctgagcgtcttcttccaggagatgtttgagaccttcacagagagcagaattgtggagtggaccaagaagatccaggacatcgtgagaagacggcagctgctgactgtgttccgggagggcaaggatggccagcaggatgtggatgtggccatcctgcaggccctgctgaaggccagccgcagccaggaccactttggacatgagaactgggaccaccagctgaagctggccgtggcctggaacagagtggacatcgcccggtctgagatcttcatggatgagtggcagtggaagcccagcgacctgcaccccaccatgacagctgccctgatcagcaacaagccagagtttgtgaagctgttcctggagaatggagtgcagctgaaggagtttgtgacctgggacaccctgctgtacctgtatgagaacctggaccccagctgcctcttccacagcaagctgcagaaggtgctggtggaggaccctgagaggcctgcctgtgccccagctgccccccggctgcagatgcaccacgtggcccaggtgctgcgggagctgctgggggacttcacccagcccctgtacccccggcccaggcacaatgaccggctgcggctgctgctgcctgtgccccacgtgaagctgaatgtgcagggcgtgtccctgcggagcctgtacaagaggagcagcggccacgtgaccttcaccatggaccccatccgggacctgctgatctgggccatcgtgcagaacagaagagagctggccggcatcatctgggcccagagccaggactgcatcgctgctgccctggcctgcagcaagatcctgaaggagctgagcaaggaggaggaggacacagacagcagcgaggagatgctggccctggccgaggagtatgagcaccgggccatcggggtcttcacagagtgctacaggaaggatgaggagcgggcccagaagctgctgaccagggtgtctgaggcctggggcaagaccacctgcctgcagctggccctggaggccaaggacatgaagtttgtgagccacggcggcatccaggccttcctgaccaaggtgtggtggggccagctgtctgtggacaatggcctgtggagggtgaccctgtgcatgctggccttccccctgctgctgaccggcctcatctccttccgggagaagaggctgcaggatgtgggcaccccagctgcccgggcccgggccttcttcaccgcccctgtggtggtgttccacctgaacatcctgagctactttgccttcctgtgcctgtttgcctacgtgctgatggtggacttccagcctgtgcccagctggtgtgaatgtgccatctacctgtggctgttcagcctggtgtgtgaggagatgaggcagctgttctatgaccctgatgaatgtggcctgatgaagaaggccgccctgtacttcagtgacttctggaacaagctggatgtgggcgccatcctgctgtttgtggccggcctgacctgccgcctcatcccagccaccctgtacccaggccgggtcatcctgagcctggacttcatcctcttctgcctgcggctgatgcacatcttcaccatcagcaagaccctgggccccaagatcatcatcgtgaagaggatgatgaaggatgtgttcttcttcctgttcctgctggccgtgtgggtggtgtcctttggagtggccaagcaggccatcctgatccacaatgaaagaagagtggactggctgttcagaggagctgtgtaccacagctacctgaccatcttcggccagatccctggctacattgatggagtgaacttcaaccctgagcactgcagccccaatggaacagacccctacaagcccaagtgcccagagagtgatgccacccagcagaggcctgccttccctgagtggctgactgtgctgctgctgtgcctgtacctgctcttcaccaacatcctgctgctgaacctgctgattgccatgttcaactacaccttccagcaggtgcaggagcacacagaccagatctggaagttccagagacatgacctgattgaggagtaccacggccggcctgctgcccccccacccttcatcctgctgagccacctgcagctgttcatcaagagggtggtgctgaagaccccagccaagaggcacaagcagctgaagaacaagctggagaagaatgaggaggccgccctgctgtcctgggagatctacctgaaggagaactacctgcagaaccggcagttccagcagaagcagaggcctgagcagaagattgaggacatcagcaacaaggtggatgccatggtggacctgctggacctggaccccctgaagaggagcggctccatggagcagaggctggccagcctggaggagcaggtggcccagacagcccaggccctgcactggatcgtgaggaccctgcgggccagcggcttcagcagcgaggctgatgtgcccaccctggccagccagaaggctgctgaggagccagatgctgagcccggcggcaggaagaagacagaggagcccggggacagctaccacgtgaatgcccggcacctgctgtaccccaactgccctgtgacccgcttccctgtgcccaatgagaaggtgccctgggagacagagttcctgatctatgacccccccttctacacagctgagaggaaggatgctgctgccatggaccccatgggagacaccctggagcccctgagcaccatccagtacaacgtggtggatggcctgcgggaccggcgctccttccacggcccctacacagtgcaggccggcctgcccctgaaccccatgggccgcacaggcctgcggggccggggcagcctgagctgcttcggccccaaccacaccctgtaccccatggtgacccgctggaggagaaatgaagatggagccatctgcaggaagagcatcaagaagatgctggaggtgctggtggtgaagctgcccctgtctgagcactgggccctgcccggcggcagccgggagcccggggagatgctgcccaggaagctgaagaggatcctgcggcaggagcactggcccagctttgagaacctgctgaagtgtggcatggaggtgtacaagggctacatggatgaccccaggaacacagacaatgcctggattgagaccgtggccgtgtctgtgcacttccaggaccagaatgatgtggagctgaaccggctgaacagcaacctgcacgcctgtgacagcggggccagcatccgctggcaggtggtggaccggcgcatccccctgtatgccaaccacaagaccctgctgcagaaggctgctgctgagtttggagcccactactag

SEQ ID NO: 277282 - DNA, 4512 bp, Artificial Sequence
  derived and/or modified sequence
atggagcccagcgccctgcggaaggccggcagcgagcaggaggagggctttgagggactaccaaggagggtaacagatctaggcatggtatccaatctccggagaagcaatagcagcctctttaaaagttggcgcctacaatgtccatttggaaataacgataagcaagagagtttgagcagctggataccagagaacatcaagaaaaaagaatgcgtgtatttcgtggagtcctctaagctgtcagacgctggcaaggtggtgtgtcagtgcggttacacacacgagcaacatctggaagaggccaccaaacctcacacttttcaggggactcaatgggaccccaagaagcatgttcaggagatgccgactgatgctttcggcgatatagtcttcacaggactgtctcagaaggttaaaaagtacgtgagagtaagccaggatacacctagttcagtgatctaccacttaatgacgcaacattgggggcttgatgtgccaaacctgctcatcagtgtaactgggggtgcgaaaaacttcaatatgaagcctcggctgaagtctatcttccgccgggggctcgtgaaagttgcccaaacaaccggggcttggataatcactggggggtctcataccggagtgatgaagcaggtgggggaagcagtccgggatttttcactcagttccagctacaaagagggggaactaattactatcggagttgccacctgggggacagtgcataggagggaaggcctgatccatcctacaggctcctttcctgcagagtatatcctggacgaagatgggcaggggaatctgacgtgtctggacagcaaccatagtcatttcatcttagtcgacgatggaacgcacgggcaatatggggtggagatcccactcaggacccgcttggaaaaatttatctccgaacaaacaaaggagcgtggcggggtggccattaagataccgatagtgtgcgtcgtgctcgaaggtgggcctggaaccttgcataccattgacaatgctactacgaacgggaccccatgcgtggtggtcgagggctccgggcgggtcgcggatgttatagcccaggtggcaaatctcccagttagcgacattacgatttccttgattcagcaaaaactgtcagtgttttttcaagaaatgtttgaaacgttcaccgagtcaagaatcgtggagtggactaagaagatacaagacatcgtccgacgccggcaactcttgaccgtgtttcgggaagggaaggatggacagcaggacgttgacgtcgccatactccaggccctcctaaaagcgtctagatcacaggaccacttcggtcacgaaaactgggaccaccaattaaagcttgccgtagcttggaaccgggtggatattgcccgtagcgaaatcttcatggacgaatggcagtggaagcccagcgatctgcatccaacaatgacggctgccttgatctcaaataaaccagaattcgtaaagctatttctggagaacggcgtccaactcaaggagtttgtgacatgggataccttgctttatctgtacgagaatctggatccgtcttgtctcttccattccaaactccagaaggtactggtagaggaccccgagaggccggcttgtgctccggctgctcctcgactacagatgcatcatgtcgcccaggttcttcgagaactgctcggagatttcacccagcccctatatccacggccaagacacaatgaccgacttcgactgctgttgccggtaccacacgtgaagctgaacgtccagggcgtcagccttcgcagtctttacaagcgtagctccggccacgttacctttactatggaccccatacgagatctattgatttgggccattgtgcagaaccgccgggaactagccggcatcatctgggctcaatcacaggattgcatcgctgctgccctagcatgctccaaaatcctaaaggaactctcaaaagaagaagaggataccgacagttccgaggagatgctggccctggcagaagaatacgaacatagggccatcggcgtctttaccgagtgttataggaaagatgaagaacgagctcagaagctgcttacacgcgtttctgaagcctggggtaaaacgacctgcttgcagctagccctggaagccaaggatatgaagttcgtttcccatggcggaatccaggctttcctgactaaagtgtggtggggccagctgtccgtggataacgggctgtggcgggtaaccttatgcatgctggctttcccgctgttgttgactgggttgatatcattccgggagaaacggctacaagatgttggaacccccgccgcgagagctcgagcattcttcaccgctcctgtagtcgtcttccatttaaatattctttcgtatttcgcttttctgtgcctgtttgcctacgttctgatggtggacttccagcctgtgccctcttggtgcgagtgcgctatttatctgtggctctttagccttgtatgcgaggaaatgcgccagctcttttatgaccccgacgagtgtggccttatgaagaaggctgctctttatttcagcgacttttggaacaaactcgatgtaggagctattcttcttttcgtggccggcttgacctgccggctgattccagccactctttatcccggccgcgttattctatccttggatttcatccttttttgcctacggctgatgcatatcttcacgatctctaagactcttgggcctaaaattatcatcgttaaaagaatgatgaaggatgtctttttcttcctgttcctgctcgctgtctgggtagttagttttggagtggccaagcaggcaattctgattcataatgagcgacgggtggactggttatttcgtggggctgtgtaccatagttatcttacaattttcgggcagatccctggatatatcgatggcgtgaactttaatcccgagcattgcagtcccaacggaacagacccctacaaacctaaatgtccagagtcagatgcaactcagcagcggcctgcgtttccggaatggctgacagtgttgttgttgtgcctgtacctcctctttactaatatcttactgctcaacctgctgattgctatgttcaactataccttccagcaggtccaggagcacacagaccaaatctggaagttccaaaggcatgacctcatcgaggagtaccatgggcgaccagcggcaccccccccattcatccttctgtcccatcttcaactgtttattaaacgagtggtcttgaagacgcccgctaaacggcacaaacaactgaagaataagcttgaaaaaaacgaggaagcagccctgttgagttgggaaatttacctgaaggagaactacctccagaaccggcaattccagcaaaagcagagaccagagcagaagatcgaggatatctctaataaagtcgacgcaatggtggatctgctggatctggaccccctgaaacggtcgggtagcatggagcaaaggctcgctagcctcgaagagcaggtggcccagactgcccaggccctgcactggattgtgcgcacacttagagctagcggattcagctcggaggccgatgtgccgaccttagcaagtcagaaagccgctgaagagcccgacgccgaaccggggggacgcaagaagacggaggaaccaggggacagttaccacgtgaacgctcgtcacctgctgtaccccaattgccccgtaactaggtttcccgttcccaacgagaaagtgccctgggaaaccgagtttcttatttacgatccccctttttatactgccgagcgtaaggacgccgctgccatggaccctatgggcgacacccttgagcctctttctaccatccagtacaacgtagtcgatggtctccgagacagaagatctttccacggcccctatacagttcaggccggcctgcctctgaaccctatggggcggactgggctgcgcggtagagggagcttatcctgttttggccccaaccatactctctaccctatggtcaccaggtggcgcaggaacgaggacggagctatatgtcgaaagtccattaaaaaaatgctagaggttctggtagtgaagctgcccttgtctgagcactgggcattacccggaggctctagggaaccgggcgagatgctgccccgcaagctgaaaaggatattacggcaggagcactggccctcctttgagaacttgctcaaatgcggcatggaggtgtataaaggatatatggatgatccgaggaacaccgacaacgcctggatcgaaacagtcgccgtgtctgttcacttccaggaccagaacgacgtggaactgaatcgcctgaacagtaacttacatgcatgcgactccggagcgagcatcaggtggcaggtggtcgatcgccggatccccctatatgcgaaccataaaactctccttcagaaggccgctgcggaatttggagctcactactag

SEQ ID NO: 277283 - DNA, 4512 bp, Artificial Sequence
  derived and/or modified sequence
atggagcccagcgccctgcggaaggccggcagcgagcaggaggagggcttcgaaggactcccaaggagggttaccgacttgggaatggtgtcaaacctccggcgcagtaatagctctctgtttaagagttggcggcttcagtgtccgtttggcaacaacgataagcaggagagccttagctcttggatccctgaaaatattaagaagaaggagtgcgtatattttgtggaatcttccaagctttcggacgcaggcaaagttgtgtgccagtgtggttatactcatgagcagcacctcgaagaagccacaaagccccatacattccagggaactcagtgggatcccaagaagcatgtccaagaaatgcctaccgatgccttcggtgatattgtgttcaccggcctcagccagaaagtaaaaaagtatgtaagagtctctcaggacaccccatcctctgtgatttaccacctcatgactcagcattggggccttgacgtgccaaatctgctgatttccgtcactgggggggctaaaaattttaatatgaaaccccgcttgaagtcaatcttccggcgtgggttggtaaaagtggctcagacaacaggggcctggattattacgggcgggagtcacaccggggtcatgaagcaggtgggcgaggctgtgcgggacttttctctgtcgtctagctataaagagggggagctgataacgattggtgtggcaacctggggaactgtgcaccggagagaaggactcatccaccctaccgggagtttccctgctgaatacatcctggacgaagatgggcagggaaatttgacatgtctcgactctaatcactctcactttatcttagttgatgacggtacccacggacagtatggcgtagagattccacttcggaccagactggagaagtttatttctgagcaaactaaggagcgggggggggttgccatcaagattccaatcgtatgcgtagtactcgagggtggccctggaactctgcatactattgataacgcaactaccaacgggaccccatgcgtggttgtggaagggtctgggagggtggcagatgtaatagctcaggtcgcaaacctcccagtgagcgatattacgattagcctcatccagcagaaattgagtgtcttcttccaggagatgtttgaaacctttacagagagtaggattgtagagtggacaaaaaaaatccaggatatcgttagacggaggcagctactgaccgtgttcagagagggtaaggatgggcagcaggacgtggacgtggcaattctccaggcacttttgaaagcttcacgatcccaggaccacttcggtcatgagaattgggaccatcaactaaaactggcagtcgcctggaacagggtcgacattgctagaagcgaaatattcatggacgagtggcaatggaaacctagcgatcttcacccgactatgaccgcagctctaatctctaacaaacccgagtttgtgaaactcttcctggagaacggcgtgcagctgaaggagttcgtgacttgggatacactgctctatctgtacgaaaatctggatccctcttgcctgtttcacagtaagcttcagaaagtcctcgtcgaggaccctgagcggccagcttgcgccccggcggcccctaggctgcagatgcatcatgtcgcgcaagttctccgggaattgctcggggattttacccagcccctctatccacggccgaggcacaatgatcgtctacgccttctcctgcccgtccctcacgtgaaattgaatgtgcagggagtctctctcagatctctgtataagcggagctctgggcacgtgacgttcaccatggaccccatcagagatctattaatctgggctatagttcagaaccgccgggagttagccggaattatttgggcccagtcccaagactgcatcgccgccgcgctcgcctgctctaaaattcttaaagaattatccaaggaagaagaggacactgacagcagcgaggaaatgctagctttggcagaagagtatgaacatcgcgccatcggagtttttactgaatgttaccgtaaagatgaggagcgagcacaaaaattactcactagggtgtctgaagcatgggggaaaactacgtgtttacagctagctctggaggccaaagacatgaagtttgtcagccatggcggcatccaggcttttttaactaaggtctggtggggacagctttcagtcgataacggcctgtggagagtaacattatgtatgcttgcttttcctcttctgttgaccgggctgattagctttcgtgaaaagcgattgcaggacgtgggaaccccagctgcccgagccagagctttctttacggcacccgtggtagttttccaccttaatatcctgagctattttgccttcctttgtctgtttgcttatgtgctaatggtcgatttccagccggtccccagctggtgcgaatgcgcaatatatctctggctgttttcactggtttgtgaagagatgagacagttgttctatgatccggacgagtgcggtttaatgaaaaaagctgccctttacttttccgatttctggaataaactggacgtgggtgctattctgctgtttgtggctggattgacctgccggctgattcctgcaacactctacccgggtagagttatcttgtctctggacttcatcctgttctgtttaaggctgatgcacatcttcaccattagtaagacattgggcccaaaaatcattatcgtcaaaaggatgatgaaagacgtgttttttttcctgttcctcctggccgtgtgggttgtaagcttcggagttgccaaacaggccattttgattcataatgaacggagagtcgactggttattcagaggggccgtgtatcacagttacttgacaatatttggacagattcccggctatatcgacggcgtgaattttaacccagaacattgttccccgaacggcacagacccttataaacccaagtgtcccgaatcggacgctacacagcagagacccgcctttccagagtggctaacagtcctgctgctgtgcctgtacctcttatttaccaatatcttgctgctgaatctgctgatcgcaatgtttaactacacatttcagcaagtacaggagcacaccgaccaaatttggaagttccaaaggcatgacctcatcgaagaataccatggaagaccggcggccccgccaccattcatcctgctctcccacctgcagttgtttataaagagagttgtgctgaagactcctgcaaaacgccacaagcagctgaaaaacaagctagagaaaaacgaggaggctgctctactatcttgggaaatctacttgaaagaaaactaccttcagaatcgacaattccagcaaaagcagaggccggaacaaaagatagaggacatttcaaataaagtggatgctatggtcgatctgctcgacctcgaccctctgaagcgatccggctcaatggagcagaggttggccagcttagaagagcaggtcgcccaaaccgcccaggctctgcattggattgtgaggacgttgagggcatccggtttttccagcgaggcagacgtgccaacactggctagccagaaagccgcagaagaacctgatgcggagcctggaggaaggaagaaaactgaggagcctggcgatagttaccatgtaaacgcaagacatctgctgtaccctaattgccctgtgactcgattcccggttccaaatgaaaaggttccctgggaaacggaattcttgatctacgacccacctttttacacagccgaacggaaggacgcagcagctatggacccaatgggggatacactggaacccttatccacaatccagtacaatgtcgtggacggcctgcgggaccggcgatcctttcatggaccctacactgttcaggccggactacccctgaaccctatggggaggacaggactaagaggcagggggtcactgtcgtgtttcggccccaaccatacgctttatcctatggtgactagatggcgcaggaacgaggatggggctatttgtcgcaaatctatcaaaaaaatgctagaggtgttagttgtaaagctgcccctctcagagcactgggctcttcctggtgggagccgcgagcctggcgagatgctgcctcggaaactgaaacggatcctgaggcaagagcactggccaagcttcgagaatttactaaagtgcgggatggaggtttacaaagggtacatggacgacccccgcaataccgacaacgcatggatcgagaccgtggccgtgtccgtgcactttcaggaccagaacgatgttgagttgaaccgcctgaacagcaatttgcatgcctgtgattcgggtgcttctattagatggcaggtggtagatcgcagaattcccctgtatgctaaccacaaaactttgctccagaaggccgcggccgaattcggtgcccattattag

SEQ ID NO: 277284 - DNA, 4512 bp, Artificial Sequence
  derived and/or modified sequence
atggaacctagcgcactccgtaaagctggatccgagcaagaggaagggttcgagggattacctcgcagggtcacagaccttgggatggtgtctaacctgcgccgttccaattccagtctcttcaagtcttggcggctccagtgcccttttggcaacaatgacaagcaagagagtttgtccagctggattccagagaatatcaaaaaaaaagagtgcgtatactttgtcgaaagttctaaactgagtgatgccggaaaggtggtgtgccagtgtggttacacccacgagcagcatctggaggaggctaccaagccccacacatttcagggtactcagtgggatcccaagaagcacgtgcaggaaatgcccaccgacgcctttggggatatcgtgttcaccggcctttcacagaaggttaaaaaatatgtcagggtgtcacaggacacaccttccagcgtgatctatcatctgatgacgcagcattggggtcttgatgtccctaacttgctcattagcgtgactggtggtgcaaaaaattttaatatgaaacccagactcaaaagtatttttaggagggggctggttaaggtagcacagactacgggagcttggattatcaccggcggtagtcatacaggcgtcatgaagcaggtcggcgaggcggtgagagacttttcactgtctagttcttacaaggagggcgaactgataacaattggcgtggccacttggggaacagtgcatcgccgagagggtctgatccacccgaccggcagctttcccgctgaatatatactggacgaggacggacagggaaacctgacctgcctggacagtaaccattcccactttattctagtggacgacggaacacatggccagtacggtgttgagattcccttgaggactaggctggagaaatttatatcagagcagactaaggagcgaggcggagtggctattaagattcctattgtgtgtgtagtgttagagggcggtccaggtaccctgcataccattgacaacgcgacaaccaacggaacaccctgcgtggtggtggaaggcagcggccgagtggctgatgttattgcgcaggttgctaatttgccggtgtctgatatcacaatcagccttatccaacagaaactgagtgtgttttttcaggagatgttcgaaacttttactgaatctaggattgtggagtggacaaagaagattcaggatatcgtacggagaaggcagctgctcacggtctttcgcgagggcaaggatggacagcaggatgttgatgtggcaattttgcaggccctgctgaaagcctcacggtcacaggatcacttcggccacgaaaactgggaccaccagctcaaactggccgtggcttggaacagagtggatatcgcacgcagtgaaatcttcatggacgaatggcagtggaagccatcggatttgcatccaacaatgacggccgctttaatcagcaacaagcccgagtttgtcaaactctttctcgaaaatggcgtgcaactgaaagagttcgttacgtgggacacattgctttatctgtacgaaaacctggacccgtcttgccttttccacagcaaattgcagaaggtgctcgttgaggaccccgaacggcctgcatgcgctcctgcggcaccgagattgcagatgcaccacgtcgctcaggtccttcgagagctcctgggcgacttcacacaaccactctatccacgacctcgccacaatgatagactgaggttactcctgcctgtcccgcatgtgaagctaaatgtgcaaggtgtatcgctgcggtccctgtacaagagaagcagcgggcatgttactttcacaatggatcctatccgggacctgctgatatgggccatcgtccagaaccggcgagagcttgcaggaatcatctgggctcagtcccaggattgcatcgctgccgcactagcctgctctaaaatactgaaagagctgtctaaagaagaggaagatacagactcctccgaagagatgttagcccttgctgaagagtacgaacatagggctatcggcgtgttcacagagtgttacagaaaagacgaggagagagcccagaaactgctcacccgggtatctgaggcgtggggcaaaactacttgtttgcagcttgccttggaggcaaaggacatgaagtttgttagtcatgggggaatccaggcatttcttacaaaggtctggtggggacagctgtctgtggacaacggcctttggagggtcacattatgtatgttagcctttcccctgctactgacggggttaattagctttagagagaagcgtctgcaggatgtaggcacccctgcagccagggcaagagcatttttcacagcccctgttgttgtgttccatctcaacatccttagctactttgcctttctctgtctcttcgcatacgtcctcatggttgatttccaaccagttccaagttggtgtgaatgtgcgatctacctgtggctgttttctttagtctgtgaagagatgcgccagctcttttacgatcccgatgagtgcgggctaatgaaaaaggcagcactctacttcagtgatttctggaataaattagatgttggcgcaatccttctgtttgtcgcgggtctgacctgcagattaatccctgccaccttgtacccaggccgtgtcatccttagcttagattttatcctcttctgcttgcgccttatgcacattttcacgatctcaaaaaccctgggacctaaaattataattgttaagagaatgatgaaggacgtgttttttttcctcttcctgctcgcggtctgggtggtcagcttcggtgtcgcaaaacaggcgatcctcatccacaatgagcggagggtcgactggctcttcaggggagcagtgtatcatagctacttgactattttcggacagattcctggatatattgatggtgtgaacttcaaccccgagcattgttcacctaacggtacggacccctataaaccgaaatgcccagaatctgatgccacacagcagcggccagccttccctgagtggctcaccgtgctccttctgtgtctctacctgctgtttaccaacatcctgctattaaacctgcttatagccatgtttaactacacttttcaacaggtgcaggaacatactgaccagatctggaaattccaaagacatgacctgattgaagaatatcacggcaggccagcagctcctccgccttttatcctcttgagtcatttgcagctttttattaagcgcgtcgtgttaaaaactccggcaaaacgccacaagcagctgaagaataagttagagaagaacgaagaggcggctttactctcttgggaaatctacctgaaggagaactacttacaaaacagacagttccagcagaaacaaagaccagagcagaagatcgaagatatatcaaataaagtggacgcaatggtcgatctcctggacttggatcctctgaagcgctctggatccatggagcagcgcttggcatcactagaggagcaagtggcccagacagcgcaggctctgcattggatcgtacgcaccttgcgcgcaagcggattcagctcggaagccgatgtgccaacgctcgcctcccagaaagccgctgaagagcccgacgccgagcccggtggcagaaagaaaaccgaagagccaggcgactcgtaccatgtgaacgctagacacctgttataccccaattgccccgttacccgcttcccagtccctaacgaaaaagtcccttgggagaccgagttcctgatttatgaccctcccttctatactgccgaaagaaaagacgctgccgctatggatcctatgggggacacattggaacccctgagcaccatacagtataatgtggttgacgggctccgggaccggagatcgttccatggcccttacacagtgcaagctggactgcccctaaatcccatgggaagaaccgggctgagggggcgtggtagcctaagctgcttcggccctaatcatacactctatcccatggtgacacgctggaggaggaatgaggacggagcaatctgcagaaagtctatcaaaaaaatgctcgaagtcctcgtcgtgaagctacccctttcggaacactgggccctgccgggaggatcacgggaaccaggcgaaatgctgcctagaaaactgaagaggatcctgcgtcaggagcactggccgagtttcgagaatctgctcaaatgcgggatggaggtctataagggctacatggacgaccccaggaacactgataatgcttggattgagacagtggccgtgtccgtgcacttccaggatcagaacgatgttgagctgaatagactgaattcaaatctacacgcttgcgacagcggcgcttctatcaggtggcaagttgttgatcgcagaattccattgtatgcaaatcacaagactcttctccaaaaagccgcagccgagttcggcgctcactactag

SEQ ID NO: 277285 - DNA, 4512 bp, Artificial Sequence
  derived and/or modified sequence
atggagccctctgccctgcgaaaagccggaagcgagcaggaggaaggcttcgaagggttgccgcgacgggtgacagacctcggcatggtgtccaatctccgtcgttcaaattcatccctctttaaatcatggagactccagtgtccattcgggaataacgataagcaagaatccttatcctcgtggatcccggagaacataaaaaaaaaagaatgcgtgtattttgtggagagcagcaaactgtctgacgcaggaaaggtcgtatgccagtgtggctacactcatgagcagcacttggaggaagctactaaaccccatacgttccaaggcacccagtgggaccccaagaagcacgtgcaagaaatgcctacggatgcctttggtgacattgtgtttaccggactgagccagaaggtcaagaagtacgtccgtgtgtctcaggacaccccgtcctcagtcatctaccacctgatgacacagcattggggcctcgatgtcccgaacttactcatcagcgtgacaggtggtgcaaaaaatttcaatatgaagccgagactaaaaagcatcttccggcgtgggttggtcaaagttgcccagaccaccggcgcatggattattacaggcggtagccacactggcgttatgaagcaggtaggcgaggccgtgcgtgactttagcctgagctcgtcctataaggagggcgaactgattactataggggtagccacttgggggaccgttcatcggagggagggcctgattcatcctacaggtagtttccctgcggaatatatactggatgaagatggccagggaaatcttacctgcctggactcaaaccactcacacttcattttagtggatgacggtactcacggccagtacggtgtcgagatccccttacgcacacgcttggaaaaatttatctccgaacaaacaaaggagcgcggtggtgtcgccatcaagattcccatagtttgtgtggtcttggagggcggtcccggaacactgcatacaattgataatgccaccacaaatggcacaccttgtgttgttgtcgagggcagcggccgagtggccgatgtgatagcacaagttgctaatctacccgtgtccgatataacgattagcttaatacagcagaagctctccgtgttctttcaggagatgttcgagaccttcactgaaagtaggattgttgagtggacaaaaaagatccaggacattgtgaggagacgccagttactaacagttttccgcgagggtaaggacggtcaacaggatgtggatgtggccattctgcaggcgctcttgaaggccagccgtagccaggatcattttggccatgagaattgggatcatcagctgaaactcgccgtcgcctggaatagggtggacattgccaggagtgagatttttatggacgagtggcagtggaaaccctccgacctgcacccgacgatgacagcagccctcatctcaaacaagcctgagtttgtgaagctgttcctggaaaacggcgtccagttgaaagaattcgtaacatgggatacactcctctatttatacgagaatctcgaccctagctgcctgttccattcaaagttacagaaggtgctcgtcgaggaccctgaacggccagcctgcgcacctgccgcacctagattacagatgcaccatgtggcgcaagtactcagggagctgttgggagatttcacgcagcccctgtaccctcgccctagacataatgatagactgcgccttcttctaccagtgccccacgtgaaacttaatgtacaaggtgtctcactcagatctctctataaaagaagctctggtcacgtgacctttaccatggatcctattagggacctgcttatttgggcaattgttcaaaatcgcagggaattagccggaattatatgggctcagtcacaagattgtattgcggctgcactggcctgttctaaaattctgaaggagctgagcaaagaagaggaggacaccgattctagcgaggagatgctcgcacttgccgaagagtatgagcaccgggctatcggggtgttcacagaatgttacagaaaggatgaagagagggcgcagaagctcctgaccagggtgtcggaggcttgggggaagactacctgcctgcagctggccctggaggcaaaagacatgaaattcgtctcccacgggggtatccaggcttttctgacaaaagtgtggtggggacagctgagcgtggacaatggactgtggcgtgtcaccctatgtatgctggcgtttccactgcttcttactgggctgatttccttcagggaaaaaaggcttcaggacgtaggtactcccgcagccagggcgcgagccttttttacagccccagttgttgttttccatcttaacatcctttcatacttcgcatttctttgcctgttcgcctacgtgttaatggtggattttcagccagttccctcctggtgcgagtgcgccatctacctgtggctgttcagtttggtgtgcgaggaaatgcgacagctgttctatgaccccgacgagtgcggcctgatgaagaaagctgcgctctacttctccgacttttggaacaaacttgacgtgggagcaatccttctcttcgtcgctggtctgacttgtcgactaatacctgctaccctatacccaggcagagtgattctgtcattagattttatcctattttgccttcgactgatgcatatttttacaatctccaagactctgggacccaaaatcattatcgttaagagaatgatgaaggacgtgttctttttcctgtttctcctggcggtttgggtggtatccttcggggtggctaagcaggctatactgatccacaacgagcggagggtggattggttgttcaggggagcggtttatcactcttacctgacgatttttggacagatccccggatacatcgatggggtcaatttcaatccagagcattgttctcccaacggcactgatccatataagcccaaatgtccagagtcggacgcgacccagcagcgccctgccttccccgaatggctgacggttctgttgttgtgtttgtaccttctctttacgaatattcttttactcaatttgcttatagcaatgttcaattacaccttccagcaggtgcaagaacatactgaccaaatatggaagtttcaaagacatgacttgatagaggagtaccacggacgcccagctgcccctccacctttcatcctgctgtcccatttgcagctatttataaaacgcgtggtgctgaagactcccgcaaagagacataagcagctgaagaataagctagagaaaaacgaagaggctgcccttctttcatgggaaatatatttgaaagagaactatctgcagaacaggcaatttcagcagaagcagcggccagaacagaaaatcgaggatatcagtaataaagtggatgccatggtggacctgctcgacctcgatcccctaaagagatcggggtcaatggagcagagactggcctctttagaggagcaggtagcccaaaccgcccaggcactgcactggattgtgaggaccttacgtgcaagcgggttctcaagcgaagctgacgttccgacattggcatcacaaaaggctgcggaggagcccgacgcagaaccaggcggacggaaaaagaccgaggaacccggagacagctatcacgtcaacgccagacatctactgtaccctaattgcccggtgactagattcccagtgcctaacgagaaggttccgtgggagaccgagtttttgatctacgatcccccattctacaccgccgagcgcaaggatgccgcagcgatggacccaatgggggacacactcgagccccttagcactattcagtacaatgtggtggacggcctgcgggaccgcaggagctttcatggaccctatactgtgcaagccggacttccacttaacccaatgggcagaaccggcctgcgcggacgcggatctctctcgtgcttcggacccaatcacactctctacccgatggttaccagatggaggagaaacgaagatggggcaatctgccgcaagagcataaagaaaatgctcgaagtcttagtcgtcaagctccctctgtcagagcattgggcgctgccgggtggctcacgagagcccggagagatgttaccaaggaagctgaaacgtattctgcgtcaggaacattggccctcttttgagaacctgctgaagtgtggcatggaggtatacaaaggatatatggatgatcctcggaataccgacaatgcttggatcgagaccgtggccgtgtctgtgcactttcaggatcagaacgatgtggagctcaatcggttaaattctaatctgcacgcttgtgattctggcgcatccatacgatggcaagttgtggaccggaggattcctctgtacgctaaccacaagactttgctgcagaaagcagcagccgagtttggggcacactattag

SEQ ID NO: 277286 - DNA, 5989 bp, Artificial Sequence
  derived and/or modified sequence
tgcaccgggcacgcggcgcacgctcgggcgagatgtggatggccccgcggggccagggcggcggtgctgcgcggggacgcgggtgacgccggggcgcgggcggctccgagcagcaaccaccccatgtgtctctagaaccccagtgtagcgagctggagagaggactgtcctgagggcagcaggcctggttgcagctggcgtgggggtctcagaatggagccctcagccctgaggaaagctggctcggagcaggaggagggctttgaggggctgcccagaagggtcactgacctggggatggtctccaatctccggcgcagcaacagcagcctcttcaagagctggaggctacagtgccccttcggcaacaatgacaagcaagaaagcctcagttcgtggattcctgaaaacatcaagaagaaagaatgcgtgtattttgtggaaagttccaaactgtctgatgctgggaaggtggtgtgtcagtgtggctacacgcatgagcagcacttggaggaggctaccaagccccacaccttccagggcacacagtgggacccaaagaaacatgtccaggagatgccaaccgatgcctttggcgacatcgtcttcacgggcctgagccagaaggtgaaaaagtacgtccgagtctcccaggacacgccctccagcgtgatctaccacctcatgacccagcactgggggctggacgtccccaatctcttgatctcggtgaccgggggggccaagaacttcaacatgaagccgcggctgaagagcattttccgcagaggcctggtcaaggtggctcagaccacaggggcctggatcatcacaggggggtcccacaccggcgtcatgaagcaggtaggcgaggcggtgcgggacttcagcctgagcagcagctacaaggaaggcgagctcatcaccatcggagtcgccacctggggcactgtccaccgccgcgagggcctgatccatcccacgggcagcttccccgccgagtacatactggatgaggatggccaagggaacctgacctgcctagacagcaaccactctcacttcatcctcgtggacgacgggacccacggccagtacggggtggagattcctctgaggaccaggctggagaagttcatatcggagcagaccaaggaaagaggaggtgtggccatcaagatccccatcgtgtgcgtggtgctggagggcggcccgggcacgttgcacaccatcgacaacgccaccaccaacggcaccccctgtgtggttgtggagggctcgggccgcgtggccgacgtcattgcccaggtggccaacctgcctgtctcggacatcactatctccctgatccagcagaaactgagcgtgttcttccaggagatgtttgagaccttcacggaaagcaggattgtcgagtggaccaaaaagatccaagatatcgtccggaggcggcagctgctgactgtcttccgggaaggcaaggatggtcagcaggacgtggatgtggccatcttgcaggccttgctgaaagcctcacggagccaagaccactttggccacgagaactgggaccaccagctgaaactggcagtggcatggaatcgcgtggacattgcccgcagtgagatcttcatggatgagtggcagtggaagccttcagatctgcaccccacgatgacagctgcactcatctccaacaagcctgagtttgtgaagctcttcctggagaacggggtgcagctgaaggagtttgtcacctgggacaccttgctctacctgtacgagaacctggacccctcctgcctgttccacagcaagctgcagaaggtgctggtggaggatcccgagcgcccggcttgcgcgcccgcggcgccccgcctgcagatgcaccacgtggcccaggtgctgcgggagctgctgggggacttcacgcagccgctttatccccggccccggcacaacgaccggctgcggctcctgctgcccgttccccacgtcaagctcaacgtgcagggagtgagcctccggtccctctacaagcgttcctcaggccatgtgaccttcaccatggaccccatccgtgaccttctcatttgggccattgtccagaaccgtcgggagctggcaggaatcatctgggctcagagccaggactgcatcgcagcggccttggcctgcagcaagatcctgaaggaactgtccaaggaggaggaggacacggacagctcggaggagatgctggcgctggcggaggagtatgagcacagagccatcggggtcttcaccgagtgctaccggaaggacgaagagagagcccagaaactgctcacccgcgtgtccgaggcctgggggaagaccacctgcctgcagctcgccctggaggccaaggacatgaagtttgtgtctcacgggggcatccaggccttcctgaccaaggtgtggtggggccagctctccgtggacaatgggctgtggcgtgtgaccctgtgcatgctggccttcccgctgctcctcaccggcctcatctccttcagggagaagaggctgcaggatgtgggcacccccgcggcccgcgcccgtgccttcttcaccgcacccgtggtggtcttccacctgaacatcctctcctacttcgccttcctctgcctgttcgcctacgtgctcatggtggacttccagcctgtgccctcctggtgcgagtgtgccatctacctctggctcttctccttggtgtgcgaggagatgcggcagctcttctatgaccctgacgagtgcgggctgatgaagaaggcagccttgtacttcagtgacttctggaataagctggacgtcggcgcaatcttgctcttcgtggcagggctgacctgcaggctcatcccggcgacgctgtaccccgggcgcgtcatcctctctctggacttcatcctgttctgcctccggctcatgcacatttttaccatcagtaagacgctggggcccaagatcatcattgtgaagcggatgatgaaggacgtcttcttcttcctcttcctgctggctgtgtgggtggtgtccttcggggtggccaagcaggccatcctcatccacaacgagcgccgggtggactggctgttccgaggggccgtctaccactcctacctcaccatcttcgggcagatcccgggctacatcgacggtgtgaacttcaacccggagcactgcagccccaatggcaccgacccctacaagcctaagtgccccgagagcgacgcgacgcagcagaggccggccttccctgagtggctgacggtcctcctactctgcctctacctgctcttcaccaacatcctgctgctcaacctcctcatcgccatgttcaactacaccttccagcaggtgcaggagcacacggaccagatttggaagttccagcgccatgacctgatcgaggagtaccacggccgccccgccgcgccgccccccttcatcctcctcagccacctgcagctcttcatcaagagggtggtcctgaagactccggccaagaggcacaagcagctcaagaacaagctggagaagaacgaggaggcggccctgctatcctgggagatctacctgaaggagaactacctccagaaccgacagttccagcaaaagcagcggcccgagcagaagatcgaggacatcagcaataaggttgacgccatggtggacctgctggacctggacccactgaagaggtcgggctccatggagcagaggttggcctccctggaggagcaggtggcccagacagcccaagccctgcactggatcgtgaggacgctgcgggccagcggcttcagctcggaggcggacgtccccactctggcctcccagaaggccgcggaggagccggatgctgagccgggaggcaggaagaagacggaggagccgggcgacagctaccacgtgaatgcccggcacctcctctaccccaactgccctgtcacgcgcttccccgtgcccaacgagaaggtgccctgggagacggagttcctgatctatgacccacccttttacacggcagagaggaaggacgcggccgccatggaccccatgggagacaccctggagccactgtccacgatccagtacaacgtggtggatggcctgagggaccgccggagcttccacgggccgtacacagtgcaggccgggttgcccctgaaccccatgggccgcacaggactgcgtgggcgcgggagcctcagctgcttcggacccaaccacacgctgtaccccatggtcacgcggtggaggcggaacgaggatggagccatctgcaggaagagcataaagaagatgctggaagtgctggtggtgaagctccctctctccgagcactgggccctgcctgggggctcccgggagccaggggagatgctacctcggaagctgaagcggatcctccggcaggagcactggccgtcttttgaaaacttgctgaagtgcggcatggaggtgtacaaaggctacatggatgacccgaggaacacggacaatgcctggatcgagacggtggccgtcagcgtccacttccaggaccagaatgacgtggagctgaacaggctgaactctaacctgcacgcctgcgactcgggggcctccatccgatggcaggtggtggacaggcgcatcccactctatgcgaaccacaagaccctcctccagaaggcagccgctgagttcggggctcactactgactgtgccctcaggctgggcggctccagtccatagacgttccccccagaaaccagggcttctctctcctgagcctggccaggactcaggctgttcctgggccctgcacatgatggggtttggtggacccagtgcccctcacggctgccgcaagtctgctgcagatgacctcatgaactggaaggggtcaaggtgacccgggaggagagctcaagacagggcacaggctactcagagctgaggggcccctgggacccttggccatcaggcgaggggctgggcctgtgcagctgggcccttggccagagtccactcccttcctggctgtgtcaccccgagcagctcatccaccatggaggtcattggcctgaggcaagttccccggagagtcggggtcccctgtggccccctcaggcctatgtctgtgaggaaggggccctgccactctccccaagagggcctccatgtttcgaggtgcctcaacatggagccttgcctggcctgggctaggggcactgtctgaactcctgactgtcaggataaactccgtgggggtacaggagcccagacaaagcccaggcctgtcaagagacgcagagggcccctgccagggttggccccagggaccctgggacgaggctgcagaagctctccctccctactccctgggagccacgtgctggccatgtggccagggacggcatgagcaggaggcggggacgtgggggccttctggtttggtgtcaacagctcacaggagcgtgaaccatgagggccctcaggaggggaacgtggtaaaacccaagacattaaatctgccatctcaggcctggctggctcttctgtgctttccacaaataaagttcctgacacgtccagggccaggggctgtgtgacggctgcctgaagttctcctcgatcccccggtgagcttcctgcagcctgtggatgtcctgcagcccctcagccctacccccaagtttctcctctgacccatcagctccctgtcttcattttcctaaacctgggctccagcatcgtccccaagcccaccaggccaggatgcaggcatccacatgccctcctccttggcttcccctgcgtggtggtgccaatgtgccctggcacccctgcagaggctccggatggagcctggggctgcctggccactgagcactggccgaggtgatgcccacccttccctggacaggcctctgtcttccacctgacccaaagctctctagccacccccttgtccccaggtat

SEQ ID NO: 277287 - DNA, 6221 bp, Artificial Sequence
  derived and/or modified sequence
tgtgcagaattgtacagttgcgaaaccatgtcgctggcagctggtgctggcggtggagacttccctgtgcggtgctcagtgcagctgcacccgtgggggagggagctctttctctggccctgcagtcacctgaggttgttaccattatgaacggccgctgggacccccgcatgtgcatgtactcccccagagtgtccgggggccccagccaagggacacagctcaggcagctgggaacatgtgcaggctgatgaagagaaccggatgagggcttcacatgaggaagcatgtggccaggtcctctcagaacatcagcctcatcttcctgtctctgatctatttcagcaaccaccccatgtgtctctagaaccccagtgtagcgagctggagagaggactgtcctgagggcagcaggcctggttgcagctggcgtgggggtctcagaatggagccctcagccctgaggaaagctggctcggagcaggaggagggctttgaggggctgcccagaagggtcactgacctggggatggtctccaatctccggcgcagcaacagcagcctcttcaagagctggaggctacagtgccccttcggcaacaatgacaagcaagaaagcctcagttcgtggattcctgaaaacatcaagaagaaagaatgcgtgtattttgtggaaagttccaaactgtctgatgctgggaaggtggtgtgtcagtgtggctacacgcatgagcagcacttggaggaggctaccaagccccacaccttccagggcacacagtgggacccaaagaaacatgtccaggagatgccaaccgatgcctttggcgacatcgtcttcacgggcctgagccagaaggtgaaaaagtacgtccgagtctcccaggacacgccctccagcgtgatctaccacctcatgacccagcactgggggctggacgtccccaatctcttgatctcggtgaccgggggggccaagaacttcaacatgaagccgcggctgaagagcattttccgcagaggcctggtcaaggtggctcagaccacaggggcctggatcatcacaggggggtcccacaccggcgtcatgaagcaggtaggcgaggcggtgcgggacttcagcctgagcagcagctacaaggaaggcgagctcatcaccatcggagtcgccacctggggcactgtccaccgccgcgagggcctgatccatcccacgggcagcttccccgccgagtacatactggatgaggatggccaagggaacctgacctgcctagacagcaaccactctcacttcatcctcgtggacgacgggacccacggccagtacggggtggagattcctctgaggaccaggctggagaagttcatatcggagcagaccaaggaaagaggaggtgtggccatcaagatccccatcgtgtgcgtggtgctggagggcggcccgggcacgttgcacaccatcgacaacgccaccaccaacggcaccccctgtgtggttgtggagggctcgggccgcgtggccgacgtcattgcccaggtggccaacctgcctgtctcggacatcactatctccctgatccagcagaaactgagcgtgttcttccaggagatgtttgagaccttcacggaaagcaggattgtcgagtggaccaaaaagatccaagatatcgtccggaggcggcagctgctgactgtcttccgggaaggcaaggatggtcagcaggacgtggatgtggccatcttgcaggccttgctgaaagcctcacggagccaagaccactttggccacgagaactgggaccaccagctgaaactggcagtggcatggaatcgcgtggacattgcccgcagtgagatcttcatggatgagtggcagtggaagccttcagatctgcaccccacgatgacagctgcactcatctccaacaagcctgagtttgtgaagctcttcctggagaacggggtgcagctgaaggagtttgtcacctgggacaccttgctctacctgtacgagaacctggacccctcctgcctgttccacagcaagctgcagaaggtgctggtggaggatcccgagcgcccggcttgcgcgcccgcggcgccccgcctgcagatgcaccacgtggcccaggtgctgcgggagctgctgggggacttcacgcagccgctttatccccggccccggcacaacgaccggctgcggctcctgctgcccgttccccacgtcaagctcaacgtgcagggagtgagcctccggtccctctacaagcgttcctcaggccatgtgaccttcaccatggaccccatccgtgaccttctcatttgggccattgtccagaaccgtcgggagctggcaggaatcatctgggctcagagccaggactgcatcgcagcggccttggcctgcagcaagatcctgaaggaactgtccaaggaggaggaggacacggacagctcggaggagatgctggcgctggcggaggagtatgagcacagagccatcggggtcttcaccgagtgctaccggaaggacgaagagagagcccagaaactgctcacccgcgtgtccgaggcctgggggaagaccacctgcctgcagctcgccctggaggccaaggacatgaagtttgtgtctcacgggggcatccaggccttcctgaccaaggtgtggtggggccagctctccgtggacaatgggctgtggcgtgtgaccctgtgcatgctggccttcccgctgctcctcaccggcctcatctccttcagggagaagaggctgcaggatgtgggcacccccgcggcccgcgcccgtgccttcttcaccgcacccgtggtggtcttccacctgaacatcctctcctacttcgccttcctctgcctgttcgcctacgtgctcatggtggacttccagcctgtgccctcctggtgcgagtgtgccatctacctctggctcttctccttggtgtgcgaggagatgcggcagctcttctatgaccctgacgagtgcgggctgatgaagaaggcagccttgtacttcagtgacttctggaataagctggacgtcggcgcaatcttgctcttcgtggcagggctgacctgcaggctcatcccggcgacgctgtaccccgggcgcgtcatcctctctctggacttcatcctgttctgcctccggctcatgcacatttttaccatcagtaagacgctggggcccaagatcatcattgtgaagcggatgatgaaggacgtcttcttcttcctcttcctgctggctgtgtgggtggtgtccttcggggtggccaagcaggccatcctcatccacaacgagcgccgggtggactggctgttccgaggggccgtctaccactcctacctcaccatcttcgggcagatcccgggctacatcgacggtgtgaacttcaacccggagcactgcagccccaatggcaccgacccctacaagcctaagtgccccgagagcgacgcgacgcagcagaggccggccttccctgagtggctgacggtcctcctactctgcctctacctgctcttcaccaacatcctgctgctcaacctcctcatcgccatgttcaactacaccttccagcaggtgcaggagcacacggaccagatttggaagttccagcgccatgacctgatcgaggagtaccacggccgccccgccgcgccgccccccttcatcctcctcagccacctgcagctcttcatcaagagggtggtcctgaagactccggccaagaggcacaagcagctcaagaacaagctggagaagaacgaggaggcggccctgctatcctgggagatctacctgaaggagaactacctccagaaccgacagttccagcaaaagcagcggcccgagcagaagatcgaggacatcagcaataaggttgacgccatggtggacctgctggacctggacccactgaagaggtcgggctccatggagcagaggttggcctccctggaggagcaggtggcccagacagcccaagccctgcactggatcgtgaggacgctgcgggccagcggcttcagctcggaggcggacgtccccactctggcctcccagaaggccgcggaggagccggatgctgagccgggaggcaggaagaagacggaggagccgggcgacagctaccacgtgaatgcccggcacctcctctaccccaactgccctgtcacgcgcttccccgtgcccaacgagaaggtgccctgggagacggagttcctgatctatgacccacccttttacacggcagagaggaaggacgcggccgccatggaccccatgggagacaccctggagccactgtccacgatccagtacaacgtggtggatggcctgagggaccgccggagcttccacgggccgtacacagtgcaggccgggttgcccctgaaccccatgggccgcacaggactgcgtgggcgcgggagcctcagctgcttcggacccaaccacacgctgtaccccatggtcacgcggtggaggcggaacgaggatggagccatctgcaggaagagcataaagaagatgctggaagtgctggtggtgaagctccctctctccgagcactgggccctgcctgggggctcccgggagccaggggagatgctacctcggaagctgaagcggatcctccggcaggagcactggccgtcttttgaaaacttgctgaagtgcggcatggaggtgtacaaaggctacatggatgacccgaggaacacggacaatgcctggatcgagacggtggccgtcagcgtccacttccaggaccagaatgacgtggagctgaacaggctgaactctaacctgcacgcctgcgactcgggggcctccatccgatggcaggtggtggacaggcgcatcccactctatgcgaaccacaagaccctcctccagaaggcagccgctgagttcggggctcactactgactgtgccctcaggctgggcggctccagtccatagacgttccccccagaaaccagggcttctctctcctgagcctggccaggactcaggctgttcctgggccctgcacatgatggggtttggtggacccagtgcccctcacggctgccgcaagtctgctgcagatgacctcatgaactggaaggggtcaaggtgacccgggaggagagctcaagacagggcacaggctactcagagctgaggggcccctgggacccttggccatcaggcgaggggctgggcctgtgcagctgggcccttggccagagtccactcccttcctggctgtgtcaccccgagcagctcatccaccatggaggtcattggcctgaggcaagttccccggagagtcggggtcccctgtggccccctcaggcctatgtctgtgaggaaggggccctgccactctccccaagagggcctccatgtttcgaggtgcctcaacatggagccttgcctggcctgggctaggggcactgtctgaactcctgactgtcaggataaactccgtgggggtacaggagcccagacaaagcccaggcctgtcaagagacgcagagggcccctgccagggttggccccagggaccctgggacgaggctgcagaagctctccctccctactccctgggagccacgtgctggccatgtggccagggacggcatgagcaggaggcggggacgtgggggccttctggtttggtgtcaacagctcacaggagcgtgaaccatgagggccctcaggaggggaacgtggtaaaacccaagacattaaatctgccatctcaggcctggctggctcttctgtgctttccacaaataaagttcctgacacgtccagggccaggggctgtgtgacggctgcctgaagttctcctcgatcccccggtgagcttcctgcagcctgtggatgtcctgcagcccctcagccctacccccaagtttctcctctgacccatcagctccctgtcttcattttcctaaacctgggctccagcatcgtccccaagcccaccaggccaggatgcaggcatccacatgccctcctccttggcttcccctgcgtggtggtgccaatgtgccctggcacccctgcagaggctccggatggagcctggggctgcctggccactgagcactggccgaggtgatgcccacccttccctggacaggcctctgtcttccacctgacccaaagctctctagccacccccttgtccccaggtat

SEQ ID NO: 277288 - protein, 956 aa, Artificial Sequence
  derived and/or modified sequence
MEDCNVHSAASILASVKEQEARFERLTRALEQERRHVALQLERAQQPGMVSGGMGSGQPLPMAWQQLVLQEQSPGSQASLATMPEAPDVLEETVTVEEDPGTPTSHVSIVTSEDGTTRRTETKVTKTVKTVTTRTVRQVPVGPDGLPLLDGGPPLGPFADGALDRHFLLRGGGPVATLSRAYLSSGGGFPEGPEPRDSPSYGSLSRGLGMRPPRAGPLGPGPGDGCFTLPGHREAFPVGPEPGPPGGRSLPERFQAEPYGLEDDTRSLAADDEGGPELEPDYGTATRRRPECGRGLHTRAYEDTADDGGELADERPAFPMVTAPLAQPERGSMGSLDRLVRRSPSVDSARKEPRWRDPELPEVLAMLRHPVDPVKANAAAYLQHLCFENEGVKRRVRQLRGLPLLVALLDHPRAEVRRRACGALRNLSYGRDTDNKAAIRDCGGVPALVRLLRAARDNEVRELVTGTLWNLSSYEPLKMVIIDHGLQTLTHEVIVPHSGWEREPNEDSKPRDAEWTTVFKNTSGCLRNVSSDGAEARRRLRECEGLVDALLHALQSAVGRKDTDNKSVENCVCIMRNLSYHVHKEVPGADRYQEAEPGPLGSAVGSQRRRRDDASCFGGKKAKGKKDGEMDRNFDTLDLPKRTEAAKGFELLYQPEVVRLYLSLLTESRNFNTLEAAAGALQNLSAGNWMWATYIRATVRKERGLPVLVELLQSETDKVVRAVAIALRNLSLDRRNKDLIGSYAMAELVRNVRNAQAPPRPGACLEEDTVVAVLNTIHEIVSDSLDNARSLLQARGVPALVALVASSQSVREAKAASHVLQTVWSYKELRGTLQKDGWTKARFQSAAATAKGPKGALSPGGFDDSTLPLVDKSLEGEKTGSRDVIPMDALGPDGYSTVDRRERRPRGASSAGEASEKEPLKLDPSRKAPPPGPSRPAVRLVDAVGDAKPQPVDSWV

SEQ ID NO: 277289 - DNA, 2871 bp, Artificial Sequence
  derived and/or modified sequence
atggaagactgcaacgtgcactctgcagcctcaattctagcaagcgtcaaggagcaagaggctagattcgaaaggctgactcgtgcactggagcaggagaggcgccacgtggccctacaactggagcgggctcaacagcccggcatggtgagtggcggcatgggttctgggcagccccttccgatggcgtggcaacagctggtgttacaggaacagagtcctggatctcaggcgtctctggcgactatgcccgaagcaccggatgtgctggaagagacagtgaccgtcgaggaggaccccggtacgcccacttcgcacgtgtctattgtgacatctgaagacggaactaccagaaggaccgagactaaggtgacaaaaaccgtaaagaccgtaacaactagaaccgtgcggcaggtccctgtgggacctgatgggctccctcttttagacggagggcctcccctcggacccttcgcagacggggcattagacagacattttttgttgagaggagggggacctgtggctactctgtcccgagcctacctgagctcaggaggcggatttcccgaggggccggagcctcgggactctccaagctatggttccctttctcggggtttagggatgcgacccccaagggctggccccttagggcccggccctggtgatggttgctttacccttccagggcaccgggaggcattccccgttgggcccgagcccggcccacctggaggccggtccctgcctgagcgtttccaggcagaaccctatggactcgaggatgacacccgcagcctggcagcagatgatgagggagggcctgagttggaacctgactatggcaccgcaacccgacgccgtcccgaatgcggacggggactacacactagggcttacgaggacactgctgacgacgggggagagcttgctgacgaacgacctgccttccctatggtgaccgccccactggctcagcccgagagggggtccatgggcagcttggatagactcgtgcgacgcagcccgtctgtggatagcgcccggaaggagccacgttggcgggatcccgaactccccgaggtcctcgccatgctgagacaccccgttgatcccgtgaaagcgaatgctgcagcatacttacagcacttgtgttttgaaaatgagggagtgaaaaggagagtgagacaattacgtgggctccctcttctcgtggcactgttggaccacccacgagctgaggtgcgtcgcagagcgtgtggggctctccgaaatctgagctatgggcgagataccgataacaaggcggcaatccgagattgtggcggcgtgcccgctctggtgaggctgcttagagccgccagagacaatgaagtgcgagaattagtaaccggtaccctttggaatctctcctcctatgagcccctcaaaatggtaatcatcgaccacggcctccagaccctcacacacgaagttatcgtgcctcacagcggctgggagagagaacccaatgaagactccaaaccacgcgacgcagagtggaccactgtttttaagaatacttcagggtgcttgaggaatgtttcatctgatggggcagaagccaggcgaagattaagagagtgcgaggggcttgtcgacgccttacttcatgcccttcaatcagcggtaggaaggaaagacaccgataataagagcgtggagaactgcgtctgtattatgaggaacttaagctatcacgtgcacaaggaagtccccggtgctgacaggtatcaagaagctgagccggggccactcggatccgcggtgggctcacagaggcgccgcagagacgatgcgtcatgtttcggaggaaagaaggcgaaaggaaagaaagatggggaaatggatagaaactttgatactttggatctccctaagcgtactgaagcagcgaagggttttgagctcctctatcagcctgaggtcgttcggttgtatcttagcttactgactgaatctcgtaacttcaatactcttgaagcagccgctggagctctccagaacttaagtgccggcaactggatgtgggcgacctacattagagctacagtgcggaaggagaggggcctccccgtcttggtggaacttctacagagtgagactgataaggttgttagagcagtggctattgctctgaggaaccttagccttgaccgccggaataaggatcttataggctcctatgcaatggcagagctggtacggaacgtgcgcaacgcgcaggctccgccgcggccaggagcatgtttagaagaggatacagtggttgccgtgcttaatacgatacatgagatcgtgtccgattcactggataacgcgcgctcactgctccaggcccggggtgtgccggctctggtagccctggtcgcttccagccagagtgtgcgagaagccaaagcagccagtcatgtcctgcaaacagtatggtcctacaaagagctgcgcggcactctgcagaaagatggctggactaaggctagattccaatctgcagccgctaccgctaagggaccaaagggcgcactcagccctggcgggtttgacgattctaccttgccccttgttgataagtctctggaaggcgaaaaaaccggctctcgagacgtaatcccaatggatgccctgggcccagatgggtatagtaccgtcgataggcgggagcgacgtcctaggggcgcttcatcagctggcgaagctagtgagaaagaaccactgaagcttgacccttctaggaaagccccacctcctggaccatcgaggccagccgtgcggctcgtggacgctgtcggggacgcgaaaccccaacctgtcgattcttgggtctag

SEQ ID NO: 277290 - DNA, 2871 bp, Artificial Sequence
  derived and/or modified sequence
atggaggactgcaatgtgcacagcgctgccagcatcctggcctctgtgaaggagcaggaggccaggtttgagcggctgacccgggccctggagcaggagcggcggcacgtggccctgcagctggagcgggcccagcagcccggcatggtgtctgggggcatgggcagcggccagcccctgcccatggcctggcagcagctggtgctgcaggagcagagccctggcagccaggccagcctggccaccatgcctgaggccccagatgtgctggaggagaccgtgacagtggaggaggaccccggcacccccaccagccacgtgtccatcgtgaccagtgaagatggcaccaccaggagaacagagaccaaggtgaccaagacagtgaagacagtgaccaccaggacagtgcggcaggtgcctgtgggcccagatggcctgcccctgctggatggcggcccccccctgggcccctttgctgatggagccctggacagacacttcctgctgcggggcggcggccctgtggccaccctgagccgggcctacctgagcagcggcggcggcttccctgagggccctgagccccgggacagccccagctatggcagcctgagccggggcctgggcatgaggcctcccagggctggccccctgggccctggccctggagatggctgcttcaccctgcccggccaccgggaggccttccctgtgggccctgagcccggccccccaggcggccgcagcctgcctgagcgcttccaggccgagccctacggcctggaggatgacaccaggagcctggccgcagatgatgagggcggccctgagctggagccagactatggaacagccacccggcggcggccagaatgtggccggggcctgcacacccgggcctatgaggacacagcagatgatggaggagagctggctgatgagaggcctgccttccccatggtgacagcccccctggcccagcctgagcggggctccatgggcagcctggaccggctggtgagaagaagccccagcgtggacagcgccaggaaggagccccgctggagggaccctgagctgcctgaggtgctggccatgctgcggcaccctgtggaccctgtgaaggccaatgctgctgcctacctgcagcacctgtgctttgaaaatgaaggagtgaagagaagagtgcggcagctgcggggcctgcccctgctggtggccctgctggaccaccccagggctgaggtgagaagaagagcctgtggggccctgaggaacctgtcctatggccgggacacagacaacaaggccgccatccgggactgtggcggcgtgcctgccctggtgcggctgctgcgggccgcccgggacaatgaggtgcgggagctggtgacaggcaccctgtggaacctgagcagctatgagcccctgaagatggtgatcatcgaccacggcctgcagaccctgacccatgaagtcatcgtgccccacagcggctgggagcgggagcccaatgaagacagcaagcccagagatgctgagtggaccaccgtcttcaagaacaccagcggctgcctgagaaatgtgtccagtgatggagctgaggcccggcggcggctgcgggagtgtgagggcctggtggatgccctgctgcacgccctgcagagcgctgtgggcaggaaggacacagacaacaagtctgtggagaactgtgtgtgcatcatgaggaacctgagctaccacgtgcacaaggaggtgcctggagctgaccgctaccaggaggccgagcccggccccctgggcagcgctgtgggcagccagaggagaagaagagatgatgccagctgctttggaggcaagaaggccaagggcaagaaggatggagagatggacaggaactttgacaccctggacctgcccaagaggacagaagctgccaagggctttgagctgctgtaccagcctgaggtggtgcggctgtacctgagcctgctgacagagagcaggaacttcaacaccctggaggccgccgccggggccctgcagaacctgtctgctggcaactggatgtgggccacctacatccgggccaccgtgaggaaggagcggggcctgcctgtgctggtggagctgctgcagagcgagacagacaaggtggtgcgggctgtggccatcgccctgaggaacctgagcctggacagaagaaacaaggacctgattggcagctatgccatggccgagctggtgagaaatgtgagaaatgcccaggccccacccaggcctggggcctgcctggaggaggacacagtggtggccgtgctgaacaccatccacgagatcgtgtctgacagcctggacaatgcccggagcctgctgcaggcccggggcgtgcctgccctggtggccctggtggccagcagccagagcgtgcgggaggccaaggccgccagccacgtgctgcagacagtgtggagctacaaggagctgcggggcaccctgcagaaggatggctggaccaaggcccgcttccagagcgctgctgccacagccaagggccccaagggggccctgagccctgggggctttgatgacagcaccctgcccctggtggacaagagcctggagggggagaagacaggcagcagagatgtgatccccatggatgccctgggcccagatggctacagcacagtggaccggcgggagcggcggcccaggggggccagcagcgctggggaggccagcgagaaggagcccctgaagctggaccccagcaggaaggcccctcctcctggccccagcaggcctgctgtgcggctggtggatgctgtgggagatgccaagccccagcctgtggacagctgggtgtag

SEQ ID NO: 277291 - DNA, 2871 bp, Artificial Sequence
  derived and/or modified sequence
atggaggactgcaacgtgcacagcgccgccagcatcctggccagcgtgaaggaacaggaggctcggtttgaaagactaacacgtgctcttgaacaggagaggagacacgtggcattgcagctggagcgtgcccaacagccgggcatggtctccggagggatgggctcaggtcagccactaccaatggcttggcagcagctcgtactgcaagagcagtcacctggatcacaggcatcccttgcaaccatgcctgaagctcctgacgtacttgaggagactgtaactgtcgaagaggatcctgggactcctacctcacatgtgagtattgttacttccgaggatgggactacacggaggaccgagacgaaagttacaaaaaccgtgaagacagtaaccactcggaccgtcagacaagtgcctgtggggcccgacggtcttccgctgcttgatggcgggccaccacttggaccgttcgccgacggcgcactggaccgtcatttcctgctgcgaggtggaggccctgtggctacgctgtctcgagcttacctttcttccggagggggctttcccgagggtcccgagcctcgggactctccctcctatggctcattgtcgagagggctcggtatgcgtcctccacgcgcgggcccactgggtcccggacctggggatggatgttttacgctccctggacatagagaggccttccccgtcggccccgagcccggccctcccggcgggcggagcctgcccgaacggttccaggcggaaccgtatggcctggaagatgacactcggagcctagccgctgacgatgagggcgggcctgagctggaacccgattatgggacggccactcgaagaaggccagaatgtggtagggggctgcacacacgtgcctacgaggacacagctgacgacggcggagaactcgctgatgaaagacctgcattccccatggtgacagcccccttagctcagcccgagcgcggatccatgggtagcctggaccgcctcgtccggcgatcaccaagcgtagactctgccaggaaggaacctcggtggagggaccctgagctgccagaagtgcttgcgatgttgcggcaccctgttgatcccgtgaaagcaaacgcagccgcttatctacagcacctgtgcttcgaaaacgagggggtcaagaggcgggtgcgccagctgcgaggcttacctctgctagtggcccttctggaccatccccgtgctgaagtccgcaggcgtgcctgtggggctctgcggaatctgtcctacggcagggatacagataataaagcagctatcagagattgcggcggcgtgcctgccctggtccggctgctccgcgccgcccgcgataacgaagtcagggaactggtgacaggcacactttggaacctcagctcctacgaacctttgaaaatggtcatcattgatcatggtctccagacattaacgcacgaagtgattgtccctcattctggctgggaacgggagccaaatgaggactctaaaccaagagatgccgaatggactactgttttcaaaaatacctcaggttgcctccgcaacgtttcatccgacggggctgaagccaggaggcgtctgcgtgagtgtgagggcctcgtggatgctttgctgcacgcactgcagagcgccgtggggaggaaagatacagacaacaaatcagtcgaaaactgtgtgtgtattatgcgcaacctcagctaccacgtgcataaagaagtgccaggagctgacagataccaggaagccgagcccggccccctaggctctgctgtagggtctcagaggaggcgcagagatgatgcaagttgtttcggcggaaaaaaagcaaagggcaaaaaagatggggaaatggaccggaacttcgataccttggatctacccaagaggaccgaggctgcaaagggttttgaattgctctaccagcccgaggtagtgagactttatctttccttgctgaccgaaagtaggaacttcaacactctggaagccgctgctggggccctccagaatctgagtgccggcaattggatgtgggcaacatatatcagggcaaccgtgcgtaaggaacgaggattgccagtgctggtggagctactgcagtctgagaccgacaaggtcgtgcgagcagtagctatagcgttgaggaatctatcccttgatcgccggaacaaagatctaataggctcatacgcaatggccgagttggtgaggaacgtccggaatgcgcaggccccccctcgtccgggtgcatgtctggaggaggataccgtagtggccgttctgaataccatccacgagattgtatctgattccctggataatgccaggtcactcctgcaagccaggggagtgccagccctggtggccctggttgcgtcatcccaaagcgtccgtgaggcaaaagccgctagtcacgttctgcaaactgtttggtcttacaaggaactccgcggcacactccagaaagatggctggaccaaagccagattccagtcagccgcggccaccgccaaaggccccaagggggctctctccccaggtggcttcgatgactccaccctccccctggtggataaatccctggaaggtgaaaagaccggctcgagagacgtgattccaatggacgccctgggtcccgacggttattctacagtcgacaggagagagagacgacctcgaggagcttcaagtgccggtgaggcaagcgaaaaggaacccctcaagctggacccaagtagaaaggctccgccaccgggcccaagccggccagctgtgcgcctcgtcgatgcggtgggggacgctaagcctcagccagtcgactcctgggtgtag

SEQ ID NO: 277292 - DNA, 2871 bp, Artificial Sequence
  derived and/or modified sequence
atggaggactgcaatgtgcattccgcggctagcatacttgcttcagtgaaggagcaagaggcccgatttgagcgcctcacccgcgcactggagcaggaaaggcgccacgtggctctccagttggagagagcccagcaaccgggtatggtgtcaggaggaatggggagcgggcagccactgccaatggcctggcagcagctcgtacttcaggaacagtctcctggctctcaagcatctctggccacgatgcccgaagcgccagacgtgctagaagagaccgtcacagtggaagaagaccctggcacgcccacttctcatgttagcatcgtgacctcagaggacgggaccacccgccgaactgagactaaagttactaaaacagttaaaaccgtgaccacccgcacagtgcggcaagtcccggttggccctgacgggcttcctcttctcgacggtgggcctcctctaggtccgttcgccgatggcgcactggatagacatttcctgttacgcggtggcggtcctgtagccaccctgtcccgtgcatatctttctagtggcggtggcttccccgaaggtccagagcccagagatagcccatcatacggttccctgagccggggactcgggatgaggccccctcgcgctggcccactgggtcctggacctggcgacggatgcttcactctgcccggtcatagagaagcatttccagttggccctgagcccggtccacctggcggacggtcacttcctgaaaggttccaggccgaaccatatgggctggaggacgatactcggagtctggcagctgacgatgaaggtggccctgagctagagccagattatggtaccgcaaccagaagacgaccagagtgcggcagaggcttgcataccagagcctacgaagatactgctgatgatggcggtgagctagccgatgagaggccagcttttcctatggtgacggctccgcttgcccaaccagaaagggggtccatgggctccctggacagacttgtccgacgcagcccctcggtggacagtgcacgcaaagagcccagatggcgggaccccgagctgcctgaggtgcttgccatgctcaggcatccagtggaccctgtgaaagcaaatgccgcagcatacttgcagcatttgtgttttgaaaatgaaggcgtgaagcgcagagtccgccagttgcggggattgccccttttggtggcactattggatcacccacgagctgaagtgagacgaagggcatgcggcgcattgcgcaacctctcctatggacgtgacactgacaataaggctgctatccgagattgtggcggagtcccggctctcgtgcggcttctgcgagctgctcgggacaacgaagtgcgtgaactcgttacaggcacgctctggaatctcagctcctacgagcccctcaagatggtgatcatagaccacggcctgcagactctcactcacgaggtcatcgttccccatagcgggtgggagcgagagccaaatgaagacagcaaacctagggacgcggagtggaccacagtttttaagaacacatccgggtgcttgcgcaacgtctctagtgacggagctgaagcccgacggagactgcgcgaatgcgagggactggtggacgcattgcttcatgctctccaatccgccgtcggaaggaaggataccgacaacaagagcgtcgaaaattgtgtgtgcataatgagaaacttgtcataccacgtgcataaggaggtccccggtgccgacagataccaagaggcggaacccggacccctgggtagtgcggtcggaagccaacgtaggcgacgggacgatgcgtcctgttttggtgggaaaaaagcaaaaggcaagaaagatggtgaaatggaccgcaactttgacacactagacctgcccaagagaaccgaggccgctaaaggctttgaactgctgtatcagccagaggtagttagattatacctcagtctgctcaccgagagcaggaactttaacacactggaagctgccgctggcgctctgcaaaatctttctgctggcaattggatgtgggccacttatatccgggctacagtgagaaaagagcggggactcccggtgctggtcgagctcctgcagagcgagactgataaagtggtgcgggctgtcgcgattgccctgagaaatctgagtttagataggcgaaacaaagatttgattgggtcttacgctatggccgagctggtgaggaacgtccgcaatgctcaggcccctcccaggccaggggcatgtctcgaggaagacactgtcgtggctgtgcttaacacaatccatgagatagtgtctgattctctcgataatgcccgtagcctacttcaggctaggggagtgcccgcactggtggctctcgtggccagctctcagtctgtccgggaggccaaggcagcttcacatgtcttacagaccgtgtggagttacaaagagttgaggggcacactgcagaaggatggctggactaaggcgcgatttcagtccgcagccgctaccgccaagggtcccaagggcgctctctccccaggagggtttgatgacagtaccctgccactggttgataagtctctagagggggagaagactggaagcagagacgtgatccccatggacgctctgggccctgacggctacagtacagtggatcgcagagaacgacgaccgagaggcgctagtagtgcgggtgaagctagcgagaaagagccactgaaattggaccccagtagaaaggctccgcctccaggcccatcacgaccggctgtgaggctggtggacgcagtcggtgacgcaaaacctcaaccagtggactcttgggtgtag

SEQ ID NO: 277293 - DNA, 2871 bp, Artificial Sequence
  derived and/or modified sequence
atggaggactgcaatgtgcactcggccgccagcatcctggcctcggtgaaggagcaggaggcccgcttcgagaggctgacacgggcactggagcaggagcggcgccatgttgccctacagctggagcgtgcccagcagcctggcatggtcagtggtggcatgggcagtgggcagcccctgccaatggcctggcaacagctggtcctccaggagcagagcccaggcagccaggcctcactggccacgatgccggaggcacctgatgtgctggaggagaccgtgacggtggaggaggaccccggcacacccacttcccatgtgtctattgtcacatccgaagatggcacaacccggcgcaccgagaccaaggtcaccaagactgtcaagacggtgaccactcggacagtacgccaggtgcccgtgggcccagatggactccccctgctggatggcggccccccactaggcccttttgcagatggtgccctggaccggcatttcctgctgcgtggtggtggcccagtggccacactctctcgagcctacctcagcagtgggggtggctttcccgaaggccccgagccccgggacagccccagctatggcagcctgtcccgagggctgggcatgcggcccccacgtgctggcccccttggcccaggccctggtgatggctgcttcacactgcctggccaccgggaagccttcccggtgggtcctgagcctgggccaccaggtggccgctccctgcccgagcgcttccaggcagagccgtatggcttggaggatgacacgcgcagcctggccgctgatgacgagggtggccctgagctggagcctgactatggcacggccacaaggaggaggcctgagtgtgggcggggccttcataccagggcctacgaggacacagcagatgatggcggcgagctggcggacgagcggcctgcgttcccaatggtgacggcgcccctggcccagcctgaacggggcagcatgggcagcctggaccggctggtgcggcgctcgccctcagtggatagcgcccgcaaggagccgcgctggcgggaccctgagctgcctgaggtgctggccatgctgcggcaccccgtggaccccgtgaaggccaatgcggccgcctacctgcagcatctgtgctttgagaacgagggtgtcaagcggcgtgtacggcagttgcgggggctgccgctgcttgtggcactgctggaccacccgcgggctgaggtgcggcgccgggcctgtggggcactgcgcaacctctcctatggccgcgacactgacaacaaggccgccatccgggactgcggtggtgtgcctgccctggtgcgcctgctgagggctgcccgggacaacgaggtccgtgagcttgtcactggcaccctgtggaacctgtcatcctatgagcccctgaagatggtcatcattgaccatggcctgcagacgctgacccacgaggtgatcgtgccccactcaggatgggagcgtgagcccaacgaggactccaagccacgggacgccgagtggacaactgtcttcaagaacacgtcgggctgcctgaggaatgtgagctccgatggtgctgaggcccggcggcgactccgggagtgtgaagggctggtggacgcgctcctgcatgccctgcagtcggctgtgggccggaaggacactgacaacaagtcggtggagaactgcgtgtgcatcatgcggaacctgtcctaccacgtgcacaaggaggtgcccggggccgacaggtaccaggaggccgagcccgggcccctgggcagtgctgtaggctcccagcgccggaggcgggatgatgccagctgctttggaggcaagaaggccaaaggaaagaaggatggtgagatggaccggaactttgacacgctagacctgcccaagcgaactgaggccgccaaaggctttgagctgctgtaccagcccgaggtggtacgtctctacctctccctcctcacggagagccggaacttcaacaccctggaggctgccgccggcgctctgcagaacctcagtgccggcaactggatgtgggccacgtacatccgcgccacagtgcgcaaagagcgcgggctgccggtgcttgtggaactgctgcagtctgagaccgacaaggtggtgcgcgccgtcgccatcgctctgcgcaacctctcgctggaccggcgcaacaaagacctcatcgggagctacgccatggctgagcttgtgcggaatgtgcgcaatgcacaggctccgccgcgaccgggggcctgcctggaggaagacaccgtggtggcggtgctcaacaccatccacgaaatcgtgtccgacagcctggataacgcgcgctcgctcctgcaggcacgcggggtgccagcgttggtggctctcgtggcctccagccaatcggtacgcgaagcgaaggcggcgtcacacgtgctgcagacagtgtggagctacaaggagctgcgtggtaccttgcagaaagatggttggaccaaggcgcgcttccagtcagctgctgctactgccaaggggcctaagggagcactgagtcctgggggcttcgatgacagcacgctgccactggtggacaagagccttgagggcgagaaaactggcagccgggatgtgatccccatggatgcgctgggcccagacggatactccacggtggaccggagggagcggaggccacggggcgccagctctgcaggagaggcctctgagaaggaacccttgaaactcgaccccagcaggaaggcccctccccccgggcccagcaggcccgcggtcaggctggtggacgccgtaggggacgctaagcctcagcccgttgattcctgggtctag

SEQ ID NO: 277294 - DNA, 2871 bp, Artificial Sequence
  derived and/or modified sequence
atggaggactgcaacgtgcacagcgccgccagcatcctggccagcgtgaaggagcaggaggccagattcgagagactgaccagagccctggagcaggagagaagacacgtggccctgcagctggagagagcccagcagcccggcatggtgagcggcggcatgggcagcggccagcccctgcccatggcctggcagcagctggtgctgcaggagcagagccccggcagccaggccagcctggccaccatgcccgaggcccccgacgtgctggaggagaccgtgaccgtggaggaggaccccggcacccccaccagccacgtgagcatcgtgaccagcgaggacggcaccaccagaagaaccgagaccaaggtgaccaagaccgtgaagaccgtgaccaccagaaccgtgagacaggtgcccgtgggccccgacggcctgcccctgctggacggcggcccccccctgggccccttcgccgacggcgccctggacagacacttcctgctgagaggcggcggccccgtggccaccctgagcagagcctacctgagcagcggcggcggcttccccgagggccccgagcccagagacagccccagctacggcagcctgagcagaggcctgggcatgagaccccccagagccggccccctgggccccggccccggcgacggctgcttcaccctgcccggccacagagaggccttccccgtgggccccgagcccggcccccccggcggcagaagcctgcccgagagattccaggccgagccctacggcctggaggacgacaccagaagcctggccgccgacgacgagggcggccccgagctggagcccgactacggcaccgccaccagaagaagacccgagtgcggcagaggcctgcacaccagagcctacgaggacaccgccgacgacggcggcgagctggccgacgagagacccgccttccccatggtgaccgcccccctggcccagcccgagagaggcagcatgggcagcctggacagactggtgagaagaagccccagcgtggacagcgccagaaaggagcccagatggagagaccccgagctgcccgaggtgctggccatgctgagacaccccgtggaccccgtgaaggccaacgccgccgcctacctgcagcacctgtgcttcgagaacgagggcgtgaagagaagagtgagacagctgagaggcctgcccctgctggtggccctgctggaccaccccagagccgaggtgagaagaagagcctgcggcgccctgagaaacctgagctacggcagagacaccgacaacaaggccgccatcagagactgcggcggcgtgcccgccctggtgagactgctgagagccgccagagacaacgaggtgagagagctggtgaccggcaccctgtggaacctgagcagctacgagcccctgaagatggtgatcatcgaccacggcctgcagaccctgacccacgaggtgatcgtgccccacagcggctgggagagagagcccaacgaggacagcaagcccagagacgccgagtggaccaccgtgttcaagaacaccagcggctgcctgagaaacgtgagcagcgacggcgccgaggccagaagaagactgagagagtgcgagggcctggtggacgccctgctgcacgccctgcagagcgccgtgggcagaaaggacaccgacaacaagagcgtggagaactgcgtgtgcatcatgagaaacctgagctaccacgtgcacaaggaggtgcccggcgccgacagataccaggaggccgagcccggccccctgggcagcgccgtgggcagccagagaagaagaagagacgacgccagctgcttcggcggcaagaaggccaagggcaagaaggacggcgagatggacagaaacttcgacaccctggacctgcccaagagaaccgaggccgccaagggcttcgagctgctgtaccagcccgaggtggtgagactgtacctgagcctgctgaccgagagcagaaacttcaacaccctggaggccgccgccggcgccctgcagaacctgagcgccggcaactggatgtgggccacctacatcagagccaccgtgagaaaggagagaggcctgcccgtgctggtggagctgctgcagagcgagaccgacaaggtggtgagagccgtggccatcgccctgagaaacctgagcctggacagaagaaacaaggacctgatcggcagctacgccatggccgagctggtgagaaacgtgagaaacgcccaggccccccccagacccggcgcctgcctggaggaggacaccgtggtggccgtgctgaacaccatccacgagatcgtgagcgacagcctggacaacgccagaagcctgctgcaggccagaggcgtgcccgccctggtggccctggtggccagcagccagagcgtgagagaggccaaggccgccagccacgtgctgcagaccgtgtggagctacaaggagctgagaggcaccctgcagaaggacggctggaccaaggccagattccagagcgccgccgccaccgccaagggccccaagggcgccctgagccccggcggcttcgacgacagcaccctgcccctggtggacaagagcctggagggcgagaagaccggcagcagagacgtgatccccatggacgccctgggccccgacggctacagcaccgtggacagaagagagagaagacccagaggcgccagcagcgccggcgaggccagcgagaaggagcccctgaagctggaccccagcagaaaggcccccccccccggccccagcagacccgccgtgagactggtggacgccgtgggcgacgccaagccccagcccgtggacagctgggtgtag

SEQ ID NO: 277295 - protein, 598 aa, Artificial Sequence
  derived and/or modified sequence
MFVSDFRKEFYEVVQSQRVLLFVASDVDALCACKILQALFQCDHVQYTLVPVSGWQELETAFLEHKEQFHYFILINCGANVDLLDILQPDEDTIFFVCDTHRPVNVVNVYNDTQIKLLIKQDDDLEVPAYEDIFRDEEEDEEHSGNDSDGSEPSEKRTRLEEEIVEQTMRRRQRREWEARSGSGSEPVAAALEKSSRLFAGPMSDRTAPRSPRRDILFDYEQYEYHGTSSAMVMFELAWMLSKDLNDMLWWAIVGLTDQWVQDKITQMKYVTDVGVLQRHVSRHNHRNEDEENTLSVDCTRISFEYDLRLVLYQHWSLHDSLCNTSYTAARFKLWSVHGQKRLQEFLADMGLPLKQVKQKFQAMDISLKENLREMIEESANKFGMKDMRVQTFSIHFGFKHKFLASDVVFATMSLMESPEKDGSGTDHFIQALDSLSRSNLDKLYHGLELAKKQLRATQQTIASCLCTNLVISQGPFLYCSLMEGTPDVMLFSRPASLSLLSKHLLKSFVCSTKNRRCKLLPLVMAAPLSMEHGTVTVVGIPPETDSSDRKNFFGRAFEKAAESTSSRMLHNHFDLSVIELKAEDRSKFLDALISLLS

SEQ ID NO: 277296 - protein, 112 aa, Artificial Sequence
  derived and/or modified sequence
MFVSDFRKEFYEVVQSQRVLLFVASDVDALCACKILQALFQCDHVQYTLVPVSGWQELETAFLEHKEQFHYFILINCGANVDLLDILQPDEDTIFFVCDTHRPVNVVNVYND

SEQ ID NO: 277297 - DNA, 1797 bp, Artificial Sequence
  derived and/or modified sequence
atgttcgtgagcgacttcagaaaggagttctacgaggtggtgcagagccagagagtgctgctgttcgtggccagcgacgtggacgccctgtgcgcctgcaagatcctgcaggccctgttccagtgcgaccacgtgcagtacaccctggtgcccgtgagcggctggcaggagctggagaccgccttcctggagcacaaggagcagttccactacttcatcctgatcaactgcggcgccaacgtggacctgctggacatcctgcagcccgacgaggacaccatcttcttcgtgtgcgacacccacagacccgtgaacgtggtgaacgtgtacaacgacacccagatcaagctgctgatcaagcaggacgacgacctggaggtgcccgcctacgaggacatcttcagagacgaggaggaggacgaggagcacagcggcaacgacagcgacggcagcgagcccagcgagaagagaaccagactggaggaggagatcgtggagcagaccatgagaagaagacagagaagagagtgggaggccagaagcggcagcggcagcgagcccgtggccgccgccctggagaagagcagcagactgttcgccggccccatgagcgacagaaccgcccccagaagccccagaagagacatcctgttcgactacgagcagtacgagtaccacggcaccagcagcgccatggtgatgttcgagctggcctggatgctgagcaaggacctgaacgacatgctgtggtgggccatcgtgggcctgaccgaccagtgggtgcaggacaagatcacccagatgaagtacgtgaccgacgtgggcgtgctgcagagacacgtgagcagacacaaccacagaaacgaggacgaggagaacaccctgagcgtggactgcaccagaatcagcttcgagtacgacctgagactggtgctgtaccagcactggagcctgcacgacagcctgtgcaacaccagctacaccgccgccagattcaagctgtggagcgtgcacggccagaagagactgcaggagttcctggccgacatgggcctgcccctgaagcaggtgaagcagaagttccaggccatggacatcagcctgaaggagaacctgagagagatgatcgaggagagcgccaacaagttcggcatgaaggacatgagagtgcagaccttcagcatccacttcggcttcaagcacaagttcctggccagcgacgtggtgttcgccaccatgagcctgatggagagccccgagaaggacggcagcggcaccgaccacttcatccaggccctggacagcctgagcagaagcaacctggacaagctgtaccacggcctggagctggccaagaagcagctgagagccacccagcagaccatcgccagctgcctgtgcaccaacctggtgatcagccagggccccttcctgtactgcagcctgatggagggcacccccgacgtgatgctgttcagcagacccgccagcctgagcctgctgagcaagcacctgctgaagagcttcgtgtgcagcaccaagaacagaagatgcaagctgctgcccctggtgatggccgcccccctgagcatggagcacggcaccgtgaccgtggtgggcatcccccccgagaccgacagcagcgacagaaagaacttcttcggcagagccttcgagaaggccgccgagagcaccagcagcagaatgctgcacaaccacttcgacctgagcgtgatcgagctgaaggccgaggacagaagcaagttcctggacgccctgatcagcctgctgagctag

SEQ ID NO: 277298 - DNA, 1797 bp, Artificial Sequence
  derived and/or modified sequence
atgttcgtgtctgatttcaggaaggaattctatgaagtggtccagtcccagcgggttttacttttcgtggcaagcgacgtggacgcactctgtgcctgtaagatcctgcaagccctcttccagtgtgatcacgtgcagtacaccttggtgccagtgagcggttggcaggaattggagacagcttttcttgaacataaggaacagttccactacttcattctgatcaattgcggggctaacgtggatctactagacattctgcaacctgatgaggatacaatctttttcgtctgcgacacacaccggccagtcaatgttgtcaatgtgtataatgatacccagatcaaactactaatcaagcaagacgacgacttggaggtgccagcttacgaggacatcttcagggacgaggaggaggacgaggaacatagtgggaacgattcagacggcagcgaacccagtgagaagcgaactagactcgaagaggaaattgtggagcagactatgagaaggaggcagaggcgcgagtgggaagcccggagcggctctggctccgaaccagttgccgccgcgctagaaaagagtagtagactgttcgctgggcccatgtctgaccgcaccgcccctaggagtcctcgacgcgacattctgttcgactatgaacagtatgaataccacggaactagcagcgccatggttatgttcgaattagcttggatgctttctaaagaccttaacgatatgctttggtgggccatcgtgggtctgactgaccagtgggttcaggacaaaatcacccaaatgaaatacgtaaccgacgtgggagtgcttcaaaggcacgtaagtcggcataaccacaggaatgaggatgaggagaataccctcagcgtagattgtacaagaatctcgttcgagtatgacctgcgcttagttctgtatcaacactggtcccttcacgatagtttgtgtaacacaagctacaccgctgcgcgtttcaaactctggagtgtgcatgggcagaaaagactgcaggaattcctggctgacatgggattacctctgaaacaggttaaacaaaaatttcaagccatggatatttctctcaaggagaatctgcgcgagatgattgaagaatccgcaaataagtttgggatgaaggatatgagggtacagaccttcagcatacactttggttttaagcacaagttccttgccagtgatgtggtgttcgcaactatgagtctcatggagtcaccggagaaagatggtagcggtaccgatcactttattcaagccctggactctttaagcagaagcaacctggataagctgtaccatggactggaattggcgaagaagcaattgcgggccacccaacagaccatcgcttcatgtttatgtacaaatctcgttatatctcagggtccttttctgtactgtagcttaatggaggggacgcctgacgtgatgctgttcagccgacccgccagtctgtctctattgtcaaagcacctcctgaagagttttgtgtgcagcaccaagaatagacgctgtaagctgctacctctagtgatggccgctcccctgagtatggaacacggaaccgtaaccgttgtgggcatcccccccgaaactgatagctctgatcgcaagaacttctttggtagggcctttgagaaggctgccgagagcacctccagcagaatgttacacaaccattttgacctgtccgtgatcgaactaaaggcagaagacaggagcaagtttctcgacgccctgatcagtctgttgagttag

SEQ ID NO: 277299 - DNA, 1797 bp, Artificial Sequence
  derived and/or modified sequence
atgtttgtgtctgacttcaggaaggagttctatgaggtggtgcagagccagagggtgctgctgtttgtggccagtgatgtggatgccctgtgtgcctgcaagatcctgcaggccctcttccagtgtgaccacgtgcagtacaccctggtgcctgtgtctggctggcaggagctggagacagccttcctggagcacaaggagcagttccactacttcatcctgatcaactgtggggccaacgtggacctgctggacatcctgcagccagatgaggacaccatcttctttgtgtgtgacacccacaggcctgtgaatgtggtgaatgtgtacaatgacacccagatcaagctgctgatcaagcaggatgatgacctggaggtgcctgcctatgaggacatcttcagagatgaggaggaggatgaggagcacagcggaaatgacagtgatggcagcgagcccagcgagaagaggacccggctggaggaggagatcgtggagcagaccatgagaagacggcagaggcgggagtgggaggcccggagcggcagcggcagcgagcctgtggccgccgccctggagaagagcagccggctgtttgctggccccatgtctgacagaacagcccccaggagcccccggcgggacatcctgtttgattatgagcagtatgagtaccacggcaccagcagcgccatggtgatgtttgagctggcctggatgctgagcaaggacctgaatgacatgctgtggtgggccatcgtgggcctgacagaccagtgggtgcaggacaagatcacccagatgaagtatgtgacagatgtgggcgtgctgcagagacatgtgagccgccacaaccacagaaatgaagatgaggagaacaccctgtctgtggactgcacccgcatcagctttgaatatgacctgcggctggtgctgtaccagcactggagcctgcatgacagcctgtgcaacaccagctacacagctgcccgcttcaagctgtggagcgtgcacggccagaagaggctgcaggagttcctggccgacatgggcctgcccctgaagcaggtgaagcagaagttccaggccatggacatcagcctgaaggagaacctgcgggagatgattgaggagagcgccaacaagtttggcatgaaggacatgagggtgcagaccttcagcatccacttcggcttcaagcacaagttcctggccagtgatgtggtgtttgccaccatgagcctgatggagagccctgagaaggatggcagcggcacagaccacttcatccaggccctggacagcctgagccgcagcaacctggacaagctgtaccacggcctggagctggccaagaagcagctgcgggccacccagcagaccatcgccagctgcctgtgcaccaacctggtgatcagccagggccccttcctgtactgcagcctgatggagggcaccccagatgtgatgctgttcagcaggcctgccagcctgagcctgctgagcaagcacctgctgaagagctttgtgtgcagcaccaagaacagacgctgcaagctgctgcccctggtgatggccgcccccctgtccatggagcacggcaccgtgacagtggtgggcatccccccagagacagacagcagtgacaggaagaacttcttcggccgggcctttgagaaggctgctgagagcaccagcagcaggatgctgcacaaccactttgacctgtctgtgattgagctgaaggccgaggacaggagcaagttcctggatgccctgatcagcctgctgtcctag

SEQ ID NO: 277300 - DNA, 1797 bp, Artificial Sequence
  derived and/or modified sequence
atgttcgtgagcgacttccggaaggagttctacgaggtggtgcagagccaaagagtccttctgttcgtcgcctccgacgtggatgcgttatgcgcctgcaaaattttacaggcattgttccaatgtgaccatgtgcagtacacactcgtgccagtgtcaggatggcaggagctggagaccgccttcctggagcataaggagcaatttcattattttatactcatcaattgtggagccaacgttgaccttctggacattcttcaaccagacgaggacacaatctttttcgtctgcgacactcatagacctgtcaatgttgtgaacgtgtacaacgatactcagattaaactgctcatcaaacaggacgacgatttggaggtgccagcttacgaggatatcttcagagatgaggaggaagacgaagagcactccgggaacgattctgatggaagcgagcccagtgagaaacgtacacgcctggaggaagagatcgtcgaacagaccatgcgccgacgacaacgcagggagtgggaggcccggtccgggtccggaagcgaacctgtggctgcggctctggagaaatctagcaggttgtttgccgggccaatgtctgacagaacagccccgaggagtccaagacgtgacatcctgttcgactatgaacagtacgaataccatggcacttcaagcgctatggtaatgttcgagttggcgtggatgttgagtaaggacctcaatgacatgctctggtgggccattgtcggtctcaccgaccagtgggtgcaggataagatcactcagatgaagtatgttactgacgtgggagtgttgcaacggcacgtgtcaagacacaaccaccggaatgaagatgaagagaacaccctgagcgtcgattgcacacgcatcagcttcgaatatgacctgcgtttggtactgtatcagcattggagcctgcatgactccttgtgtaacacgtcctacacagccgccagatttaaactgtggtcagtgcacggccagaagcggctccaggaatttctggccgacatgggccttccactaaagcaagttaaacaaaagttccaggccatggacatttccctcaaagagaatctcagggagatgatcgaggaaagcgccaacaagtttggtatgaaggacatgcgagtgcagactttctccattcattttggttttaagcacaaattcctggcttcagatgttgtgttcgctacaatgagtctgatggaaagccccgagaaagacggcagcggcaccgatcatttcattcaggccttggactccctgagtcgttcaaatctcgataaactgtaccatggactggagctggctaaaaagcagctgcgcgcaacacagcagacgatcgcttcttgcctgtgtactaacttagtcataagtcagggcccatttttgtactgcagcctgatggaaggaacccctgatgttatgttgttctcccggcccgcatccctgtcgctcctgagcaagcatctccttaaatcttttgtatgcagcaccaaaaacaggagatgcaagttgttacccttggtgatggctgcgccgctgagcatggagcatggtaccgttactgtcgtgggtattccaccagaaactgattcatcagatcggaaaaactttttcgggcgcgcctttgagaaagccgcggagagcacctcttcacgaatgttacacaaccattttgatctatcggttatcgagctgaaggcagaggataggagcaagttcctggacgccttgattagccttctaagctag

SEQ ID NO: 277301 - DNA, 1797 bp, Artificial Sequence
  derived and/or modified sequence
atgtttgtctccgacttccgcaaggagttctacgaggtggtgcagtctcagcgtgttctgttgtttgtggcgtctgatgttgatgccctgtgcgcttgcaagattctacaagccttatttcaatgtgatcacgtccagtacacactggtcccagtctcaggctggcaagagctggagactgcattcctcgaacacaaggaacagttccactatttcatacttattaattgcggggcaaacgtcgacctccttgatatcctacagcccgatgaggacacaatctttttcgtctgtgatactcacagacctgtgaatgttgtgaacgtctataatgatacacagattaaactcctgatcaaacaagacgatgaccttgaagtcccagcctacgaggacattttccgggatgaggaggaggatgaggagcatagcggcaatgactcagatggttcggagccatctgagaagcgaacccggctggaggaggaaattgtcgaacagactatgcgccgacgtcagaggcgagaatgggaagccagatccgggtctggatctgaaccagtggcagcagcactggagaagtcctccagacttttcgcaggaccaatgagcgatcgaacagctccaaggtcaccacgcagggatatcctattcgactatgaacagtacgagtatcacggtacctcatccgccatggttatgtttgagctggcatggatgctgtccaaggatctgaacgacatgctgtggtgggccattgtcggattaactgaccagtgggtccaggacaagataacccagatgaaatatgtcaccgacgttggagtcctccagagacatgtctccagacacaaccaccgtaacgaggatgaagaaaatacattgtctgtggattgtacccggatctcctttgagtacgacttgcggttggtcctctatcagcattggtctcttcacgattcactgtgcaacacgtcttacaccgccgctagatttaaattgtggtccgtccatgggcagaagcgcctgcaagaatttctggctgacatgggattaccactgaaacaagtgaaacaaaagttccaggccatggacatctccctgaaagagaacttgcgcgagatgattgaagagagtgccaacaagtttgggatgaaagatatgagggtccaaactttcagcattcatttcgggtttaaacataaattcctagcttcagatgtggtgtttgcaacaatgtcactgatggagagtcccgagaaggatgggtcaggcaccgatcattttatacaggcgctcgacagcctttccagaagcaacctggataaactataccatggacttgagctcgctaagaagcagttgcgggcaactcaacaaaccatagcctcatgcttatgcacgaatttggtcatatcccaggggccttttttgtattgtagtcttatggaaggtacaccagacgtaatgctgttctcccgacccgctagtctcagccttctctcaaagcacctcctaaaaagctttgtctgtagcactaaaaacagaagatgtaagctgctcccactcgttatggcagcccctctcagtatggagcatggcacggtgacagtagtgggtattcctcccgagacagacagctcagatcggaagaacttttttggcagggcttttgaaaaagccgctgagtccacatcctcacgaatgctgcacaaccactttgatctgagcgtgattgagttgaaggcagaggacagatccaagtttttggatgccctgatctctctgttgtcttag

SEQ ID NO: 277302 - DNA, 2007 bp, Artificial Sequence
  derived and/or modified sequence
gtgatttggcgggagtcttgaccgccgccgggctcttggtacctcagcgcgagcgccaggcgtccggccgccgtggctatgttcgtgtccgatttccgcaaagagttctacgaggtggtccagagccagagggtccttctcttcgtggcctcggacgtggatgctctgtgtgcgtgcaagatccttcaggccttgttccagtgtgaccacgtgcaatatacgctggttccagtttctgggtggcaagaacttgaaactgcatttcttgagcataaagaacagtttcattattttattctcataaactgtggagctaatgtagacctattggatattcttcaacctgatgaagacactatattctttgtgtgtgacacccataggccagtcaatgtcgtcaatgtatacaacgatacccagatcaaattactcattaaacaagatgatgaccttgaagttcccgcctatgaagacatcttcagggatgaagaggaggatgaagagcattcaggaaatgacagtgatgggtcagagccttctgagaagcgcacacggttagaagaggagatagtggagcaaaccatgcggaggaggcagcggcgagagtgggaggcccggagtggctctgggagtgaacctgtggccgctgcattggagaagagctccaggttgttcgccggtcccatgagtgacaggacagccccaaggtctcccagaagagacatcctctttgactacgagcagtatgaatatcatgggacatcgtcagccatggtgatgtttgagctggcttggatgctgtccaaggacctgaatgacatgctgtggtgggccatcgttggactaacagaccagtgggtgcaagacaagatcactcaaatgaaatacgtgactgatgttggtgtcctgcagcgccacgtttcccgccacaaccaccggaacgaggatgaggagaacacactctccgtggactgcacacggatctcctttgagtatgacctccgcctggtgctctaccagcactggtccctccatgacagcctgtgcaacaccagctataccgcagccaggttcaagctgtggtctgtgcatggacagaagcggctccaggagttccttgcagacatgggtcttcccctgaagcaggtgaagcagaagttccaggccatggacatctccttgaaggagaatttgcgggaaatgattgaagagtctgcaaataaatttgggatgaaggacatgcgcgtgcagactttcagcattcattttgggttcaagcacaagtttctggccagcgacgtggtctttgccaccatgtctttgatggagagccccgagaaggatggctcagggacagatcacttcatccaggctctggacagcctctccaggagtaacctggacaagctgtaccatggcctggaactcgccaagaagcagctgcgagccacccagcagaccattgccagctgcctttgcaccaacctcgtcatctcccaggggcctttcctgtactgctctctcatggagggcactccagatgtcatgctgttctctaggccggcatccctaagcctgctcagcaaacacctgctcaagtcctttgtgtgttcgacaaagaaccggcgctgcaaactgctgcccctggtgatggctgcccccctgagcatggagcatggcacagtgaccgtggtgggcatccccccagagaccgacagctcggacaggaagaacttttttgggagggcgtttgagaaggcagcggaaagcaccagctcccggatgctgcacaaccattttgacctctcagtaattgagctgaaagctgaggatcggagcaagtttctggacgcacttatttccctcctgtcctaggaatttgattcttccagaatgaccttcttatttatgtaactggctttcatttagattgtaagttatggacatgatttgagatgtagaagccattttttattaaataaaatgcttattttaggctccgtcccc

SEQ ID NO: 277303 - DNA, 1323 bp, Artificial Sequence
  derived and/or modified sequence
atggcttctgaagaggtgctaaagaacagagccatcaagaaggccaagcgccggaacgtgggcttcgaatctgacacaggcggagcttttaaaggcttcaaaggtctcgttgtcccctcgggcggagggagattttctgggttcggttctggcgcaggagggaagccgcttgagggactctccaacggaaacaacattaccagcgcaccacccttcgccagcgcgaaagccgcagctgacccaaaagtggcattcggctcactggccgcaaacggtcctaccacgttagtggataaagtctctaaccccaagactaacggggattctcagcagccttcaagttccgggcttgccagtagtaaggcctgcgttggcaacgcgtaccataaacagttagcggccctgaattgctctgtgagagactggatcgtgaaacatgtgaatactaacccgctttgcgacctgactcccatcttcaaggattacgagaagtatctcgctaatatcgaacagcagcatggcaatagcggacggaatagcgaaagtgagtcaaacaaagttgctgctgagacgcagtctccatccctgtttggatcgacaaaactgcagcaggagtcaacattcctctttcacggcaacaagacagaggataccccagataaaaagatggaggtggcttccgagaagaaaactgaccctagctccttgggcgcaacctccgccagctttaacttcgggaagaaggtagactcttccgtcctggggtccttgagtagtgtgcctctgactggattcagtttcagccccggaaacagtagcctttttggcaaagatactacacaatcaaagcctgtgagctcacccttccccactaagcctctcgagggtcaagcggaaggagactcaggcgagtgcaaagggggagatgaggaggagaatgacgagcccccaaaagtggtggtaaccgaggtcaaagaggaggatgccttctatagcaaaaagtgcaaactgttttacaagaaggacaatgagtttaaggagaaaggaattggtacactgcatctcaaaccaacggccaaccagaaaacgcagctgctggtgcgcgccgacaccaacctgggaaatattctactcaatgtgcttatccctccaaatatgccctgtacgaggaccggtaaaaataatgtattgatagtttgcgttcccaatcccccaattgacgagaaaaacgcgaccatgcccgtcactatgcttatcagagtgaagaccagcgaggatgccgacgaacttcacaagatacttctggaaaagaaagacgcatag

SEQ ID NO: 277304 - DNA, 1323 bp, Artificial Sequence
  derived and/or modified sequence
atggcctctgaggaggtgctgaagaacagagccatcaaaaaggctaagcgcagaaacgtcgggtttgaatccgacacagggggggccttcaaaggctttaagggactggttgtgccatctggaggcggtcgttttagcggcttcgggagcggcgctgggggtaagcccttggaaggcctttcaaatggaaacaacatcaccagcgctccaccctttgcgtccgccaaagcggcggctgatcccaaagtggcctttggcagcctggctgcaaacggacccacaacgctcgtggataaagtgagtaacccaaagactaacggggactcacaacaaccgtcgagtagcggacttgctagcagtaaggcatgcgttggcaatgcctaccacaaacagttggctgctctgaactgcagcgtgagagattggattgtaaagcatgtgaacacaaatcctctttgtgacttaactcctattttcaaggactacgagaagtaccttgccaatattgaacagcagcacgggaacagtggcaggaatagcgaatccgaatctaataaagtggccgctgaaacccagagccccagtctatttggcagcactaaacttcagcaagagagtacattcctgtttcatggcaacaagaccgaggatacccccgataaaaaaatggaagtagcctcagaaaaaaaaaccgatccgagttcactcggagcaacctcagcatcctttaactttggtaaaaaagtggattctagcgtgcttggttcactgagttctgtccccctgaccggcttttctttcagccctggcaacagctccttattcggtaaggacactacccaatctaaaccagtcagcagccccttcccaaccaagcctctggaggggcaggccgagggagatagtggggaatgtaaaggaggggacgaggaggagaacgacgaacctcccaaagtggtggtgactgaagtgaaagaagaggatgcattctattctaagaagtgcaaactgttttacaaaaaagacaacgagttcaaggagaaaggcattgggactctgcatctgaagccaaccgcaaaccagaagactcagctgctggtgagggccgacacgaatcttggaaatatcctactgaacgtgctgatcccacccaatatgccgtgcacaaggacaggaaaaaacaacgtgctcatcgtttgcgtccccaaccctcctattgacgaaaagaacgccactatgcccgtgacgatgttgattcgcgtgaaaacgtctgaggatgctgacgaactgcataaaatcctgctggaaaagaaggatgcatag

SEQ ID NO: 277305 - DNA, 657 bp, Artificial Sequence
  derived and/or modified sequence
atggaagtagcgtccgaaaagaagactgatccctcttcattaggtgccaccagtgcatcctttaacttcggcaagaaagtggattctagtgttctcggatcgctgtctagtgtccctctgacaggcttctcttttagtccagggaatagcagcttgtttgggaaagacaccactcagagtaaaccagtatcaagccccttccccacgaaacccttggagggacaggccgaaggggactcaggggaatgtaaggggggcgacgaggaagaaaacgacgagccaccaaaggtagtcgtgaccgaagttaaagaagaggatgcattttatagtaaaaagtgtaagcttttttacaaaaaagacaacgaattcaaagagaaaggcattgggaccctccacctgaagcctactgcaaaccagaagacccagctgttggtccgcgcggacacaaatcttggcaatatcctcctcaatgtgctgatcccccctaatatgccttgtacccgaaccgggaaaaataacgtgctcatcgtgtgcgttccgaatcctccgattgacgagaagaatgccactatgcctgtgaccatgcttatccgtgtgaaaaccagcgaagatgccgatgaactgcacaagattcttctcgagaagaaggatgcttag

SEQ ID NO: 277306 - DNA, 1323 bp, Artificial Sequence
  derived and/or modified sequence
atggccagcgaggaggtgctgaagaacagagccatcaagaaggccaagagaagaaatgtgggctttgaaagtgacaccggcggggccttcaagggcttcaagggcctggtggtgcccagcggcggcggccgcttcagcggcttcggcagcggggccggcggcaagcccctggagggcctgagcaatggaaacaacatcaccagcgcccccccatttgccagcgccaaggctgctgctgaccccaaggtggccttcggcagcctggccgccaacggccccaccaccctggtggacaaggtgagcaaccccaagaccaacggggacagccagcagcccagcagcagcggcctggccagcagcaaggcctgtgtgggcaatgcctaccacaagcagctggccgccctgaactgcagcgtgcgggactggatcgtgaagcacgtgaacaccaaccccctgtgtgacctgacccccatcttcaaggactatgagaagtacctggccaacatcgagcagcagcacggcaacagcggcaggaacagcgagagcgagagcaacaaggtggccgctgagacccagagccccagcctgtttggcagcaccaagctgcagcaggagagcaccttcctgttccacggcaacaagacagaggacaccccagacaagaagatggaggtggccagcgagaagaagacagaccccagcagcctgggcgccaccagcgccagcttcaactttgggaagaaggtggacagctctgtgctgggcagcctgagctctgtgcccctgaccggcttctccttcagccctggcaacagcagcctgtttgggaaggacaccacccagagcaagcctgtgagcagccccttccccaccaagcccctggagggccaggccgagggggacagcggggagtgcaagggaggagatgaggaggagaatgatgagccccccaaggtggtggtgacagaggtgaaggaggaggatgccttctacagcaagaagtgcaagctgttctacaagaaggacaatgagttcaaggagaagggcatcggcaccctgcacctgaagcccacagccaaccagaagacccagctgctggtgcgggctgacaccaacctgggcaacatcctgctgaatgtgctgatcccccccaacatgccctgcaccaggacaggcaagaacaacgtgctgattgtgtgtgtgcccaacccccccattgatgagaagaatgccaccatgcctgtgaccatgctgatccgggtgaagaccagtgaagatgctgatgagctgcacaagatcctgctggagaagaaggatgcctag

SEQ ID NO: 277307 - DNA, 657 bp, Artificial Sequence
  derived and/or modified sequence
atggaggtggccagcgagaagaagacagaccccagcagcctgggcgccaccagcgccagcttcaactttgggaagaaggtggacagctctgtgctgggcagcctgagctctgtgcccctgaccggcttctccttcagccctggcaacagcagcctgtttgggaaggacaccacccagagcaagcctgtgagcagccccttccccaccaagcccctggagggccaggccgagggggacagcggggagtgcaagggaggagatgaggaggagaatgatgagccccccaaggtggtggtgacagaggtgaaggaggaggatgccttctacagcaagaagtgcaagctgttctacaagaaggacaatgagttcaaggagaagggcatcggcaccctgcacctgaagcccacagccaaccagaagacccagctgctggtgcgggctgacaccaacctgggcaacatcctgctgaatgtgctgatcccccccaacatgccctgcaccaggacaggcaagaacaacgtgctgattgtgtgtgtgcccaacccccccattgatgagaagaatgccaccatgcctgtgaccatgctgatccgggtgaagaccagtgaagatgctgatgagctgcacaagatcctgctggagaagaaggatgcctag

SEQ ID NO: 277308 - DNA, 1323 bp, Artificial Sequence
  derived and/or modified sequence
atggccagcgaggaggtgctgaagaaccgggccatcaagaaggccaagcgccgtaatgtgggctttgagagcgataccgggggtgccttcaagggttttaagggactcgtggtaccctctggtggcggcaggttttctggttttgggagtggcgctgggggtaagccactggagggcctgtcaaacggaaacaatataacctcagccccacccttcgcaagcgccaaggctgcagcggatcccaaagttgcgttcgggtcactggctgccaatgggccgacgacgctcgtagacaaagtgtcgaatccaaaaactaatggggatagtcagcagccaagcagctcaggcttggccagctcaaaagcttgcgttggcaacgcttaccacaaacagctagcagctctgaattgttccgttcgagactggattgtgaaacacgttaacactaaccccttgtgcgacttgaccccaatttttaaggattacgagaagtatctcgctaatatcgagcaacagcacgggaatagtggcagaaacagcgagagtgagtctaacaaggtggctgcggagactcagagccctagcttatttggatccacaaagctccagcaggaatccactttcctcttccatggtaataagactgaagatacccctgataaaaagatggaagtggcttcagagaaaaaaacagaccccagctctctgggcgccactagcgcaagtttcaattttggaaaaaaggtggatagtagcgtgctggggagcttgtcttccgtgcctcttactggctttagcttctctcccggtaactcttctttgttcggaaaggataccacgcagtccaaacctgtgtcttccccgtttccgactaagcccctcgaagggcaggcggaaggcgacagtggtgaatgcaaaggaggagatgaagaagagaatgacgaacctccaaaggtggttgtgactgaggtaaaggaggaggacgccttctattccaagaagtgtaagctcttctataagaaagataacgaattcaaagagaagggtattggcaccctgcacctgaaaccaacggcaaaccaaaaaacccagttacttgtgcgagccgacacaaatcttggaaacatactgttgaatgtcttgataccccctaatatgccgtgcacacgcaccggtaagaacaacgttctgatcgtgtgtgtgcccaacccgccaattgacgagaaaaacgctaccatgccggtgaccatgttaatcagagttaaaacaagcgaggacgccgacgagctgcataagattttacttgaaaaaaaggacgcctag

SEQ ID NO: 277309 - DNA, 1323 bp, Artificial Sequence
  derived and/or modified sequence
atggccagcgaggaggtgctgaagaaccgggccatcaagaaggccaagagacgtaacgtggggttcgagagcgacaccggcggcgcattcaaaggatttaagggccttgttgtgcccagtggaggcgggcgcttttccggctttggaagcggtgccgggggcaagcctttagagggactgtctaatgggaacaatataacctctgctccaccattcgcgagcgctaaggccgcagctgaccccaaggtggcctttgggagtctggcggctaatggtcccaccacattggtcgacaaggtatctaacccaaagacgaatggggacagccagcagcctagctctagtggcttggcatcaagcaaggcatgtgtgggtaacgcctaccacaagcaattggcagccttaaactgcagtgtgcgagattggatcgtgaagcatgtgaacaccaaccccctgtgcgatctgacccctatctttaaagattatgagaagtacctggctaacattgaacagcagcatggaaactctggccgtaactcagaatccgagagcaataaggttgcagccgaaactcagtccccatctctgttcggcagcacaaaattacaacaggaatcaacattccttttccatggtaacaagaccgaagacacgcctgataagaagatggaggtggcaagcgaaaagaagaccgacccctctagccttggcgccacatcagcaagctttaactttggcaagaaggtggactcctctgtgctaggctcactctcctctgttccattgactggattctccttctccccaggcaattcatccctcttcggcaaagacaccacacaaagtaaacctgtttcttccccattccctaccaaacccctggagggccaagccgagggtgactccggggagtgcaaaggcggagatgaggaggagaatgatgagcccccaaaggtggtggtcacagaagtgaaggaggaagacgctttttactctaaaaaatgtaagctcttttacaaaaaggataatgaattcaaggagaaaggcattggcaccctgcatctgaagcctaccgccaaccagaagacccagcttcttgttcgggctgacaccaaccttggcaacatcctgctgaacgtcttgattccacctaatatgccttgcaccaggacaggaaagaataatgtactgattgtatgcgtgcccaacccacccattgacgagaaaaacgccaccatgcctgtcactatgctcatccgagttaagacaagtgaggacgctgatgagttgcataaaatccttcttgagaagaaggacgcatag

SEQ ID NO: 277310 - DNA, 657 bp, Artificial Sequence
  derived and/or modified sequence
atggaggtggccagcgagaagaagaccgaccccagcagcctgggcgcaacgtcagcatcatttaattttgggaagaaggtggattctagtgtgctggggagcctgtcgagtgtgccactgaccggcttctccttttccccaggaaattcttccctgttcggcaaagatactacccagagcaaaccagtgtcgtccccattcccaacaaaacccttagagggccaggccgaaggggatagcggagagtgcaaggggggcgacgaggaggaaaacgatgaaccccccaaggtcgttgtgaccgaggtgaaggaggaggacgccttttatagtaagaagtgtaagttattctataagaaagataatgaattcaaggaaaaagggatcggcaccctacacttaaaacctaccgccaaccaaaaaacacaattactggtcagggccgacaccaatctgggcaacatcctgttgaacgtcctgatccctccaaatatgccttgcacacggactggaaagaacaatgttttgatcgtatgtgttcctaatccccctatcgacgagaagaatgccactatgcctgttactatgctgatccgagtgaaaaccagcgaggatgcagatgagcttcataagatcctccttgagaaaaaggatgcatag

SEQ ID NO: 277311 - DNA, 2030 bp, Artificial Sequence
  derived and/or modified sequence
attcgagttacaaaatggccgcccggagcgtgttcggcgcggttcccccagctgtctctggctgaaccggcgctctcgcctccctgccgaacacagcgtgaggagcccccccagggatatggtgtttgagtctctgggcttgccgagcactaagtcctctgagttccgcagcgcagcaccggaagcggccgagcgcgctcagcccggcgacccctgcgggctccagacccctgcgccgctgcgccccgggtttcgccgcaaccaagacccagcgagtgcagcggcggccgccgaggaggttcgaaaacatggccaaaagaaatgccgagaaggaactgacagataggaattgggatcaagaagatgaagctgaagaggtgggaacattctccatggccagtgaggaagtcttgaagaatagagccataaagaaagcaaagcgcagaaatgttggatttgaagttctcttgctgcaaatggccctaccaccttggttgataaagtttcaaatcccaaaactaatggggacagtcagcagccctcctcctctggccttgcttccagtaaagcttgtgtcggaaatgcctatcacaagcagttggccgccttgaactgctccgtgcgggattggatagtgaagcacgtgaatacaaaccccctctgtgatctgacacctatctttaaagactatgagaaatatttagcaaacattgaacagcaacacgggaacagtggcaggaattctgaaagtgaatctaacaaagtggcagctgaaacacagtctccttccctttttggctcaacaaaattacagcaagagtcaacgtttttgtttcatggcaacaaaactgaagatacacctgacaagaagatggaggtggcatctgaaaagaaaacggacccatcatcactaggagcgacaagtgcctcatttaatttcggcaagaaagttgatagctctgttttgggctcattaagctctgtccccctgactggattttctttctcccctggaaactccagtttatttggcaaagatactacccagagtaaaccagtctcttcaccatttcccactaaaccattggagggccaagcagaaggtgacagtggtgaatgcaaaggtggagatgaagaagagaatgatgagccacccaaagtagtagttaccgaagtaaaagaagaagatgctttttactccaaaaagtgtaaactgttttacaagaaagacaatgagtttaaagagaaaggcataggtactctgcatttaaaacctacagcaaatcagaagacacagcttttggtgcgggcagacaccaatttaggcaacatattgctgaacgttctgattccacccaatatgccatgtacgcgaacagggaagaataacgttcttatcgtctgtgttccaaatccaccaattgacgagaagaatgccaccatgccagtcaccatgttgattcgggtaaaaaccagcgaggatgcagacgagttgcacaaaattttactggagaaaaaggatgcctgaacacgcaaagtcggctgcagaattattgccaagttgctgctgcttccaccgccccttaaagttagtcagtttttcttctcttctttgacattctaagaacttatagataacttaaaacttttgtgaggaagattaatgtggccaataaaacctttaaatgttaagtgtcaagaaactgcactctcccttcttaagaactgcctaaagtgtaaaatacatttgaatgcaatttttggaagattttttaatgttcgtttattaaactaaccctaagtgatttcttcaaggactgcaatcagggtatcaatttgctttcccaaaggctcttccaacccgtgggttttggggtccaccgccaccacgagagaggcttttgaacaggtgcctggctgtgttcagaaggaagctggcctgtgtgcttctctccggtgggctcagccgacgtgtgagacttgttctgttaccaaatgaaccgggctgccacgctgtgacaggcgtttgt

SEQ ID NO: 277312 - DNA, 1323 bp, Artificial Sequence
  derived and/or modified sequence
atggccagcgaagaagtgttaaaaaacagggccattaagaaagcgaaacggaggaatgtggggtttgagtcagataccggcggtgccttcaaagggttcaaagggctagtggtacctagcgggggaggcaggttctctggattcggctccggtgccggaggcaagccccttgaagggcttagcaacgggaacaacataacatccgcgccaccctttgcaagcgcaaaagcggcagccgatcccaaggtggcatttggatcgcttgccgcaaatgggcctacgactctggtcgataaggttagcaatcccaaaacgaatggcgacagccaacagccctcaagctcagggctagcatcaagcaaggcatgcgtcggaaacgcatatcacaagcagttggccgcactgaactgttccgttcgggactggatcgttaagcacgtcaatactaatccactgtgcgatctgacgccaatctttaaagattacgaaaaatacctggcgaatattgaacagcagcacgggaattccggccgaaattccgaaagtgagtccaacaaggtcgcagcagagactcagagcccatccctgttcggaagcacgaaactgcagcaggaatccacttttctcttccacggaaacaagaccgaggacactcctgataagaagatggaggtggctagtgagaaaaaaactgatccatcctcccttggggctacttctgcatctttcaacttcggaaagaaggtcgacagctcggtcctggggtccctgagcagcgttcctcttaccgggttctcgttctcacctggaaattcctcactcttcggaaaagacactacccagagcaagccagttagtagcccattccccaccaaacctcttgaaggccaagctgagggcgatagtggcgagtgtaaagggggagatgaggaggaaaatgatgagcctccaaaggtcgtggttactgaggtgaaagaagaggacgccttttactcaaaaaagtgtaaactcttctataaaaaggataatgagtttaaagaaaagggcatcggcactctacacctcaaacctaccgctaaccagaaaactcagctcctggttcgggctgacactaatctgggcaatatcttactcaatgtgttgatcccgccaaatatgccatgcacccggaccggtaaaaataacgttttaattgtatgcgtccccaatcctcctatcgatgagaagaatgcaacgatgccagtgaccatgttaatccgggtgaaaacatcagaggacgctgatgagctgcacaagattctactcgagaagaaagacgcttag

SEQ ID NO: 277313 - DNA, 1323 bp, Artificial Sequence
  derived and/or modified sequence
atggcctccgaggaagtgttgaagaatcgagccatcaaaaaagcaaagagaaggaatgtcggctttgaatcagacactggaggggctttcaaaggttttaagggcctagtagtgcctagtgggggtggacggtttagtggctttggtagcggggcaggaggaaagcctctggaggggctgtctaatggcaacaacattacctccgcgcctcccttcgcttctgcaaaggctgcagccgatcctaaggttgctttcggctctctagcagcgaacggcccaaccactctggtggacaaggtatctaatcccaaaacaaacggcgactctcagcagccttccagctctggcctggcctcctctaaagcttgcgttgggaatgcctatcataaacagcttgctgcactcaattgctccgtgagagattggatcgtaaagcacgtgaatactaaccccctctgcgatttgacacctatcttcaaagattacgagaaatacctggctaacatcgagcagcagcacggcaattccggcagaaacagtgagtcagaatcaaataaagtggccgctgagacacagtccccctccttgtttggatctacgaagcttcagcaggagtccacttttctcttccatggaaacaaaacggaggacaccccggacaagaagatggaagtggcaagtgagaagaagaccgacccaagttcacttggcgcaacctcagctagtttcaacttcggcaaaaaggtggactcttctgtgcttgggagcctgtcttcggtgccgctcaccggctttagcttctcgccaggaaattcgtcactgtttggaaaagacacaactcaaagcaagcccgtgagctccccctttcccactaagcctcttgaaggacaggccgagggtgattcaggtgaatgtaaaggcggagacgaggaggaaaatgatgagccccctaaggtcgttgttacggaagtgaaggaagaagacgccttttattctaagaagtgcaaattattttataaaaaggataatgagtttaaggagaaggggattggcaccctgcatttaaaacctaccgctaatcagaagacccagctactggtacgcgctgatacaaatctggggaatattctcctcaatgtactgataccaccgaacatgccctgtactcgcactggaaagaataatgttctgatcgtctgcgtgccaaacccacccatcgacgagaagaacgctacaatgccagtcaccatgctgatcagggtgaaaaccagtgaagacgctgatgagctgcacaagatccttctagaaaagaaggacgcatag

SEQ ID NO: 277314 - DNA, 657 bp, Artificial Sequence
  derived and/or modified sequence
atggaagtggcgtctgagaaaaagactgaccccagttccctgggtgctacctccgccagcttcaactttgggaagaaggtggacagttctgtattagggtctttgagcagcgtacctcttactgggttttccttctcccctggcaactcttcattgtttggcaaggacactacccaaagcaaacctgtgtcttctccatttccaactaaaccacttgagggacaagccgaaggcgattcaggggaatgcaaaggcggagacgaggaggagaatgatgagccccctaaggtggtggtcaccgaggtaaaggaagaggacgccttttacagcaaaaaatgtaaactgttctacaaaaaggataacgagttcaaagagaagggcattgggaccttgcacctcaaaccaaccgccaatcagaaaactcaattgctggtgcgagccgatactaacctgggaaatatcttattgaatgtcttaatacctccaaacatgccttgcaccagaacaggtaaaaacaacgtgctgattgtctgtgttccaaatccccctatcgacgaaaaaaacgcaacaatgccagtgaccatgttgattcgcgtcaaaaccagtgaggatgcagacgagctgcacaaaatccttctggagaagaaggacgcctag

SEQ ID NO: 277315 - DNA, 1323 bp, Artificial Sequence
  derived and/or modified sequence
atggccagcgaggaggtgctgaagaacagagccatcaagaaggccaagagaagaaacgtgggcttcgagagcgacaccggcggcgccttcaagggcttcaagggcctggtggtgcccagcggcggcggcagattcagcggcttcggcagcggcgccggcggcaagcccctggagggcctgagcaacggcaacaacatcaccagcgccccccccttcgccagcgccaaggccgccgccgaccccaaggtggccttcggcagcctggccgccaacggccccaccaccctggtggacaaggtgagcaaccccaagaccaacggcgacagccagcagcccagcagcagcggcctggccagcagcaaggcctgcgtgggcaacgcctaccacaagcagctggccgccctgaactgcagcgtgagagactggatcgtgaagcacgtgaacaccaaccccctgtgcgacctgacccccatcttcaaggactacgagaagtacctggccaacatcgagcagcagcacggcaacagcggcagaaacagcgagagcgagagcaacaaggtggccgccgagacccagagccccagcctgttcggcagcaccaagctgcagcaggagagcaccttcctgttccacggcaacaagaccgaggacacccccgacaagaagatggaggtggccagcgagaagaagaccgaccccagcagcctgggcgccaccagcgccagcttcaacttcggcaagaaggtggacagcagcgtgctgggcagcctgagcagcgtgcccctgaccggcttcagcttcagccccggcaacagcagcctgttcggcaaggacaccacccagagcaagcccgtgagcagccccttccccaccaagcccctggagggccaggccgagggcgacagcggcgagtgcaagggcggcgacgaggaggagaacgacgagccccccaaggtggtggtgaccgaggtgaaggaggaggacgccttctacagcaagaagtgcaagctgttctacaagaaggacaacgagttcaaggagaagggcatcggcaccctgcacctgaagcccaccgccaaccagaagacccagctgctggtgagagccgacaccaacctgggcaacatcctgctgaacgtgctgatcccccccaacatgccctgcaccagaaccggcaagaacaacgtgctgatcgtgtgcgtgcccaacccccccatcgacgagaagaacgccaccatgcccgtgaccatgctgatcagagtgaagaccagcgaggacgccgacgagctgcacaagatcctgctggagaagaaggacgcctag

SEQ ID NO: 277316 - DNA, 657 bp, Artificial Sequence
  derived and/or modified sequence
atggaggtggccagcgagaagaagaccgaccccagcagcctgggcgccaccagcgccagcttcaacttcggcaagaaggtggacagcagcgtgctgggcagcctgagcagcgtgcccctgaccggcttcagcttcagccccggcaacagcagcctgttcggcaaggacaccacccagagcaagcccgtgagcagccccttccccaccaagcccctggagggccaggccgagggcgacagcggcgagtgcaagggcggcgacgaggaggagaacgacgagccccccaaggtggtggtgaccgaggtgaaggaggaggacgccttctacagcaagaagtgcaagctgttctacaagaaggacaacgagttcaaggagaagggcatcggcaccctgcacctgaagcccaccgccaaccagaagacccagctgctggtgagagccgacaccaacctgggcaacatcctgctgaacgtgctgatcccccccaacatgccctgcaccagaaccggcaagaacaacgtgctgatcgtgtgcgtgcccaacccccccatcgacgagaagaacgccaccatgcccgtgaccatgctgatcagagtgaagaccagcgaggacgccgacgagctgcacaagatcctgctggagaagaaggacgcctag

SEQ ID NO: 277317 - protein, 445 aa, Artificial Sequence
  derived and/or modified sequence
MSVTYDDSVGVEVSSDSFWEVGNYKRTVKRIDDGHRLCSDLMNCLHERARIEKAYAQQLTEWARRWRQLVEKGPQYGTVEKAWMAFMSEAERVSELHLEVKASLMNDDFEKIKNWQKEAFHKQMMGGFKETKEAEDGFRKAQKPWAKKLKEVEAAKKAHHAACKEEKLAISREANSKADPSLNPEQLKKLQDKIEKCKQDVLKTKEKYEKSLKELDQGTPQYMENMEQVFEQCQQFEEKRLRFFREVLLEVQKHLDLSNVAGYKAIYHDLEQSIRAADAVEDLRWFRANHGPGMAMNWPQFEEWSADLNRTLSRREKKKATDGVTLTGINQTGDQSLPSKPSSVSSYEKTQSYPTDWSDDESNNPFSSTDANGDSNPFDDDATSGTEVRVRALYDYEGQEHDELSFKAGDELTKMEDEDEQGWCKGRLDNGQVGLYPANYVEAIQ

SEQ ID NO: 277318 - protein, 33 aa, Artificial Sequence
  derived and/or modified sequence
MSVTYDDSVGVEVSSDSFWEVGNYKRTVKRIDD

SEQ ID NO: 277319 - DNA, 1338 bp, Artificial Sequence
  derived and/or modified sequence
atgagcgtgacctacgacgacagcgtgggcgtggaggtgagcagcgacagcttctgggaggtgggcaactacaagagaaccgtgaagagaatcgacgacggccacagactgtgcagcgacctgatgaactgcctgcacgagagagccagaatcgagaaggcctacgcccagcagctgaccgagtgggccagaagatggagacagctggtggagaagggcccccagtacggcaccgtggagaaggcctggatggccttcatgagcgaggccgagagagtgagcgagctgcacctggaggtgaaggccagcctgatgaacgacgacttcgagaagatcaagaactggcagaaggaggccttccacaagcagatgatgggcggcttcaaggagaccaaggaggccgaggacggcttcagaaaggcccagaagccctgggccaagaagctgaaggaggtggaggccgccaagaaggcccaccacgccgcctgcaaggaggagaagctggccatcagcagagaggccaacagcaaggccgaccccagcctgaaccccgagcagctgaagaagctgcaggacaagatcgagaagtgcaagcaggacgtgctgaagaccaaggagaagtacgagaagagcctgaaggagctggaccagggcaccccccagtacatggagaacatggagcaggtgttcgagcagtgccagcagttcgaggagaagagactgagattcttcagagaggtgctgctggaggtgcagaagcacctggacctgagcaacgtggccggctacaaggccatctaccacgacctggagcagagcatcagagccgccgacgccgtggaggacctgagatggttcagagccaaccacggccccggcatggccatgaactggccccagttcgaggagtggagcgccgacctgaacagaaccctgagcagaagagagaagaagaaggccaccgacggcgtgaccctgaccggcatcaaccagaccggcgaccagagcctgcccagcaagcccagcagcgtgagcagctacgagaagacccagagctaccccaccgactggagcgacgacgagagcaacaaccccttcagcagcaccgacgccaacggcgacagcaaccccttcgacgacgacgccaccagcggcaccgaggtgagagtgagagccctgtacgactacgagggccaggagcacgacgagctgagcttcaaggccggcgacgagctgaccaagatggaggacgaggacgagcagggctggtgcaagggcagactggacaacggccaggtgggcctgtaccccgccaactacgtggaggccatccagtag

SEQ ID NO: 277320 - DNA, 3126 bp, Artificial Sequence
  derived and/or modified sequence
gcggccgcaggggtctgggcagggctgggcagtgctgccggagcaaaagcggtagcgggagcccggccggagctgggtctggagacgccgtggcagcctgaacggagtgtgcgacggattgggaggtttgtctacagattttgagcgttcgaagttgacccctgactaagtatactttgctgctccctcagcctttgaaaaaatgtctgtcacatatgatgattccgttggagtagaagtgtccagcgacagcttctgggaggtcgggaactacaagcggactgtgaagcggatcgacgatggccaccgcctgtgcagcgacctcatgaactgcctgcatgagcgggcgcgcatcgagaaggcgtatgcgcagcagctcactgagtgggcccggcgctggaggcagctcgtggagaaagggccccagtacgggaccgtggagaaggcctggatggccttcatgtccgaggcagagagggtgagcgagctgcacctcgaggtgaaggcctcactgatgaacgatgacttcgagaagatcaagaactggcagaaggaagcctttcacaagcagatgatgggcggcttcaaggagaccaaggaagctgaggacggctttcggaaggcacagaagccctgggccaagaagctgaaagaggtagaagcagcaaagaaagcccaccatgcagcgtgcaaagaggagaagctggctatctcacgagaagccaacagcaaggcagacccatccctcaaccctgaacagctcaagaaattgcaagacaaaatagaaaagtgcaagcaagatgttcttaagaccaaagagaagtatgagaagtccctgaaggaactcgaccagggcacaccccagtacatggagaacatggagcaggtgtttgagcagtgccagcagttcgaggagaaacgccttcgcttcttccgggaggttctgctggaggttcagaagcacctagacctgtccaatgtggctggctacaaagccatttaccatgacctggagcagagcatcagagcagctgatgcagtggaggacctgaggtggttccgagccaatcacgggccgggcatggccatgaactggccgcagtttgaggagtggtccgcagacctgaatcgaaccctcagccggagagagaagaagaaggccactgacggcgtcaccctgacgggcatcaaccagacaggcgaccagtctctgccgagtaagcccagcagtgtgagcagctacgagaagacccagagctatcccaccgactggtcagacgatgagtctaacaaccccttctcctccacggatgccaatggggactcgaatccattcgacgacgacgccacctcggggacggaagtgcgagtccgggccctgtatgactatgaggggcaggagcatgatgagctgagcttcaaggctggggatgagctgaccaagatggaggacgaggatgagcagggctggtgcaagggacgcttggacaacgggcaagttggcctatacccggcaaattatgtggaggcgatccagtgatgagtcggggacaggccagcggggggacggaggcggcgggcccaggagcctcagccagccacgtgggcatccactccttttcctgcaagagatgatggttccattgctcttggcttcatggtgttcctggaaggcagatgagctggtcatttcgcctgggactcggcacctttccgagtgcagctggagggatctgagcgcaggaagacgcagaacaacagaaatagccgcccctccccgcccactgtgcctgttggcctatcatagatctctatgttcttgactttgtctctcctttccgagtcaatggtgggttacactgatcttgttccactgattactctctctgacgagtccatcacctgcaacttaaatgaacaagcttacatcccattttgagtgaagattttgaggtttttaatttaaaggctgtgtacagttatacttttttatacacctgttcatttctacttaaattatggcacagattgatgcgcaccagtcttgaggaaacgatctccctattcccttaccctgttactcagccacgccgtgtgtaggcttagcctcaggtggcagatgtttgaggaaaggaattatgccaggaaggtgggaccgggttatggtcgggtttctattgggaatgctctttgtgcttttgggcatctgaatggaagctttacatagaaccttaggtagaactcccccaaatcgccatatttaaaaattattttcactctattcttgcttaaaactgtactcttttgcaaattaacaattttatcactgattcagagttaaaaagaagactaacttttcaagcaaatgcatctgtaaagatgctttagattagactgtcatgtctcagtgtctatctgtatatattatttgatattcagagaatctaaagcactcgtctactgttttaatgagatttaacagcttttaacagtgagtttcgtttgtaaactgcttgaagtctgtggcattcaggcacacgtctggctggccggctgggtctcctcccgggctcagtgggcctggggcctctctgacgtggtgcctgctggagggaggctcgtcgtcaccagctgactgctggtccggcttctgaccggcctttgtcctggctccgtagcagaacactgtaaaagtgcccgcgtctttgcagtagttgcagatttcagtcgtcgtgttacttgtgcacaaacagaagctgggtcttacccgcagcacgagtgtctcgggctgcccggagtcgcccgggagcaggtgctgcagccagagttacgcgggggccacgcgggccggcgggggtggggggaacgtgggggaacctgtgtttcacgtgactcagcagtgcccgccgccgtcaccagctatgcattcactccgtttccagtgagcagatgtcttgcttggaaagtggacctgtgtctgtgtctgtcctgagaacttaccagcagaaatcctcatttctgtgctacggatttaccaaaaattgtcaagtctttttcagtttaacagttcctttacatgtgtagtatttgaggaaaaaaatcaataaacagttgatctcgtgcata

SEQ ID NO: 277321 - DNA, 459 bp, Artificial Sequence
  derived and/or modified sequence
atgagcgtgacctacgacgacagcgtgggcgtggaggtgagcagcgacagcttctgggaggtgggcaactacaagagaaccgtgaagagaatcgacgacggccacagactgtgcagcgacctgatgaactgcctgcacgagagagccagaatcgagaaggcctacgcccagcagctgaccgagtgggccagaagatggagacagctggtggagaagggcccccagtacggcaccgtggagaaggcctggatggccttcatgagcgaggccgagagagtgagcgagctgcacctggaggtgaaggccagcctgatgaacgacgacttcgagaagatcaagaactggcagaaggaggccttccacaagcagatgatgggcggcttcaaggagaccaaggaggccgaggacggcttcagaaaggcccagaagccctgggccaagaagctgaaggaggtgtag

SEQ ID NO: 277322 - DNA, 468 bp, Artificial Sequence
  derived and/or modified sequence
atgagcgtgacctacgacgacagcgtgggcgtggaggtgagcagcgacagcttctgggaggtgggcaactacaagagaaccgtgaagagaatcgacgacggccacagactgtgcagcgacctgatgaactgcctgcacgagagagccagaatcgagaaggcctacgcccagcagctgaccgagtgggccagaagatggagacagctggtggagaagggcccccagtacggcaccgtggagaaggcctggatggccttcatgagcgaggccgagagagtgagcgagctgcacctggaggtgaaggccagcctgatgaacgacgacttcgagaagatcaagaactggcagaaggaggccttccacaagcagatgatgggcggcttcaaggagaccaaggaggccgaggacggcttcagaaaggcccagaagccctgggccaagaagctgaaggaggtgcacctgagctag

SEQ ID NO: 277323 - DNA, 1338 bp, Artificial Sequence
  derived and/or modified sequence
atgtccgtgacatatgatgattccgtgggggtggaggtcagctcagacagtttttgggaggttgggaactacaagaggaccgtcaaacgcatagatgacggccatcggctgtgcagtgatttgatgaattgtctccacgaacgcgcacgtatagaaaaggcgtacgctcagcagctgaccgagtgggcccgccggtggcggcagctggtggaaaagggcccccaatacggaaccgtggagaaagcctggatggcctttatgtccgaagccgagagggtgagcgagctgcacctggaggtgaaagcaagcctgatgaacgatgattttgaaaaaattaaaaactggcagaaagaagctttccacaaacaaatgatgggtggcttcaaggagaccaaagaagccgaggacggattccggaaggcacagaagccttgggcaaaaaagttgaaggaagtggaggctgccaaaaaggcccaccatgcagcttgcaaagaggaaaagctcgccatatccagagaagctaactccaaggccgacccctctctgaaccccgagcagttgaagaagttgcaggacaagatcgaaaaatgcaagcaggatgtgctgaagaccaaagaaaagtatgaaaaatctcttaaggagctggatcagggaaccccccagtatatggagaacatggagcaagtctttgaacagtgccagcagtttgaagagaaacggctcaggttttttcgtgaagtcctgctggaggtacagaagcatctcgacctgtcaaacgtggcaggatacaaagctatttaccatgacctagagcagagtattcgtgccgctgacgccgtggaggatttgcgttggttcagggccaatcatggccccggaatggccatgaactggcctcagttcgaggaatggtccgcggacttgaatagaaccctgagccgccgggaaaaaaagaaggctaccgacggtgttaccctaactggcatcaatcagactggcgatcagagcctgccttctaaaccttcaagtgttagcagctatgaaaaaacccagagttatcctacagattggagcgatgatgaaagcaataacccattctcatcaactgacgccaatggcgattcaaatccgttcgatgatgatgctacgtccgggaccgaggtccgggttcgagctctttacgattacgagggtcaggagcatgacgaattgagtttcaaagctggggatgaactgacaaagatggaagatgaagacgagcagggctggtgtaaaggaagactggacaatggccaggtgggcctttaccccgccaattatgtcgaagcaatccaatag

SEQ ID NO: 277324 - DNA, 1338 bp, Artificial Sequence
  derived and/or modified sequence
atgtctgtaacttatgacgatagtgttggagtggaagtcagctctgactcattttgggaggttggtaactacaaacgaaccgttaaacggatcgacgacggtcaccgcctctgctctgacctgatgaactgtctccacgaacgagcgcgcattgaaaaggcctacgcgcagcagctgaccgaatgggccaggcgttggaggcagctagtggaaaagggcccccagtacggaactgtcgaaaaagcttggatggcctttatgtccgaggcagagagagtttcagaacttcatttagaggtcaaagcatctcttatgaacgatgattttgagaaaatcaagaattggcaaaaagaggcattccataagcagatgatgggcgggttcaaggaaactaaagaagcggaggatggcttcaggaaggctcaaaaaccttgggcgaaaaaactcaaggaagttgaagctgctaagaaagctcaccacgccgcgtgtaaggaagagaaactggccatctcaagggaagcgaatagtaaggcagatccttcactgaatccggaacagttgaagaagctgcaggataagatcgagaagtgtaaacaggatgtcctgaagaccaaggaaaaatacgagaagtcactgaaggagttggaccaagggactcctcagtacatggaaaatatggaacaggttttcgagcaatgccagcaattcgaggaaaaacggctgaggttttttcgggaagtcctgttagaagtccagaaacacctcgacctaagcaatgtggcggggtacaaagcgatttaccacgacctggagcagagtatcagggcggcggacgccgtggaggatcttcggtggtttagagctaatcatggcccgggaatggccatgaattggcctcagttcgaagagtggagcgctgatcttaatcggacgctcagtagacgagagaaaaagaaggccacggacggagttaccctgactggaataaatcagactggtgatcagtcactacccagcaagccaagctccgtgtctagttatgaaaaaacccagtcttacccaaccgactggtctgatgatgagtcaaacaacccgttttcctctactgatgccaatggtgacagcaatcccttcgacgacgacgctaccagcggcacagaggtccgggtgagggccctgtacgattatgaaggacaggaacacgacgaactctccttcaaggcgggcgatgaacttacgaagatggaagatgaggatgaacagggatggtgtaaagggaggctggataacggacaggtcggactgtatcccgccaattatgttgaggcaatacagtag

SEQ ID NO: 277325 - DNA, 459 bp, Artificial Sequence
  derived and/or modified sequence
atgtcagtgacctatgatgatagtgtgggcgtggaagtgtcttcggattcgttttgggaggtcggcaactataaacggaccgttaaaagaatcgatgacggacaccgcctgtgctccgacctgatgaattgtttgcacgagcgcgctagaatcgaaaaggcatatgctcaacaactaacagagtgggcgagacgatggagacaactcgtggaaaaagggccacagtatggaactgtggaaaaagcgtggatggcattcatgagcgaggcagaaagagtatctgagctgcatctggaggtaaaggcatcactgatgaacgatgatttcgagaaaatcaagaattggcagaaggaggccttccacaaacaaatgatgggcggctttaaagaaacaaaagaagctgaggatggatttcgcaaagctcagaaaccttgggctaaaaaactaaaagaggtgtag

SEQ ID NO: 277326 - DNA, 459 bp, Artificial Sequence
  derived and/or modified sequence
atgtctgttacatatgacgatagcgtcggagttgaggtttcctcagattccttctgggaggtgggcaattataagagaaccgtaaagagaattgacgatggacatcgtctgtgcagcgatctgatgaactgtctccacgaacgagcgcgtatcgaaaaggcctatgctcagcaactgacagaatgggcaaggcgctggaggcagttagtggaaaagggaccccagtacggaaccgtagagaaggcttggatggcctttatgtcagaagctgagcgagtgtccgagttacacctggaagtcaaagcttcgcttatgaacgatgatttcgaaaaaatcaagaattggcagaaggaggcgttccataaacagatgatgggggggttcaaggaaaccaaagaggccgaagacggttttagaaaagctcagaaaccttgggccaagaaactgaaggaggtgtag

SEQ ID NO: 277327 - DNA, 468 bp, Artificial Sequence
  derived and/or modified sequence
atgagcgtcacctacgatgacagtgtcggggtggaggtatctagtgatagcttctgggaagtagggaattataagcggaccgtgaagcggattgacgacggccacaggctctgctctgacttgatgaactgcttacacgaaagagccagaatcgagaaagcctacgcacagcaactgaccgagtgggccaggcgctggcgccaactggtcgagaaaggtccccagtatgggactgtggaaaaggcttggatggcctttatgtccgaagcagagagggtctcagaattgcacctggaggtgaaggcgtctctcatgaacgacgactttgagaaaattaaaaattggcagaaagaagcatttcacaagcagatgatgggcggttttaaggagaccaaggaggctgaggacgggttccggaaggctcagaagccctgggcaaagaaattgaaggaagttcacttatcctag

SEQ ID NO: 277328 - DNA, 1338 bp, Artificial Sequence
  derived and/or modified sequence
atgtctgtgacctatgatgacagcgtgggcgtggaggtgtccagtgacagcttctgggaggtgggcaactacaagaggacagtgaagagaattgatgatggccaccggctgtgcagcgacctgatgaactgcctgcacgagcgggccagaattgagaaggcctatgcccagcagctgacagagtgggcccggcgctggaggcagctggtggagaagggcccccagtatggcaccgtggagaaggcctggatggccttcatgtctgaggccgagcgggtgtctgagctgcacctggaggtgaaggccagcctgatgaatgatgactttgagaagatcaagaactggcagaaggaggccttccacaagcagatgatgggcggcttcaaggagaccaaggaggctgaagatggcttcaggaaggcccagaagccctgggccaagaagctgaaggaggtggaggccgccaagaaggcccaccacgccgcctgcaaggaggagaagctggccatcagccgggaggccaacagcaaggctgaccccagcctgaaccctgagcagctgaagaagctgcaggacaagattgagaagtgcaagcaggatgtgctgaagaccaaggagaagtatgagaagagcctgaaggagctggaccagggcaccccccagtacatggagaacatggagcaggtgtttgagcagtgccagcagtttgaggagaagaggctgcgcttcttccgggaggtgctgctggaggtgcagaagcacctggacctgagcaatgtggccggctacaaggccatctaccatgacctggagcagagcatccgggctgctgatgctgtggaggacctgcgctggttccgggccaaccacggccctggcatggccatgaactggccccagtttgaggagtggagcgctgacctgaacagaaccctgagccggcgggagaagaagaaggccacagatggagtgaccctgaccggcatcaaccagacaggagaccagagcctgcccagcaagcccagctctgtgagcagctatgagaagacccagagctaccccacagactggagcgatgatgagagcaacaaccccttcagcagcacagatgccaacggggacagcaacccctttgatgatgatgccaccagcggcacagaggtgcgggtgcgggccctgtatgactatgagggccaggagcatgatgagctgtccttcaaggctggagatgagctgaccaagatggaggatgaagatgagcagggctggtgcaagggccgcctggacaatggccaggtgggcctgtacccagccaactacgtggaggccatccagtag

SEQ ID NO: 277329 - DNA, 459 bp, Artificial Sequence
  derived and/or modified sequence
atgtctgtgacctatgatgacagcgtgggcgtggaggtgtccagtgacagcttctgggaggtgggcaactacaagaggacagtgaagagaattgatgatggccaccggctgtgcagcgacctgatgaactgcctgcacgagcgggccagaattgagaaggcctatgcccagcagctgacagagtgggcccggcgctggaggcagctggtggagaagggcccccagtatggcaccgtggagaaggcctggatggccttcatgtctgaggccgagcgggtgtctgagctgcacctggaggtgaaggccagcctgatgaatgatgactttgagaagatcaagaactggcagaaggaggccttccacaagcagatgatgggcggcttcaaggagaccaaggaggctgaagatggcttcaggaaggcccagaagccctgggccaagaagctgaaggaggtgtag

SEQ ID NO: 277330 - DNA, 468 bp, Artificial Sequence
  derived and/or modified sequence
atgtctgtgacctatgatgacagcgtgggcgtggaggtgtccagtgacagcttctgggaggtgggcaactacaagaggacagtgaagagaattgatgatggccaccggctgtgcagcgacctgatgaactgcctgcacgagcgggccagaattgagaaggcctatgcccagcagctgacagagtgggcccggcgctggaggcagctggtggagaagggcccccagtatggcaccgtggagaaggcctggatggccttcatgtctgaggccgagcgggtgtctgagctgcacctggaggtgaaggccagcctgatgaatgatgactttgagaagatcaagaactggcagaaggaggccttccacaagcagatgatgggcggcttcaaggagaccaaggaggctgaagatggcttcaggaaggcccagaagccctgggccaagaagctgaaggaggtgcacctgtcctag

SEQ ID NO: 277331 - DNA, 1338 bp, Artificial Sequence
  derived and/or modified sequence
atgagcgtgacctacgacgacagcgtgggcgtggaggtgagcagcgactccttttgggaagttgggaattacaaaaggaccgtgaagaggatagacgacgggcacagattgtgctctgatttgatgaactgtcttcatgaacgggctaggatcgagaaggcttatgctcaacagctcaccgagtgggctcgccgctggcgccagctcgttgagaaaggccctcagtacgggacagtagagaaggcgtggatggcattcatgtctgaagccgagcgggtgagcgagctgcacctggaagtgaaggcatcccttatgaacgatgacttcgagaagattaaaaattggcagaaggaggcttttcataaacaaatgatgggagggttcaaagaaacgaaggaggccgaggatggtttccgtaaagcacagaagccatgggctaaaaagctgaaagaagtggaagcggctaaaaaggcccaccacgcagcttgcaaggaggaaaaactggcaatttctcgtgaggcgaacagtaaagctgacccgtccttgaaccccgaacaactgaaaaagttacaggacaaaattgagaagtgcaaacaggacgtgcttaaaacaaaagaaaaatacgaaaaatccctgaaggagcttgatcagggcacaccccagtatatggagaatatggaacaggtgtttgaacagtgccaacagtttgaagagaaaaggctgagatttttccgggaagttctgcttgaggtgcagaagcacctggatctctctaatgtggcaggctacaaggcgatttaccatgatcttgagcagtcaatcagggcagcggatgccgtagaggaccttaggtggttccgcgccaatcacggccctggaatggcaatgaattggccccagttcgaggaatggtcagcggaccttaaccgcacactgtctaggcgtgaaaaaaagaaagccacagacggcgtaacattaactggaatcaaccaaaccggtgaccaatcccttccaagtaagccctcctctgtctcctcttatgagaagacccaaagctacccaaccgactggtccgacgacgagagcaataatcccttcagcagcaccgacgctaacggggattccaatccttttgacgatgacgcgacctctggcaccgaagtgagagtccgagcattgtatgactacgagggccaggagcacgatgagttgagcttcaaagcaggcgacgagctcacgaagatggaagacgaagatgagcaaggatggtgtaagggtaggttagacaacgggcaagtagggttgtatccagccaactatgtggaggccatccagtag

SEQ ID NO: 277332 - DNA, 1338 bp, Artificial Sequence
  derived and/or modified sequence
atgagcgtgacctacgacgacagcgtgggcgtggaggtgagcagcgattctttttgggaggttggtaattataagcgtaccgtcaaacgtatcgacgacggccacagactgtgctccgatcttatgaactgccttcacgagagagcacggatcgaaaaggcctatgcgcagcagcttactgaatgggccaggcgctggagacagctcgtggaaaagggccctcaatacggaactgtagagaaagcctggatggcctttatgagcgaggccgagagggtgtccgagctgcacttagaggtgaaggccagcttgatgaatgacgattttgagaaaattaagaattggcagaaggaagctttccacaaacagatgatgggcggtttcaaggaaaccaaggaggccgaagatgggttccggaaggcccagaagccgtgggcaaaaaaactcaaggaggtagaagccgccaaaaaggcccaccatgccgcttgtaaggaggagaagctcgctatctcgcgcgaggcgaatagtaaggccgaccctagcctcaacccagagcagctcaaaaagttgcaggataaaatcgaaaagtgcaagcaggacgtgttaaaaacaaaggagaagtatgaaaaatctctcaaggagttggatcaaggaaccccccagtacatggaaaatatggaacaagtattcgagcaatgtcagcagtttgaagaaaagcggttgagattctttagagaggtgctactcgaggtacagaagcatttggacctaagtaacgtagcaggttacaaggctatttatcacgaccttgaacagtcaatcagagctgcagacgctgttgaagatctgcgctggttcagagctaatcacggaccaggaatggccatgaactggccacagtttgaagaatggagcgccgacctgaacaggacactgagccgccgtgaaaaaaagaaggccacggacggggtcaccctgactgggatcaaccagacaggagatcaatctctaccaagtaaaccctcgtccgtgtcaagttatgaaaaaacccagtcatatcccacagattggtcagacgatgaatctaacaacccatttagctctacggatgcaaacggggattccaaccctttcgacgacgatgccaccagtggcacggaagttcgcgtgcgggcactgtatgattacgagggccaggagcacgacgagctgtcgtttaaagctggtgacgaactgactaaaatggaagacgaagacgaacagggttggtgtaaaggccggctggataacggtcaggtgggactgtacccagccaattatgttgaagcgattcagtag

SEQ ID NO: 277333 - DNA, 459 bp, Artificial Sequence
  derived and/or modified sequence
atgagcgtgacctacgacgacagcgtgggcgtggaggtgagcagcgatagcttctgggaggtcggtaactataagcgaacagtcaagcgaattgacgacggccatcgtctctgttccgatctgatgaactgtctgcatgaaagagcacggatcgagaaagcatacgctcaacagctgacggagtgggcgaggcggtggcgacagctagttgagaaagggccacaatacggaacagttgaaaaggcgtggatggcatttatgagcgaggctgaaagagtgagcgagctccatctggaggtaaaagccagtttgatgaacgatgattttgagaaaataaaaaactggcaaaaggaagctttccataagcagatgatgggcggtttcaaagaaactaaagaggccgaggatggcttcaggaaggcacagaaaccctgggctaaaaagctgaaagaagtttag

SEQ ID NO: 277334 - DNA, 459 bp, Artificial Sequence
  derived and/or modified sequence
atgagcgtgacctacgacgacagcgtgggcgtggaggtgagcagcgattccttctgggaggtgggcaactataagcgcacagttaagaggatcgacgacggccatcgactctgcagtgacttaatgaattgtttacatgaacgggcccgaatcgaaaaggcgtacgcacaacagctgaccgagtgggcccgacgatggagacagttggttgaaaaaggaccacagtacggcactgttgaaaaggcatggatggcctttatgagcgaggcggaaagagtttccgagttacacctggaggtcaaggcctccctaatgaatgacgactttgagaaaataaagaattggcagaaagaggctttccacaagcagatgatgggtggcttcaaagagacaaaggaggctgaagatggctttagaaaggcacagaagccatgggccaaaaaactaaaggaggtatag

SEQ ID NO: 277335 - DNA, 468 bp, Artificial Sequence
  derived and/or modified sequence
atgagcgtgacctacgacgacagcgtgggcgtggaggtgagcagcgactcgttttgggaggtaggcaactataagagaactgttaaacgcatagacgatggccacaggctgtgttccgacctgatgaactgtctacatgaacgagcacgcattgagaaggcatacgcacagcagctgaccgaatgggcacgccgttggcgacagctggttgagaagggtccccaatacggaacagtggagaaagcttggatggcgtttatgtctgaagccgagagggtctctgagctgcatctggaggttaaggcaagccttatgaatgatgactttgagaagataaagaactggcagaaggaggctttccataagcagatgatgggcggttttaaagagactaaggaagccgaagacggttttcggaaggcccagaagccctgggcaaagaagctgaaggaagtacatttgagttag

SEQ ID NO: 277336 - DNA, 3080 bp, Artificial Sequence
  derived and/or modified sequence
agaggtcagacatgccagcagggttggaaagaggcaggtacggaagctgagctgcagagttagccggcatctgacagaaaaatgtttgtctacagattttgagcgttcgaagttgacccctgactaagtatactttgctgctccctcagcctttgaaaaaatgtctgtcacatatgatgattccgttggagtagaagtgtccagcgacagcttctgggaggtcgggaactacaagcggactgtgaagcggatcgacgatggccaccgcctgtgcagcgacctcatgaactgcctgcatgagcgggcgcgcatcgagaaggcgtatgcgcagcagctcactgagtgggcccggcgctggaggcagctcgtggagaaagggccccagtacgggaccgtggagaaggcctggatggccttcatgtccgaggcagagagggtgagcgagctgcacctcgaggtgaaggcctcactgatgaacgatgacttcgagaagatcaagaactggcagaaggaagcctttcacaagcagatgatgggcggcttcaaggagaccaaggaagctgaggacggctttcggaaggcacagaagccctgggccaagaagctgaaagaggtagaagcagcaaagaaagcccaccatgcagcgtgcaaagaggagaagctggctatctcacgagaagccaacagcaaggcagacccatccctcaaccctgaacagctcaagaaattgcaagacaaaatagaaaagtgcaagcaagatgttcttaagaccaaagagaagtatgagaagtccctgaaggaactcgaccagggcacaccccagtacatggagaacatggagcaggtgtttgagcagtgccagcagttcgaggagaaacgccttcgcttcttccgggaggttctgctggaggttcagaagcacctagacctgtccaatgtggctggctacaaagccatttaccatgacctggagcagagcatcagagcagctgatgcagtggaggacctgaggtggttccgagccaatcacgggccgggcatggccatgaactggccgcagtttgaggagtggtccgcagacctgaatcgaaccctcagccggagagagaagaagaaggccactgacggcgtcaccctgacgggcatcaaccagacaggcgaccagtctctgccgagtaagcccagcagtgtgagcagctacgagaagacccagagctatcccaccgactggtcagacgatgagtctaacaaccccttctcctccacggatgccaatggggactcgaatccattcgacgacgacgccacctcggggacggaagtgcgagtccgggccctgtatgactatgaggggcaggagcatgatgagctgagcttcaaggctggggatgagctgaccaagatggaggacgaggatgagcagggctggtgcaagggacgcttggacaacgggcaagttggcctatacccggcaaattatgtggaggcgatccagtgatgagtcggggacaggccagcggggggacggaggcggcgggcccaggagcctcagccagccacgtgggcatccactccttttcctgcaagagatgatggttccattgctcttggcttcatggtgttcctggaaggcagatgagctggtcatttcgcctgggactcggcacctttccgagtgcagctggagggatctgagcgcaggaagacgcagaacaacagaaatagccgcccctccccgcccactgtgcctgttggcctatcatagatctctatgttcttgactttgtctctcctttccgagtcaatggtgggttacactgatcttgttccactgattactctctctgacgagtccatcacctgcaacttaaatgaacaagcttacatcccattttgagtgaagattttgaggtttttaatttaaaggctgtgtacagttatacttttttatacacctgttcatttctacttaaattatggcacagattgatgcgcaccagtcttgaggaaacgatctccctattcccttaccctgttactcagccacgccgtgtgtaggcttagcctcaggtggcagatgtttgaggaaaggaattatgccaggaaggtgggaccgggttatggtcgggtttctattgggaatgctctttgtgcttttgggcatctgaatggaagctttacatagaaccttaggtagaactcccccaaatcgccatatttaaaaattattttcactctattcttgcttaaaactgtactcttttgcaaattaacaattttatcactgattcagagttaaaaagaagactaacttttcaagcaaatgcatctgtaaagatgctttagattagactgtcatgtctcagtgtctatctgtatatattatttgatattcagagaatctaaagcactcgtctactgttttaatgagatttaacagcttttaacagtgagtttcgtttgtaaactgcttgaagtctgtggcattcaggcacacgtctggctggccggctgggtctcctcccgggctcagtgggcctggggcctctctgacgtggtgcctgctggagggaggctcgtcgtcaccagctgactgctggtccggcttctgaccggcctttgtcctggctccgtagcagaacactgtaaaagtgcccgcgtctttgcagtagttgcagatttcagtcgtcgtgttacttgtgcacaaacagaagctgggtcttacccgcagcacgagtgtctcgggctgcccggagtcgcccgggagcaggtgctgcagccagagttacgcgggggccacgcgggccggcgggggtggggggaacgtgggggaacctgtgtttcacgtgactcagcagtgcccgccgccgtcaccagctatgcattcactccgtttccagtgagcagatgtcttgcttggaaagtggacctgtgtctgtgtctgtcctgagaacttaccagcagaaatcctcatttctgtgctacggatttaccaaaaattgtcaagtctttttcagtttaacagttcctttacatgtgtagtatttgaggaaaaaaatcaataaacagttgatctcgtg

SEQ ID NO: 277337 - DNA, 1338 bp, Artificial Sequence
  derived and/or modified sequence
atgagtgtcacatacgatgactccgtcggagttgaggtgagctctgactcgttctgggaagtcggtaactataaacggacagtgaaaagaatcgatgacggtcataggctgtgttcggacctcatgaattgtctacacgaaagggcgaggatcgaaaaagcctacgcccaacagttaaccgaatgggcacgtcgctggaggcagcttgtggagaaaggccctcagtacggaaccgtggaaaaagcttggatggctttcatgtccgaggcggagcgggtgagcgaattacacctggaagtgaaggcgtccctaatgaacgacgactttgaaaaaatcaaaaactggcagaaagaggcatttcataaacagatgatgggcggattcaaggagaccaaggaggccgaagacggctttaggaaagcacagaaaccctgggccaaaaagctaaaagaagtggaggccgcaaagaaggcccaccacgcggcttgcaaggaagagaaactcgccatatcacgggaagctaacagcaaggccgatccaagtttgaaccctgagcagctcaagaaactgcaagataaaattgagaaatgcaaacaagatgtcctgaaaacaaaagaaaaatacgaaaagtccctcaaggaactggatcagggcacccctcaatatatggagaatatggagcaggtgttcgaacagtgccaacagtttgaggaaaagcggttaagattttttagagaagtcctattggaggtacagaagcacttggacctctcgaatgtggcaggatacaaggccatttaccatgatcttgaacagagcattcgcgcagccgacgcagttgaagacctccgttggtttcgtgccaaccacgggccagggatggcaatgaactggccccagttcgaagagtggagcgctgaccttaatcggaccctctcacggcgtgagaagaaaaaggcgaccgatggagtgactctgactgggattaaccagacaggcgaccagtcgctgccttccaagccctcttctgtatcatcatacgagaagactcagtcgtacccgacagactggtctgacgacgagagtaacaatcccttttcttcaacagatgcaaatggcgattctaacccttttgatgacgacgcaacttcaggaactgaagttcgagtgcgggctttatatgattatgagggacaggagcatgatgaattgtctttcaaagctggagatgagttaacaaaaatggaggacgaagatgagcaagggtggtgtaaagggaggctagataatggccaggtagggctgtatccagccaattatgtcgaggcgatacaatag

SEQ ID NO: 277338 - DNA, 622 bp, Artificial Sequence
  derived and/or modified sequence
ctttccagaagacattccaaccaccatggtagagtcacagtaatgtcatggagaatgaagggagtcggggactaaacaagtggctgcaggtttgtctacagattttgagcgttcgaagttgacccctgactaagtatactttgctgctccctcagcctttgaaaaaatgtctgtcacatatgatgattccgttggagtagaagtgtccagcgacagcttctgggaggtcgggaactacaagcggactgtgaagcggatcgacgatggccaccgcctgtgcagcgacctcatgaactgcctgcatgagcgggcgcgcatcgagaaggcgtatgcgcagcagctcactgagtgggcccggcgctggaggcagctcgtggagaaagggccccagtacgggaccgtggagaaggcctggatggccttcatgtccgaggcagagagggtgagcgagctgcacctcgaggtgaaggcctcactgatgaacgatgacttcgagaagatcaagaactggcagaaggaagcctttcacaagcagatgatgggcggcttcaaggagaccaaggaagctgaggacggctttcggaaggcacagaagccctgggccaagaagctgaaagaggta

SEQ ID NO: 277339 - DNA, 664 bp, Artificial Sequence
  derived and/or modified sequence
actttgatgagcaaggaacgctgttttagaaaatccttactacttgatgattaatccttggagctaatgttccacgttcccaaggttgtgagtgcttatggccacattcctgcatcagctcagccatcgcggtttgtctacagattttgagcgttcgaagttgacccctgactaagtatactttgctgctccctcagcctttgaaaaaatgtctgtcacatatgatgattccgttggagtagaagtgtccagcgacagcttctgggaggtcgggaactacaagcggactgtgaagcggatcgacgatggccaccgcctgtgcagcgacctcatgaactgcctgcatgagcgggcgcgcatcgagaaggcgtatgcgcagcagctcactgagtgggcccggcgctggaggcagctcgtggagaaagggccccagtacgggaccgtggagaaggcctggatggccttcatgtccgaggcagagagggtgagcgagctgcacctcgaggtgaaggcctcactgatgaacgatgacttcgagaagatcaagaactggcagaaggaagcctttcacaagcagatgatgggcggcttcaaggagaccaaggaagctgaggacggctttcggaaggcacagaagccctgggccaagaagctgaaagaggta

SEQ ID NO: 277340 - DNA, 1338 bp, Artificial Sequence
  derived and/or modified sequence
atgagcgtgacatacgacgactcagtgggggttgaagtttcgtcagacagtttttgggaggttggaaactacaagcgcacagtgaagcgaatagatgacgggcaccggttatgttccgatttaatgaactgcctgcacgagcgcgctaggatcgagaaagcctacgcccagcagttgacggagtgggcacgccgttggagacaactggttgagaaagggcctcaatatggcactgtcgagaaagcatggatggcatttatgtcagaggccgagcgagtgtcagagctgcacctcgaagtgaaagcaagtcttatgaatgatgatttcgagaaaatcaaaaactggcagaaggaggccttccataaacagatgatgggaggattcaaggaaacaaaggaggccgaggatgggtttagaaaagctcagaaaccttgggccaaaaaacttaaagaggttgaggcggctaagaaggcacaccatgctgcctgcaaagaggagaagctagcgatctcgagggaggcaaattctaaggcagatccttctctgaaccctgagcagttaaagaagttgcaagacaagattgaaaagtgcaaacaggatgtgttgaagaccaaagaaaagtatgaaaaaagcctaaaagagcttgaccagggcacaccacagtacatggagaacatggaacaagtcttcgaacagtgtcaacagttcgaggaaaagcggctgaggttttttagagaggtgctcctggaggtgcagaagcacttagacctttctaatgtcgccggatataaggccatctatcatgatctcgaacagtctatcagggccgctgacgccgtggaggacctccggtggtttcgcgctaatcacgggccaggtatggccatgaactggccacagtttgaggagtggtccgctgatctgaatcgtaccttgtccagacgagaaaaaaaaaaggctactgatggcgtaacattaactgggattaatcagaccggtgatcaaagtttgccatcgaagccttcctctgtgtcatcttatgaaaaaactcagagttatcccacggattggtccgacgatgaatcaaataaccctttttccagcaccgatgctaatggagattcgaacccgttcgacgacgacgctacttccggcaccgaagtgagagtgcgcgcactatacgactacgagggccaggaacatgacgagctgtctttcaaagccggagatgaactgaccaagatggaggacgaggacgaacagggctggtgtaagggtcggctggacaacgggcaggtgggtctctatcctgccaattacgttgaggctatacagtag

SEQ ID NO: 277341 - DNA, 459 bp, Artificial Sequence
  derived and/or modified sequence
atgtcggtgacctatgatgacagcgtgggtgtagaggtcagcagtgattctttttgggaggtcgggaactataaacgcaccgtaaaaagaatcgatgacggccaccggctctgctctgatctgatgaattgcttacacgaaagggccaggattgagaaagcttacgctcagcaattgacagagtgggcgagacgatggcggcagcttgtagagaaggggcctcagtatgggactgtggaaaaggcttggatggccttcatgagcgaggccgagcgcgtctccgagctgcacctcgaggtcaaagcctctctgatgaacgatgactttgagaagattaagaattggcagaaagaagcttttcataaacagatgatgggaggtttcaaggagacaaaggaagccgaggatggtttcaggaaggcccagaaaccgtgggccaaaaaactcaaagaggtgtag

SEQ ID NO: 277342 - DNA, 459 bp, Artificial Sequence
  derived and/or modified sequence
atgtccgtcacatacgatgacagcgtaggagtggaagtgtctagcgattcattttgggaggtcggaaattacaagcgcacagttaaacgcattgacgatggccatcggttgtgcagcgacctgatgaattgtctgcacgagagggcacgcattgaaaaggcgtacgcacagcagctgacagagtgggcacgcaggtggcggcaacttgtggaaaagggtcctcagtacgggaccgtggagaaggcttggatggcctttatgagcgaggccgagcgtgtgtccgaactgcatctggaagttaaagcctctctgatgaatgatgattttgagaagatcaaaaactggcagaaggaggcctttcacaagcaaatgatgggcggattcaaggaaacgaaggaagctgaggacggctttcggaaggctcagaaaccttgggctaagaagctgaaggaggtgtag

SEQ ID NO: 277343 - DNA, 468 bp, Artificial Sequence
  derived and/or modified sequence
atgagcgttacttacgatgactcagtgggagtggaggtctctagcgatagtttctgggaggtaggaaattacaagcgcactgtcaaaagaattgatgacggacataggctgtgctccgatctgatgaactgcctgcatgaaagagccagaatcgaaaaagcgtacgcccaacagctaaccgagtgggctaggcggtggcgccagttggtggaaaagggcccacagtacggaacagtggaaaaagcctggatggcatttatgagcgaggcggagagagtctcagagctgcacctggaggtgaaagctagtctgatgaatgatgacttcgaaaagatcaagaattggcaaaaagaagcctttcacaagcaaatgatgggcggatttaaagagaccaaagaagccgaggatggatttcgcaaggctcagaaaccttgggccaagaagctgaaggaggtgcacttgtcctag

SEQ ID NO: 277344 - DNA, 505 bp, Artificial Sequence
  derived and/or modified sequence
agaattcagctgagagacagaggtcagacatgccagcagggttggaaagaggcaggtacggaagctgagctgcagagttagccggcatctgacagaaaaatgtgagtgtgctgtggaaggcttgcatttcctttaaggtagacctctttgaaagtagaattttcacggaattgttttctttctcactgagtgactgatttaacagaactctcaccttctatgcaagcgcacctagttttagagctccgtgacggcaatgttcaattagttcattattaactgagcaatgcagaatgctttatccagggtgcttggagaagatgtcagagtttgtctacagattttgagcgttcgaagttgacccctgactaagtatactttgctgctccctcagcctttgaaaaaatgtctgtcacatatgatgattccgttggagtagaagtgtccagcgacagcttctgggaggtcgggaactacaagcggactgtgaagcggatcgacgatg

SEQ ID NO: 277345 - DNA, 818 bp, Artificial Sequence
  derived and/or modified sequence
gggtctgggcagggctgggcagtgctgccggagcaaaagcggtagcgggagcccggccggagctgggtctggagacgccgtggcagcctgaacggagtgtgcgacggattgggaggaggaactgccaggtcggatgtggagatgaacccggagagtgtccttcggctctggtcggccttcaggggcattcctgccagtctcagaagatgacagtctgcaatcgtgttatcatcaacgtggaaaaaataagggcaatgcagttttcatgtgtgtaaggtttgtctacagattttgagcgttcgaagttgacccctgactaagtatactttgctgctccctcagcctttgaaaaaatgtctgtcacatatgatgattccgttggagtagaagtgtccagcgacagcttctgggaggtcgggaactacaagcggactgtgaagcggatcgacgatggccaccgcctgtgcagcgacctcatgaactgcctgcatgagcgggcgcgcatcgagaaggcgtatgcgcagcagctcactgagtgggcccggcgctggaggcagctcgtggagaaagggccccagtacgggaccgtggagaaggcctggatggccttcatgtccgaggcagagagggtgagcgagctgcacctcgaggtgaaggcctcactgatgaacgatgacttcgagaagatcaagaactggcagaaggaagcctttcacaagcagatgatgggcggcttcaaggagaccaaggaagctgaggacggctttcggaaggcacagaagccctgggccaagaagctgaaagaggtacatctgtcc

SEQ ID NO: 277346 - protein, 903 aa, Artificial Sequence
  derived and/or modified sequence
MVLAQGLLSMALLALCWERSLAGAEETIPLQTLRCYNDYTSHITCRWADTQDAQRLVNVTLIRRVNEDLLEPVSCDLSDDMPWSACPHPRCVPRRCVIPCQSFVVTDVDYFSFQPDRPLGTRLTVTLTQHVQPPEPRDLQISTDQDHFLLTWSVALGSPQSHWLSPGDLEFEVVYKRLQDSWEDAAILLSNTSQATLGPEHLMPSSTYVARVRTRLAPGSRLSGRPSKWSPEVCWDSQPGDEAQPQNLECFFDGAAVLSCSWEVRKEVASSVSFGLFYKPSPDAGSAVLLREEECSPVLREGLGSLHTRHHCQIPVPDPATHGQYIVSVQPRRAEKHIKSSVNIQMAPPSLNVTKDGDSYSLRWETMKMRYEHIDHTFEIQYRKDTATWKDSKTETLQNAHSMALPALEPSTRYWARVRVRTSRTGYNGIWSEWSEARSWDTESVLPMWVLALIVIFLTIAVLLALRFCGIYGYRLRRKWEEKIPNPSKSHLFQNGSAELWPPGSMSAFTSGSPPHQGPWGSRFPELEGVFPVGFGDSEVSPLTIEDPKHVCDPPSGPDTTPAASDLPTEQPPSPQPGPPAASHTPEKQASSFDFNGPYLGPPHSRSLPDILGQPEPPQEGGSQKSPPPGSLEYLCLPAGGQVQLVPLAQAMGPGQAVEVERRPSQGAAGSPSLESGGGPAPPALGPRVGGQDQKDSPVAIPMSSGDTEDPGVASGYVSSADLVFTPNSGASSVSLVPSLGLPSDQTPSLCPGLASGPPGAPGPVKSGFEGYVELPPIEGRSPRSPRNNPVPPEAKSPVLNPGERPADVSPTSPQPEGLLVLQQVGDYCFLPGLGPGPLSLRSKPSSPGPGPEIKNLDQAFQVKKPPGQAVPQVPVIQLFKALKQQDYLSLPPWEVNKPGEVC

SEQ ID NO: 277347 - protein, 844 aa, Artificial Sequence [sequence omitted]

SEQ ID NO: 277348 - DNA, 2712 bp, Artificial Sequence
  derived and/or modified sequence
atggtgctcgcacagggtctgctgtctatggctctcctcgcactttgctgggagagatcgttggcaggggctgaagaaaccatcccattgcagacactgaggtgttacaacgattataccagccatatcacttgtaggtgggcggatacacaggatgcccagcgcctggtgaacgtcacgctgatacgtagggtgaacgaggacctgcttgagccagtctcatgtgacttgtccgatgatatgccttggtccgcctgcccccacccacgctgcgtcccccggcggtgcgtgataccctgccagagcttcgtggtgacagatgtcgactatttctcattccagccagaccgcccccttggcacaaggttgacagtcacactcacacagcatgtccaaccaccggagcctcgagacctgcagattagtacagaccaggaccatttcctcttgacctggtccgtcgctctcggtagtccacaatcccattggttgtcaccgggggatcttgagttcgaagtagtctacaagcggctgcaggactcttgggaagatgctgccatcctgctgtctaacacatcgcaggccactctgggtcccgaacatttgatgccttcttccacatatgtggccagagtgcggacgcggctggcaccaggatcacggttatctggccgccccagcaagtggagccccgaagtttgctgggacagccagccgggagatgaagcccagccccagaatctggagtgttttttcgatggcgcagccgtactttcttgttcttgggaagtccgcaaggaggtggcctcctctgtatctttcggtctcttctacaaaccatccccagatgcgggatctgcagtgctgttacgcgaagaggagtgtagcccggtcctcagagagggcctggggtctctgcacactcggcaccactgtcagattcccgtgcccgacccagccactcatggccaatacatagtttcagttcagccacgaagggccgagaaacatattaagtcatccgtcaatattcaaatggctcctccctccttgaacgttaccaaggatggggatagttactccttgaggtgggaaactatgaaaatgcgctatgagcatattgatcacacatttgaaattcaataccggaaggacaccgctacttggaaggacagcaagacagaaacccttcaaaacgcccacagcatggcacttccagccctggaaccaagtactcgctattgggctagggtgcgggttaggacatccagaaccggatacaacggaatctggtccgagtggtctgaggcacgtagttgggatacagaatcggtcctcccaatgtgggtgcttgcactcattgtcatttttctgacgatcgctgttcttcttgcactgagattttgtggaatttatggttatcgtctaagacggaagtgggaggaaaaaataccaaaccccagtaaaagtcacctttttcagaatggaagtgctgaattatggcccccaggaagcatgtcagcattcactagtggatctccaccccatcaaggaccatggggtagccgttttcctgagctcgagggagtttttcctgtggggttcggggatagcgaagtcagtccactcacaattgaagacccaaaacacgtgtgtgaccctcccagcggcccagatacaacaccagccgcctcagaccttccaacggaacagccaccgtccccccaacctggcccgcctgcggcctctcatacaccggagaaacaggctagttctttcgactttaacggaccatacctcggtcccccgcacagtcgaagcttaccagatatactgggccagccagaacctccgcaggaaggtggtagccagaaatctccgcctcctgggtcccttgagtacctatgtcttccggccggtggccaggtgcaattggttcccctggcacaggctatgggccctgggcaggccgtggaggtggaacgtcgtccgtctcagggcgctgcgggatctcccagtctggagtccggcggaggcccagccccaccagccctgggccccagagtgggaggccaggaccagaaagactctcccgtcgccattcctatgtcctctggtgatacagaagaccctggggtggcatccggctacgtgtccagcgcagatctggtcttcacccctaatagtggggcgtcctcagtttctttggtgcccagcctcggcttgccatccgaccagacgccaagcctgtgtccagggttagcttcagggcctccaggcgcgcccggacccgtgaaatccggttttgaagggtacgtcgaactgcccccaatcgaagggaggagcccaaggtcccctagaaataacccagtccctccggaggcaaaaagccctgttctcaaccctggggagcgaccggccgatgtgtcgccaacaagtcctcaacccgaggggctgttggttctgcaacaagttggagactactgcttcttgcctggtctgggacctgggccactgtcccttcgctccaagccttcgagccccgggcctggtcccgagattaagaatttggaccaggcctttcaggtgaaaaagccaccaggccaggctgtgccgcaggttcccgtgatccagctcttcaaagcacttaagcaacaagactatctcagtcttcctccttgggaggtcaacaagcccggggaggtctgctag

SEQ ID NO: 277349 - DNA, 2535 bp, Artificial Sequence
  derived and/or modified sequence
atggggaagctcagaccgtggcgtgacctgctggagcctgtctcttgcgatctgagtgacgatatgccgtggagcgcctgcccccatccccggtgcgtccccagaaggtgcgtgattccctgtcaaagctttgtcgtgaccgatgttgattacttcagctttcagcctgaccgtcccctgggcacaaggttgacagtaactctaacacagcatgttcaaccaccagaacctagagacctccaaatttctaccgatcaagaccattttctgctgacctggagcgtggccttgggctctccacagtcccattggctttctccaggagatctggagtttgaggttgtctataagcggctccaggactcttgggaggacgcagccatcctactgagcaatacctcccaagctacgctggggcctgaacacctcatgccctcatctacatatgtcgctagagtgcgaacaagactagcaccaggctcccggctgtcaggcagaccttctaagtggagtccagaggtgtgctgggactctcagcccggcgacgaggctcaaccacagaacctggaatgcttcttcgatggcgccgcggtgctgtcctgttcatgggaggtcaggaaagaagtggcttcttctgtgtcctttggcctcttttacaagccctctcccgatgctggttcagccgtgcttctgagagaggaagaatgctcgcccgtactccgggagggactgggctcattacacacgaggcatcattgtcagattccagtgccggatcccgccactcacggtcagtacatagtatctgtccagccccggcgggctgaaaagcacatcaagagtagtgtgaatattcagatggctcccccctctctcaacgttactaaggacggcgacagttacagtctgaggtgggaaactatgaagatgcgttacgaacacattgatcatacgttcgagatccagtatcgcaaggacacagctacatggaaggattcaaagacggagactttgcagaacgcccatagtatggcactccctgcgctggagccctctacaagatactgggccagggtgcgggtacggacctcccggaccggctacaacggcatctggtcagagtggtctgaggcccgttcttgggacacagagagcgtactccctatgtgggtactggccctcatcgtgatatttttgacaattgccgttctcctggcgcttagattttgcggcatttatggttatcgactgcggaggaaatgggaggagaagatacccaacccttccaaaagtcatctgttccagaacggaagtgccgaactctggccccctggctctatgtccgcattcaccagcggctctccgccccaccagggtccatggggatcacgatttcccgagctggagggcgttttccctgtgggtttcggtgattcagaggtgagtcctctgacgattgaagaccccaagcatgtctgtgatccccctagtggacccgacacgacacctgcagcatcggatctgcctactgagcagccaccaagtccacagccaggccctcctgccgcgtcacacacaccggagaaacaggcctcatctttcgactttaatggcccatacctgggtcctcctcatagtagaagtctgccggatatcctcggccagcccgaaccacctcaagaaggcgggtcccaaaagagtcccccccccgggtccctggaatacctgtgtctgcccgccggtgggcaagtgcaattagttcccctggcacaggccatgggtccaggacaggcagtggaagtcgaacggcgcccaagccagggggcagctggcagccccagtctagagtcaggcggtgggccggccccgcctgctttggggccaagggtgggaggccaggaccaaaaggatagtccggtcgccatacccatgagtagcggtgatacagaggaccccggcgttgcgtctggctatgtatccagtgctgatctggtgttcacaccaaacagcggggctagtagtgtcagcctcgtgcccagtcttggcctgccatccgatcagaccccatccctgtgtcccggcctagctagcggcccccccggcgcccctggaccagtcaagagcggatttgagggctacgtggagctccctcccatcgagggaaggtccccacggtccccccgaaacaaccccgtgcctccagaggcaaagtcccccgtcctgaatcccggagagcgccctgcagacgtttcaccaacatctccacagcccgaggggctccttgtgctgcagcaagtcggggattattgctttttgcccggcctggggccgggacccctcagcctgcgttctaagccatcctcgcccggcccagggcccgaaattaaaaatcttgaccaggcatttcaggtgaagaaaccaccaggccaggctgtccctcaggttcccgtgattcagctttttaaagcactgaagcagcaggattatttatccctgcctccttgggaggtgaacaaaccaggagaagtctgttag

SEQ ID NO: 277350 - DNA, 2712 bp, Artificial Sequence
  derived and/or modified sequence
atggtgctggcccagggcctgctgtccatggccctgctggccctgtgctgggagaggagcctggccggggctgaggagaccatccccctgcagaccctgcgctgctacaatgactacaccagccacatcacctgccgctgggccgacacccaggatgcccagaggctggtgaatgtgaccctcatcagaagagtgaatgaagacctgctggagcctgtgtcctgtgacctgagtgatgacatgccctggagcgcctgcccccacccccgctgtgtgccccggcgctgcgtcatcccctgccagagctttgtggtgacagatgtggactacttctccttccagcctgaccggcccctgggcacccggctgactgtgaccctgacccagcacgtgcagcccccagagccccgggacctgcagatcagcacagaccaggaccacttcctgctgacctggagcgtggccctgggcagcccccagagccactggctgagccctggggacctggagtttgaggtggtgtacaagaggctgcaggacagctgggaggatgctgccatcctgctgagcaacaccagccaggccaccctgggccctgagcacctgatgcccagcagcacctacgtggcccgggtgaggacccggctggcccctggcagccggctgagcggccggcccagcaagtggagccctgaggtgtgctgggacagccagcctggagatgaggcccagccccagaacctggagtgcttctttgatggagctgctgtgctgagctgctcctgggaggtgaggaaggaggtggccagctctgtgtcctttggcctcttctacaagcccagcccagatgctggcagcgctgtgctgctgcgggaggaggagtgcagccctgtgctgcgggagggcctgggcagcctgcacaccaggcaccactgccagatccctgtgcctgaccctgccacccacggccagtacatcgtgtctgtgcagccccggcgggcagagaagcacatcaagagctctgtgaacatccagatggccccacccagcctgaatgtgaccaaggatggagacagctacagcctgcgctgggagaccatgaagatgagatatgagcacatcgaccacacctttgagatccagtacaggaaggacacagccacctggaaggacagcaagacagagaccctgcagaatgcccacagcatggccctgcctgccctggagcccagcacccgctactgggcccgggtgcgggtgaggaccagcaggacaggctacaacggcatctggagcgagtggagcgaggcccgctcctgggacacagagagcgtgctgcccatgtgggtgctggccctgattgtcatcttcctgaccatcgctgtgctgctggccctgcgcttctgtggcatctacggctaccgcctgcggaggaagtgggaggagaagatccccaaccccagcaagagccacctgttccagaatggatctgctgagctgtggcccccaggctccatgtctgccttcaccagcggcagccccccccaccagggcccctggggcagccgcttccctgagctggagggcgtcttccctgtgggctttggagacagcgaggtgagccccctgaccatcgaggaccccaagcacgtgtgtgacccccccagcggccctgacaccaccccagctgccagtgacctgcccacagagcagccccccagcccccagcccggccccccagctgccagccacaccccagagaagcaggccagcagctttgacttcaacggcccctacctgggccccccccacagccgcagcctgcctgacatcctgggccagcctgagcccccccaggagggcggcagccagaagagccccccacctggcagcctggagtacctgtgcctgcctgctgggggccaggtgcagctggtgcccctggcccaggccatgggccctggccaggccgtggaggtggagcggcggcccagccagggcgctgctggcagccccagcctggagagcggcggcggccctgcccccccagccctgggcccccgggtgggcggccaggaccagaaggacagccctgtggccatccccatgagcagcggggacacagaagatcctggggtggccagcggctacgtgagcagcgctgacctggtgttcacccccaacagcggggccagctctgtgtccctggtgcccagcctgggcctgcccagcgaccagacccccagcctgtgccccggcctggccagcggccccccaggggcccctggccctgtgaagagcggctttgagggctacgtggagctgccccccatcgagggccgcagccccaggagccccaggaacaaccctgtgcccccagaggccaagagccctgtgctgaaccctggagagaggcctgcagatgtgagccccaccagcccccagcctgagggcctgctggtgctgcagcaggtgggggactactgcttcctgcccggcctgggccctggccccctgagcctgcggagcaagcccagcagccctggccctggccctgagatcaagaacctggaccaggccttccaggtgaagaagcccccaggccaggccgtgccccaggtgcctgtgatccagctgttcaaggccctgaagcagcaggactacctgagcctgcccccctgggaggtgaacaagccaggagaggtgtgctag

SEQ ID NO: 277351 - DNA, 2535 bp, Artificial Sequence
  derived and/or modified sequence
atgggcaagctgcggccctggagggacctgctggagcctgtgtcctgtgacctgagtgatgacatgccctggagcgcctgcccccacccccgctgtgtgccccggcgctgtgtgatcccctgccagagctttgtggtgacagatgtggactacttctccttccagcctgaccggcccctgggcacccggctgactgtgaccctgacccagcacgtgcagcccccagagccccgggacctgcagatcagcacagaccaggaccacttcctgctgacctggagcgtggccctgggcagcccccagagccactggctgagccctggggacctggagtttgaggtggtgtacaagaggctgcaggacagctgggaggatgctgccatcctgctgagcaacaccagccaggccaccctgggccctgagcacctgatgcccagcagcacctacgtggcccgggtgaggacccggctggcccctggcagccggctgagcggccggcccagcaagtggagccctgaggtgtgctgggacagccagcctggagatgaggcccagccccagaacctggagtgcttctttgatggagctgctgtgctgagctgctcctgggaggtgaggaaggaggtggccagctctgtgtcctttggcctcttctacaagcccagcccagatgctggcagcgctgtgctgctgcgggaggaggagtgcagccctgtgctgcgggagggcctgggcagcctgcacaccaggcaccactgccagatccctgtgcctgaccctgccacccacggccagtacatcgtgtctgtgcagcccaggagagctgagaagcacatcaagagctctgtgaacatccagatggccccacccagcctgaatgtgaccaaggatggagacagctacagcctgcgctgggagaccatgaagatgagatatgagcacatcgaccacacctttgagatccagtacaggaaggacacagccacctggaaggacagcaagacagagaccctgcagaatgcccacagcatggccctgcctgccctggagcccagcacccgctactgggcccgggtgcgggtgaggaccagcaggacaggctacaacggcatctggagcgagtggagcgaggcccgctcctgggacacagaatctgtgctgcccatgtgggtgctggccctgattgtcatcttcctgaccatcgctgtgctgctggccctgcgcttctgtggcatctacggctaccgcctgcggaggaagtgggaggagaagatccccaaccccagcaagagccacctgttccagaatggcagcgctgagctgtggcccccaggctccatgtctgccttcaccagcggcagccccccccaccagggcccctggggcagccgcttccctgagctggagggcgtcttccctgtgggctttggagacagcgaggtgagccccctgaccatcgaggaccccaagcacgtgtgtgaccccccatctggccctgacaccaccccagctgccagtgacctgcccacagagcagccccccagcccccagcccggccccccagctgccagccacaccccagagaagcaggccagcagctttgacttcaacggcccctacctgggccccccccacagccgcagcctgcctgacatcctgggccagcctgagcccccccaggagggcggcagccagaagagccccccacctggcagcctggagtacctgtgcctgcctgctgggggccaggtgcagctggtgcccctggcccaggccatgggccctggccaggccgtggaggtggagcggcggcccagccagggcgccgccggcagccccagcctggagagcggcggcggccctgcccccccagccctgggcccccgggtgggcggccaggaccagaaggacagccctgtggccatccccatgagcagcggggacacagaggaccccggggtggccagcggctacgtgtcctctgctgacctggtgttcacccccaacagcggggccagctctgtgtccctggtgcccagcctgggcctgcccagcgaccagacccccagcctgtgccccggcctggccagcggccccccaggggcccctggccctgtgaagagcggctttgagggctacgtggagctgccccccatcgagggccgcagccccaggagccccaggaacaaccctgtgcccccagaggccaagagccctgtgctgaaccctggagagaggcctgcagatgtgagccccaccagcccccagcctgagggcctgctggtgctgcagcaggtgggggactactgcttcctgcccggcctgggccctggccccctgagcctgcggagcaagcccagcagccctggccctggccctgagatcaagaacctggaccaggccttccaggtgaagaagcccccaggccaggccgtgccccaggtgcctgtgatccagctgttcaaggccctgaagcagcaggactacctgagcctgcccccctgggaggtgaacaagccaggagaggtgtgctag

SEQ ID NO: 277352 - DNA, 2712 bp, Artificial Sequence
  derived and/or modified sequence
atggtgctggcccagggcctgctgagcatggccctgctggccctgtgctgggagcggtcactcgccggagcagaagaaacaataccactccagaccttgcggtgctacaatgattacacgtcccacatcacttgccgctgggctgatactcaggatgctcagaggctggtgaatgtgacattgatccgtcgcgtgaacgaggatctgctggagcctgtgtcttgcgacttgtctgacgacatgccctggtcagcatgcccccatccacgttgtgtcccacggagatgcgtgattccctgccagagtttcgtcgtgactgacgtcgactattttagctttcagcccgaccgccccctggggacacgacttacagttaccctgacacagcatgttcagccacccgagccacgggatctgcagatttcgactgatcaggatcattttttgctcacctggtccgtggccctcggatcgccacagagtcactggctatcacctggcgatttagaattcgaggtggtgtataaaaggttgcaggacagctgggaagatgcggccatcctcctgtctaatacgtctcaagcgacgcttgggcctgaacaccttatgccaagcagcacatacgttgccagggtcaggactaggctcgccccagggtcccgcctctccggacggccatctaaatggtctcccgaggtatgctgggacagccagccaggggatgaagcccagccccaaaacttagagtgcttcttcgatggggctgcggttctgagctgttcatgggaggttaggaaagaggtggcctcgagcgtctcgttcggcctgttttacaagccaagtccagacgccggttcagctgttctgcttcgcgaggaagaatgctcccctgtgctgagggaaggcctcggatcactccataccagacatcattgtcagatcccggtgccagaccccgcaactcatgggcagtatatcgtaagcgttcaaccgaggcgtgctgagaagcacatcaagtcctctgtcaatattcagatggcccccccttccttgaatgtcactaaggacggtgatagctattccctgagatgggagacaatgaaaatgcgctatgagcacatcgaccatacctttgagattcagtatcgcaaggatacagcaacgtggaaagactccaagactgagactctgcagaatgcccatagtatggccctccccgcactggaaccatccacccgatattgggccagagtgcgagtacgcacctcccggacaggctataatgggatatggtccgagtggagtgaggccaggtcctgggacacagagagtgtcttgcctatgtgggtgttggcattgattgtgatttttttaaccattgcagtgctcctcgccctccgtttctgtggcatctatggctatagactgcgtagaaagtgggaggagaagataccaaatccttcaaaaagtcacctgttccaaaacggctcggccgaactctggcctccaggctctatgagcgctttcacttctggatctccaccacatcagggcccttggggaagcagattccccgagctggagggggtgttcccagtggggttcggcgactctgaggtgtctccacttactatcgaggatcctaagcacgtctgcgacccaccatccggtcccgacacgacgccagccgccagtgacctgcctaccgaacagcccccctctccccagccgggacctccagcagcgtcccacacacctgaaaaacaggcttccagctttgatttcaatggcccctacctgggccctccccactctaggagcctccctgatatcttaggacaacccgagcccccccaggaaggggggtctcagaagagtcctcctcctggaagcctggagtacttatgtctacccgcgggaggtcaagtgcagctcgttcccctggctcaggccatggggccaggccaggcggtggaggttgagcgtagaccctctcagggagcggcggggagcccatcactggagtcaggggggggcccagctcccccagcccttgggccgcgtgtcggcggtcaagaccagaaggacagtccagtagctattcccatgtcctctggtgacacagaagatcctggggtagctagcgggtacgtgagcagcgctgatctggtgtttactcccaatagcggtgcctcaagcgtcagcctcgtgccctccctgggattaccgagtgatcagaccccaagtctttgtcccgggctggcttccgggccccctggggctcctggccctgttaaaagcgggttcgagggttatgtggaactcccacccatagagggtagatcacctagaagtccaagaaacaatcctgttccccctgaagccaagtctcccgttctcaacccaggcgaacggcccgcggatgtgagtcccacctctcctcagcctgaaggcttactggtgctgcagcaagtgggggattattgcttcctgcctggccttggacctggccccctgtcgttgcgtagcaaaccctccagccctggccctgggcccgagattaagaatctggatcaggcttttcaggtaaaaaaacctcccggccaggctgtacctcaggtgccagtaatccagctgtttaaagctctgaaacaacaagactacctatctctgcctccttgggaggtgaataaaccaggagaggtatgttag

SEQ ID NO: 277353 - DNA, 2535 bp, Artificial Sequence
  derived and/or modified sequence
atgggcaagctgcggccctggcgggacctgctggagcccgtgagctgcgatctttcggatgatatgccttggtcagcatgcccacaccctaggtgcgtacctaggcggtgtgtgatcccatgtcagagtttcgtggtaaccgatgtggattacttttcatttcaacctgaccgcccgctgggaactagactgaccgtcaccctgactcaacatgttcagccgcccgagcctcgagatcttcagatctccacagaccaagaccattttttgctcacctggtctgtagcgctgggctccccccaatctcactggctgtcccccggagacctcgagtttgaggtggtttacaagcggcttcaggactcctgggaggacgccgccatcctactgtccaacacctcacaggcaaccttagggccagaacacctgatgccctcatcgacctatgtcgcccgggtgaggacgaggctggctcccggctccaggctgagcggtcggccgtcaaagtggtcgccagaggtgtgttgggattctcagccaggcgatgaggcccagccccagaacttggagtgcttcttcgacggcgctgctgttttaagctgttcctgggaggtgcgcaaagaggtcgcgagcagtgtttcgtttggactgttctataagcctagtccagacgctggctctgccgttctgcttcgcgaagaagagtgctctcccgtccttcgggaaggtttgggcagcctgcatactagacatcactgccagataccggttcccgatcctgctacccatggccaatatatcgtcagcgtgcagccccgccgcgcagaaaagcacatcaaatcatccgtgaatatccagatggccccacccagcttaaatgtgacgaaagacggcgacagttacagtttacgttgggagaccatgaaaatgcgctacgaacatattgatcacactttcgaaatccaatatcgcaaagacacagccacctggaaggattctaagaccgaaactttgcagaacgcacactctatggcactacccgcactggaaccttcgaccagatactgggcgagagtgcgggtcagaacctcccgcaccgggtataacggaatctggagcgagtggagcgaagcgagatcatgggacacagagtccgtccttccaatgtgggttcttgcactcatagttattttccttactatcgctgtgctgctcgcgttgaggttctgtggcatctacggttatcggctgaggcggaagtgggaggaaaaaatcccgaacccaagcaagtcccatctgttccaaaatggctctgctgaattgtggccccctggaagtatgtccgccttcacaagcgggagtccacctcatcaaggcccatggggatcccgctttcccgagcttgagggcgtgttccctgttgggtttggggactctgaggtcagtccattgactattgaggatcctaagcacgtgtgcgacccccccagcggcccggataccaccccggccgctagtgacttacccaccgaacagccacccagccctcagcctggccctcctgccgctagtcacaccccagaaaagcaagcaagctctttcgacttcaatggcccctacttaggaccgccccattcacgaagcctgccagacatcctgggacaaccggaacccccacaggagggcggaagccagaagagcccaccccctgggagcctggagtatctgtgcctgccagccggcgggcaggtccagctcgtgccgcttgcccaagctatgggccccggccaggctgtggaagtggagaggaggcctagccaaggtgcagctgggtcaccctcacttgagagcggaggtgggcccgccccacccgccctggggccccgcgtgggcggtcaggatcagaaggattcaccggtcgccatcccaatgtcctctggtgataccgaagaccccggtgtggcgtctggctatgtgtcgagcgcggacctcgtgttcactccaaattcgggggcttccagtgtgagcctggttccgagtttaggactgccgagtgaccagacaccttccctgtgccccggcctggctagcggacctcccggcgccccgggtcccgttaaatcggggttcgaggggtatgttgagctgccgcctatcgaggggaggtctccccggtcaccccgcaataatcccgttccacctgaagccaagtctccagttttgaatccaggggagaggcctgcagatgtgtccccaacatccccacagcccgaaggcctgctggttctgcagcaggttggcgactattgttttctgccgggtctaggtcccggacctttgagcctgcgctcaaagcctagctctccaggacctggcccagagatcaagaacctggatcaggccttccaggtaaaaaagccacctgggcaggccgtgccacaggtgccagtgattcagcttttcaaggccttaaagcagcaagattatctatccctcccaccatgggaggtaaacaagcccggcgaggtgtgttag

SEQ ID NO: 277354 - DNA, 2712 bp, Artificial Sequence
  derived and/or modified sequence
atggtgctggcacaggggctgctaagtatggccttgctggccctttgttgggaacgtagcttagcaggtgccgaggagactatccctcttcaaacactgcgctgctacaatgattatacctcccacataacctgcagatgggctgatacacaggatgcgcaaaggctggtgaatgttacgttaatccggcgagtgaatgaggacctgcttgagcctgtgtcatgcgacctgtcggacgacatgccctggtcggcgtgtccccaccccaggtgcgttccacggcgatgtgttatcccctgccagagctttgtcgtcactgatgtggactattttagcttccagcctgatcggccactcggcacgcgcctgactgtgacgctgacgcagcatgtccaaccacccgaacctcgcgatcttcagattagcaccgatcaggaccattttcttttgacttggagcgtcgcacttggaagtcctcagtcgcattggttaagccccggagatctagaattcgaagtggtatacaagcgcctccaggattcgtgggaggatgctgccatcttgttatcgaacactagtcaggccactctcggcccagagcatctgatgccaagctcgacatacgtggcaagagtgcgtactaggctggcccctggttcgaggctttctggacgtccctccaagtggtcgcccgaggtttgctgggattcacagcccggtgatgaggcccagcctcaaaatctggaatgtttctttgacggcgctgccgtcctgagctgctcttgggaggtacgaaaggaggtggcatccagcgtgtctttcggtcttttttacaagccttcaccggatgcagggtccgctgtgctccttcgggaggaggagtgtagccctgttcttagggagggacttggatccctgcatacacggcaccattgccaaatccctgtgcccgacccggctacgcatgggcagtacattgtgtccgtgcaaccacgtcgggctgagaagcatattaagagcagcgtcaacattcagatggcaccacccagtctcaacgtcactaaggatggggattcctattccctcagatgggagaccatgaagatgagatacgagcacattgaccatacattcgaaattcagtataggaaggatacagctacttggaaggactccaaaacagagaccctgcaaaatgcccacagtatggctctgccagccctagagccatccacgcggtactgggccagagtgagagtccggacctcaaggacgggatataacggcatctggtcagaatggagcgaggctcgctcgtgggacaccgagtccgttctgccaatgtgggtgctcgccctgatcgtgatctttttgacaatcgctgtgctgctcgctctaagattctgtggaatctatggctatcgtctgcgcaggaagtgggaggagaaaatacccaacccatcaaaatcccaccttttccagaacggtagcgcagagctctggcctcctgggtcaatgtcggcgttcaccagtggctcaccaccacatcagggcccatgggggtcacgttttccagagctggaaggagtgtttccagtcggtttcggggatagtgaagttagccctctaacaatagaggatccaaagcatgtgtgtgacccaccgtctgggcctgatacaacaccagctgcaagtgacctccctaccgaacaacccccaagtcctcaaccaggcccacccgctgcttcccatacccctgaaaaacaggcctctagttttgacttcaacggaccttacttagggcctccccattcaagatccctgcccgacattttgggtcagccagaaccacctcaggaggggggaagtcagaagtcacctccacctggtagcctggagtatttgtgcttacccgctggaggacaggtacagctggttccactcgcccaggctatgggtccgggacaggctgtggaggtagagaggcggccttcacagggagccgctggatctccaagtctcgaaagtgggggagggccagcccctcccgctctgggacccagagttggaggccaggatcagaaggattcacccgtcgccatacctatgtccagcggggatacggaagacccaggtgtggccagtggttatgtgtcaagcgctgatttggtatttactcccaattctggcgcatcctccgtgtccctggttcctagtttgggccttcctagcgaccaaacacctagcctgtgccccggattggcgtccggccctcccggagccccagggcctgtgaagtctggctttgaaggctacgtggagctccctccaattgaggggaggagcccaaggagtccaagaaataaccccgtgccgccagaagccaagtcgccggtcttgaatcctggcgagcgacccgctgacgtgtcccctaccagccctcagcctgaaggcctcctcgtacttcagcaggtgggcgattactgttttctccccggacttggaccaggacccctgtcactgagatctaaaccatcctcccctgggcctggtcctgagattaaaaacttggaccaggcattccaggttaaaaaacccccaggccaagccgtgccacaggtgcctgtcattcagttattcaaggccctcaagcagcaagactacctatcactgcctccctgggaagtcaataagcctggcgaggtctgctag

SEQ ID NO: 277355 - DNA, 2535 bp, Artificial Sequence
  derived and/or modified sequence
atgggaaaacttagaccatggcgggatctcttggagccagtcagctgtgacctgagcgatgacatgccttggagcgcctgtcctcacccacggtgtgtgccaaggaggtgcgtcatcccttgtcagtccttcgtggtgactgacgttgattattttagcttccagccagaccgaccactgggaacccggttaactgtgaccctgactcaacatgttcagccacccgaacctagagacctacagatttcgactgaccaggatcacttcctgctgacatggtccgtcgccctgggaagcccacagagccattggttgagccccggtgacctggaattcgaagtagtttataaacgcttgcaggactcctgggaggacgctgccatcctgctgtcaaacacgtcacaagctacattgggcccagagcatctaatgccttcttccacgtatgttgccagggttagaacacgcctggccccagggagcagactgtctggcaggccgagtaaatggtcccccgaggtgtgctgggactcccagcctggcgatgaggcccaacctcaaaacctggaatgttttttcgacggcgctgcggtcttgtcatgcagttgggaagtgagaaaggaggttgcctctagcgtgagcttcggacttttttataagccgtcacccgatgcaggatctgctgtgcttctgagagaagaggaatgtagcccagtgctgcgcgaaggtctaggtagccttcataccagacatcactgtcagatccctgtcccagaccctgccacacacggtcagtatatcgtgtcagtccagccgagacgcgcagaaaagcacattaaatccagcgtgaacatccagatggcccctccatccctgaacgtgaccaaagatggggattcctacagcctacggtgggagaccatgaaaatgaggtacgaacacatcgatcacaccttcgaaatacaatatcggaaggacaccgcgacctggaaggacagcaagacggagaccctccagaacgctcactccatggcactgccggcattggagcccagtaccaggtactgggctcgggtacgtgtgcgcacgtcccgcactggatacaacgggatatggagtgaatggtctgaggcacgcagctgggataccgagtctgtgctcccaatgtgggtgttggcgctgattgtgatctttttgactatcgctgtccttctcgcattgagattctgcggaatctacggatacaggctgcggcgaaaatgggaagaaaaaattccaaatccgtctaaatcccacctttttcagaacggctccgcggagctgtggccaccgggatccatgagtgcttttaccagtggcagcccgcctcatcagggcccttggggatccagattcccagagctcgagggcgtgtttcccgtgggattcggcgatagtgaagtttccccccttacaatcgaggatccaaagcacgtgtgcgaccctcccagcgggcctgacacaactcccgctgctagcgacctgccgaccgaacaaccaccttccccacaacctggccctccagcagcctctcatacacctgagaagcaggcctcatcattcgatttcaacggaccgtacctgggtccaccgcattccagatcattacccgatatactggggcagccagagcctccccaggagggtggaagccaaaagagtcctcctcctggctcactcgaatacttgtgcctgcctgctggcggtcaggtgcagctagtaccgttagctcaggctatggggccagggcaagctgtagaggttgaaaggaggccatcacaaggcgctgctggtagcccatcactcgaatctggagggggacccgcaccccctgctctaggaccacgggtcgggggacaggatcagaaggactctccagtggccatcccaatgtcttccggcgacacagaggatccaggcgtggctagcggctacgtgtctagtgccgacctcgtcttcaccccaaattcaggcgcatcaagcgtgagtctcgtcccatcactagggctgccctccgaccagactcctagtctgtgccccggtttagcaagcggaccccctggtgcccctggtccagtgaagagtgggtttgagggctacgtggaactgccacccatcgaaggcagaagccctaggagccctagaaacaatccggtgcccccagaggccaagagcccagtgctgaacccaggggagcgcccagcggacgttagtcctacaagcccacagccagagggtcttctcgtgctgcaacaagtaggcgactactgctttctccctggactgggcccaggccctctgagcctccgctccaagccgtctagtccaggacccggtccagaaatcaagaatctagaccaggctttccaggtgaagaagcccccaggacaggcagtgcctcaggttcccgtcatccagcttttcaaagccctgaaacaacaggattacctgtccctgcccccatgggaagtgaataagccaggcgaagtctgttag

SEQ ID NO: 277356 - DNA, 4866 bp, Artificial Sequence
  derived and/or modified sequence
gcctagaggctccagaagaagactggtctctcccaccacacagaggcctggaggaggcagaggccaggagggagaggtcccaagagcctgtgaaatgggtctggcctggctcccagctgggcaggaacacaggacttcaggacactaaggaccctgtcatgcccatggccagcacccaccagtgctggtgcctgcctgtccagagctgaccagggagatggtgctggcccaggggctgctctccatggccctgctggccctgtgctgggagcgcagcctggcaggggcagaagaaaccatcccgctgcagaccctgcgctgctacaacgactacaccagccacatcacctgcaggtgggcagacacccaggatgcccagcggctcgtcaacgtgaccctcattcgccgggtgaatgaggacctcctggagccagtgtcctgtgacctcagtgatgacatgccctggtcagcctgcccccatccccgctgcgtgcccaggagatgtgtcattccctgccagagttttgtcgtcactgacgttgactacttctcattccaaccagacaggcctctgggcacccggctcaccgtcactctgacccagcatgtccagcctcctgagcccagggacctgcagatcagcaccgaccaggaccacttcctgctgacctggagtgtggcccttgggagtccccagagccactggttgtccccaggggatctggagtttgaggtggtctacaagcggcttcaggactcttgggaggacgcagccatcctcctctccaacacctcccaggccaccctggggccagagcacctcatgcccagcagcacctacgtggcccgagtacggacccgcctggccccaggttctcggctctcaggacgtcccagcaagtggagcccagaggtttgctgggactcccagccaggggatgaggcccagccccagaacctggagtgcttctttgacggggccgccgtgctcagctgctcctgggaggtgaggaaggaggtggccagctcggtctcctttggcctattctacaagcccagcccagatgcaggctctgctgtgctcctcagggaggaagagtgctccccagtgctgagggaggggctcggcagcctccacaccaggcaccactgccagattcccgtgcccgaccccgcgacccacggccaatacatcgtctctgttcagccaaggagggcagagaaacacataaagagctcagtgaacatccagatggcccctccatccctcaacgtgaccaaggatggagacagctacagcctgcgctgggaaacaatgaaaatgcgatacgaacacatagaccacacatttgagatccagtacaggaaagacacggccacgtggaaggacagcaagaccgagaccctccagaacgcccacagcatggccctgccagccctggagccctccaccaggtactgggccagggtgagggtcaggacctcccgcaccggctacaacgggatctggagcgagtggagtgaggcgcgctcctgggacaccgagtcggtgctgcctatgtgggtgctggccctcatcgtgatcttcctcaccatcgctgtgctcctggccctccgcttctgtggcatctacgggtacaggctgcgcagaaagtgggaggagaagatccccaaccccagcaagagccacctgttccagaacgggagcgcagagctttggcccccaggcagcatgtcggccttcactagcgggagtcccccacaccaggggccgtggggcagccgcttccctgagctggagggggtgttccctgtaggattcggggacagcgaggtgtcacctctcaccatagaggaccccaagcatgtctgtgatccaccatctgggcctgacacgactccagctgcctcagatctacccacagagcagccccccagcccccagccaggcccgcctgccgcctcccacacacctgagaaacaggcttccagctttgacttcaatgggccctacctggggccgccccacagccgctccctacctgacatcctgggccagccggagcccccacaggagggtgggagccagaagtccccacctccagggtccctggagtacctgtgtctgcctgctggggggcaggtgcaactggtccctctggcccaggcgatgggaccaggacaggccgtggaagtggagagaaggccgagccagggggctgcagggagtccctccctggagtccgggggaggccctgcccctcctgctcttgggccaagggtgggaggacaggaccaaaaggacagccctgtggctatacccatgagctctggggacactgaggaccctggagtggcctctggttatgtctcctctgcagacctggtattcaccccaaactcaggggcctcgtctgtctccctagttccctctctgggcctcccctcagaccagacccccagcttatgtcctgggctggccagtggaccccctggagccccaggccctgtgaagtcagggtttgagggctatgtggagctccctccaattgagggccggtcccccaggtcaccaaggaacaatcctgtcccccctgaggccaaaagccctgtcctgaacccaggggaacgcccggcagatgtgtccccaacatccccacagcccgagggcctccttgtcctgcagcaagtgggcgactattgcttcctccccggcctggggcccggccctctctcgctccggagtaaaccttcttccccgggacccggtcctgagatcaagaacctagaccaggcttttcaagtcaagaagcccccaggccaggctgtgccccaggtgcccgtcattcagctcttcaaagccctgaagcagcaggactacctgtctctgcccccttgggaggtcaacaagcctggggaggtgtgttgagacccccaggcctagacaggcaaggggatggagagggcttgccttccctcccgcctgaccttcctcagtcatttctgcaaagccaaggggcagcctcctgtcaaggtagctagaggcctgggaaaggagatagccttgctccggcccccttgaccttcagcaaatcacttctctccctgcgctcacacagacacacacacacacacgtacatgcacacatttttcctgtcaggttaacttatttgtaggttctgcattattagaactttctagatatactcattccatctccccctcatttttttaatcaggtttccttgcttttgccatttttcttccttcttttttcactgatttattatgagagtggggctgaggtctgagctgagccttatcagactgagatgcggctggttgtgttgaggacttgtgtgggctgcctgtccccggcagtcgctgatgcacatgacatgattctcatctgggtgcagaggtgggaggcaccaggtgggcacccgtgggggttagggcttggaagagtggcacaggactgggcacgctcagtgaggctcagggaattcagactagcctcgattgtcactccgagaaatgggcatggtattgggggtcgggggggcggtgcaagggacgcacatgagagactgtttgggagcttctggggagccctgctagttgtctcagtgatgtctgtgggacctccagtcccttgagaccccacgtcatgtagagaagttaacggcccaagtggtgggcaggctggcgggacctggggaacatcaggagaggagtccagagcccacgtctactgcggaaaagtcaggggaaactgccaaacaaaggaaaatgccccaaaggcatatatgctttagggcctttggtccaaatggcccgggtggccactcttccagatagaccaggcaactctccctcccaccggccacagatgaggggctgctgatctatgcctgggcctgcaccagggattatggttcttttaaatctttgcctttcagatacaggaaaaataatggcattaaattgctttaatttgcattattttagttatccagtttgcacatatttttataggtatcttaggcatcgattggtattttttaactgggccaagcccattaaggtctttcttctgttgggtgctatcattttctgattaagtctttttgactattgacatacagtctttcacagatggtggagtgtttttcccccaaatctgttgtttgtcttataatgttgtatatgaggttttatggtgtatgaatatgaatgcttctgtaatgtcaaacagatccctagtaaactccttcttcacttttactgtcagatttacaaaggtcctcccattgcaaagcagtgtttgtcctaatttatatattgtttttctagttcattttgtgtttccaacttttcatgtaaaattttaattatttttgaatgtgtggatgtgagactgaggtgccttttggtactgaaattctttttccatgtacctgaagtgttacttttgtgatataggaaatccttgtatatatactttattggtccctaggcttcctattttgttaccttgctttctctatggcatccaccattttgattgttctacttttatgatatgttttcataagtggttaagcaagtattctcgttacttttgctcttaaatccctattcattacagcaatgttggtggtcaaagaaaatgataaacaacttgaatgttcaatggtcctgaaatacataacaacattttagtacattgtaaagtagaatcctctgttcataatgaacaagatgaaccaatgtggattagaaagaagtccgagatattaattccaaaatatccagacattgttaaagggaaaaaattgcaataaaatatttgtaacataaaa

SEQ ID NO: 277357 - DNA, 2765 bp, Artificial Sequence
  derived and/or modified sequence
agaccaaggagagatggcgctagcctgggagttcacagatgggaaaactgaggccctggagggacctcctggagccagtgtcctgtgacctcagtgatgacatgccctggtcagcctgcccccatccccgctgcgtgcccaggagatgtgtcattccctgccagagttttgtcgtcactgacgttgactacttctcattccaaccagacaggcctctgggcacccggctcaccgtcactctgacccagcatgtccagcctcctgagcccagggacctgcagatcagcaccgaccaggaccacttcctgctgacctggagtgtggcccttgggagtccccagagccactggttgtccccaggggatctggagtttgaggtggtctacaagcggcttcaggactcttgggaggacgcagccatcctcctctccaacacctcccaggccaccctggggccagagcacctcatgcccagcagcacctacgtggcccgagtacggacccgcctggccccaggttctcggctctcaggacgtcccagcaagtggagcccagaggtttgctgggactcccagccaggggatgaggcccagccccagaacctggagtgcttctttgacggggccgccgtgctcagctgctcctgggaggtgaggaaggaggtggccagctcggtctcctttggcctattctacaagcccagcccagatgcaggctctgctgtgctcctcagggaggaagagtgctccccagtgctgagggaggggctcggcagcctccacaccaggcaccactgccagattcccgtgcccgaccccgcgacccacggccaatacatcgtctctgttcagccaaggagggcagagaaacacataaagagctcagtgaacatccagatggcccctccatccctcaacgtgaccaaggatggagacagctacagcctgcgctgggaaacaatgaaaatgcgatacgaacacatagaccacacatttgagatccagtacaggaaagacacggccacgtggaaggacagcaagaccgagaccctccagaacgcccacagcatggccctgccagccctggagccctccaccaggtactgggccagggtgagggtcaggacctcccgcaccggctacaacgggatctggagcgagtggagtgaggcgcgctcctgggacaccgagtcggtgctgcctatgtgggtgctggccctcatcgtgatcttcctcaccatcgctgtgctcctggccctccgcttctgtggcatctacgggtacaggctgcgcagaaagtgggaggagaagatccccaaccccagcaagagccacctgttccagaacgggagcgcagagctttggcccccaggcagcatgtcggccttcactagcgggagtcccccacaccaggggccgtggggcagccgcttccctgagctggagggggtgttccctgtaggattcggggacagcgaggtgtcacctctcaccatagaggaccccaagcatgtctgtgatccaccatctgggcctgacacgactccagctgcctcagatctacccacagagcagccccccagcccccagccaggcccgcctgccgcctcccacacacctgagaaacaggcttccagctttgacttcaatgggccctacctggggccgccccacagccgctccctacctgacatcctgggccagccggagcccccacaggagggtgggagccagaagtccccacctccagggtccctggagtacctgtgtctgcctgctggggggcaggtgcaactggtccctctggcccaggcgatgggaccaggacaggccgtggaagtggagagaaggccgagccagggggctgcagggagtccctccctggagtccgggggaggccctgcccctcctgctcttgggccaagggtgggaggacaggaccaaaaggacagccctgtggctatacccatgagctctggggacactgaggaccctggagtggcctctggttatgtctcctctgcagacctggtattcaccccaaactcaggggcctcgtctgtctccctagttccctctctgggcctcccctcagaccagacccccagcttatgtcctgggctggccagtggaccccctggagccccaggccctgtgaagtcagggtttgagggctatgtggagctccctccaattgagggccggtcccccaggtcaccaaggaacaatcctgtcccccctgaggccaaaagccctgtcctgaacccaggggaacgcccggcagatgtgtccccaacatccccacagcccgagggcctccttgtcctgcagcaagtgggcgactattgcttcctccccggcctggggcccggccctctctcgctccggagtaaaccttcttccccgggacccggtcctgagatcaagaacctagaccaggcttttcaagtcaagaagcccccaggccaggctgtgccccaggtgcccgtcattcagctcttcaaagccctgaagcagcaggactacctgtctctgcccccttgggaggtcaacaagcctggggaggtgtgttgagacccccaggcctagacaggcaaggggatggagagggcttgccttccctcccgcctgaccttcctcagtcatttctgcaaagccaaggggcagcctcctgtcaaggtagctagaggcctgggaaaggagatagccttgctccggcccccttgaccttcagcaaatcacttctctccctgcgctcacacagac

SEQ ID NO: 277358 - DNA, 2712 bp, Artificial Sequence
  derived and/or modified sequence
atggtgctggcccagggcctgctgagcatggccctgctggccctgtgctgggagagaagcctggccggcgccgaggagaccatccccctgcagaccctgagatgctacaacgactacaccagccacatcacctgcagatgggccgacacccaggacgcccagagactggtgaacgtgaccctgatcagaagagtgaacgaggacctgctggagcccgtgagctgcgacctgagcgacgacatgccctggagcgcctgcccccaccccagatgcgtgcccagaagatgcgtgatcccctgccagagcttcgtggtgaccgacgtggactacttcagcttccagcccgacagacccctgggcaccagactgaccgtgaccctgacccagcacgtgcagccccccgagcccagagacctgcagatcagcaccgaccaggaccacttcctgctgacctggagcgtggccctgggcagcccccagagccactggctgagccccggcgacctggagttcgaggtggtgtacaagagactgcaggacagctgggaggacgccgccatcctgctgagcaacaccagccaggccaccctgggccccgagcacctgatgcccagcagcacctacgtggccagagtgagaaccagactggcccccggcagcagactgagcggcagacccagcaagtggagccccgaggtgtgctgggacagccagcccggcgacgaggcccagccccagaacctggagtgcttcttcgacggcgccgccgtgctgagctgcagctgggaggtgagaaaggaggtggccagcagcgtgagcttcggcctgttctacaagcccagccccgacgccggcagcgccgtgctgctgagagaggaggagtgcagccccgtgctgagagagggcctgggcagcctgcacaccagacaccactgccagatccccgtgcccgaccccgccacccacggccagtacatcgtgagcgtgcagcccagaagagccgagaagcacatcaagagcagcgtgaacatccagatggccccccccagcctgaacgtgaccaaggacggcgacagctacagcctgagatgggagaccatgaagatgagatacgagcacatcgaccacaccttcgagatccagtacagaaaggacaccgccacctggaaggacagcaagaccgagaccctgcagaacgcccacagcatggccctgcccgccctggagcccagcaccagatactgggccagagtgagagtgagaaccagcagaaccggctacaacggcatctggagcgagtggagcgaggccagaagctgggacaccgagagcgtgctgcccatgtgggtgctggccctgatcgtgatcttcctgaccatcgccgtgctgctggccctgagattctgcggcatctacggctacagactgagaagaaagtgggaggagaagatccccaaccccagcaagagccacctgttccagaacggcagcgccgagctgtggccccccggcagcatgagcgccttcaccagcggcagccccccccaccagggcccctggggcagcagattccccgagctggagggcgtgttccccgtgggcttcggcgacagcgaggtgagccccctgaccatcgaggaccccaagcacgtgtgcgacccccccagcggccccgacaccacccccgccgccagcgacctgcccaccgagcagccccccagcccccagcccggcccccccgccgccagccacacccccgagaagcaggccagcagcttcgacttcaacggcccctacctgggccccccccacagcagaagcctgcccgacatcctgggccagcccgagcccccccaggagggcggcagccagaagagccccccccccggcagcctggagtacctgtgcctgcccgccggcggccaggtgcagctggtgcccctggcccaggccatgggccccggccaggccgtggaggtggagagaagacccagccagggcgccgccggcagccccagcctggagagcggcggcggccccgccccccccgccctgggccccagagtgggcggccaggaccagaaggacagccccgtggccatccccatgagcagcggcgacaccgaggaccccggcgtggccagcggctacgtgagcagcgccgacctggtgttcacccccaacagcggcgccagcagcgtgagcctggtgcccagcctgggcctgcccagcgaccagacccccagcctgtgccccggcctggccagcggcccccccggcgcccccggccccgtgaagagcggcttcgagggctacgtggagctgccccccatcgagggcagaagccccagaagccccagaaacaaccccgtgccccccgaggccaagagccccgtgctgaaccccggcgagagacccgccgacgtgagccccaccagcccccagcccgagggcctgctggtgctgcagcaggtgggcgactactgcttcctgcccggcctgggccccggccccctgagcctgagaagcaagcccagcagccccggccccggccccgagatcaagaacctggaccaggccttccaggtgaagaagccccccggccaggccgtgccccaggtgcccgtgatccagctgttcaaggccctgaagcagcaggactacctgagcctgcccccctgggaggtgaacaagcccggcgaggtgtgctag

SEQ ID NO: 277359 - DNA, 2535 bp, Artificial Sequence
  derived and/or modified sequence
atgggcaagctgagaccctggagagacctgctggagcccgtgagctgcgacctgagcgacgacatgccctggagcgcctgcccccaccccagatgcgtgcccagaagatgcgtgatcccctgccagagcttcgtggtgaccgacgtggactacttcagcttccagcccgacagacccctgggcaccagactgaccgtgaccctgacccagcacgtgcagccccccgagcccagagacctgcagatcagcaccgaccaggaccacttcctgctgacctggagcgtggccctgggcagcccccagagccactggctgagccccggcgacctggagttcgaggtggtgtacaagagactgcaggacagctgggaggacgccgccatcctgctgagcaacaccagccaggccaccctgggccccgagcacctgatgcccagcagcacctacgtggccagagtgagaaccagactggcccccggcagcagactgagcggcagacccagcaagtggagccccgaggtgtgctgggacagccagcccggcgacgaggcccagccccagaacctggagtgcttcttcgacggcgccgccgtgctgagctgcagctgggaggtgagaaaggaggtggccagcagcgtgagcttcggcctgttctacaagcccagccccgacgccggcagcgccgtgctgctgagagaggaggagtgcagccccgtgctgagagagggcctgggcagcctgcacaccagacaccactgccagatccccgtgcccgaccccgccacccacggccagtacatcgtgagcgtgcagcccagaagagccgagaagcacatcaagagcagcgtgaacatccagatggccccccccagcctgaacgtgaccaaggacggcgacagctacagcctgagatgggagaccatgaagatgagatacgagcacatcgaccacaccttcgagatccagtacagaaaggacaccgccacctggaaggacagcaagaccgagaccctgcagaacgcccacagcatggccctgcccgccctggagcccagcaccagatactgggccagagtgagagtgagaaccagcagaaccggctacaacggcatctggagcgagtggagcgaggccagaagctgggacaccgagagcgtgctgcccatgtgggtgctggccctgatcgtgatcttcctgaccatcgccgtgctgctggccctgagattctgcggcatctacggctacagactgagaagaaagtgggaggagaagatccccaaccccagcaagagccacctgttccagaacggcagcgccgagctgtggccccccggcagcatgagcgccttcaccagcggcagccccccccaccagggcccctggggcagcagattccccgagctggagggcgtgttccccgtgggcttcggcgacagcgaggtgagccccctgaccatcgaggaccccaagcacgtgtgcgacccccccagcggccccgacaccacccccgccgccagcgacctgcccaccgagcagccccccagcccccagcccggcccccccgccgccagccacacccccgagaagcaggccagcagcttcgacttcaacggcccctacctgggccccccccacagcagaagcctgcccgacatcctgggccagcccgagcccccccaggagggcggcagccagaagagccccccccccggcagcctggagtacctgtgcctgcccgccggcggccaggtgcagctggtgcccctggcccaggccatgggccccggccaggccgtggaggtggagagaagacccagccagggcgccgccggcagccccagcctggagagcggcggcggccccgccccccccgccctgggccccagagtgggcggccaggaccagaaggacagccccgtggccatccccatgagcagcggcgacaccgaggaccccggcgtggccagcggctacgtgagcagcgccgacctggtgttcacccccaacagcggcgccagcagcgtgagcctggtgcccagcctgggcctgcccagcgaccagacccccagcctgtgccccggcctggccagcggcccccccggcgcccccggccccgtgaagagcggcttcgagggctacgtggagctgccccccatcgagggcagaagccccagaagccccagaaacaaccccgtgccccccgaggccaagagccccgtgctgaaccccggcgagagacccgccgacgtgagccccaccagcccccagcccgagggcctgctggtgctgcagcaggtgggcgactactgcttcctgcccggcctgggccccggccccctgagcctgagaagcaagcccagcagccccggccccggccccgagatcaagaacctggaccaggccttccaggtgaagaagccccccggccaggccgtgccccaggtgcccgtgatccagctgttcaaggccctgaagcagcaggactacctgagcctgcccccctgggaggtgaacaagcccggcgaggtgtgctag

SEQ ID NO: 277360 - DNA, 311 bp, Artificial Sequence
  derived and/or modified sequence
ccgccgcctccgcgctcgtggccgggacccgcggggccgcctcctcccggctccccggcgccgctgggctcccgggcgggcggcaggcgtagcgcggccgggcggccggcgaggggggcgccgcggcgggtggatgagagttggccccgatatccgctcaggggaacccgagcgtcatgttagggtgaagcagaggacctcagtgctgaacatgctaaggaggttggacaaaatcaggttcagaggtcacaagagagatgacttcctcgatctagcggagtctccaaatgcctcggacaccgaatgcagcg

SEQ ID NO: 277361 - protein, 158 aa, Artificial Sequence
  derived and/or modified sequence
MELSAIGEQVFAVESIRKKRVRKGKVEYLVKWKGWPPKYSTWEPEEHILDPRLVMAYEEKEERDRASGYRKRGPKPKRLLLQEPPAPDVLQAAGEWEPAAQPPEEEADADLAEGPPPWTPALPSSEVTVTDITANSITVTFREAQAAEGFFRDRSGKF

SEQ ID NO: 277362 - DNA, 477 bp, Artificial Sequence
  derived and/or modified sequence
atggagctgtccgctattggagaacaggtctttgctgtagagtcaataagaaagaaaagagtgcggaaaggcaaagtcgagtatctggtgaagtggaaaggatggccacccaagtatagcacttgggaaccagaggagcacattcttgatccacgtctagtgatggcctatgaggaaaaagaagaacgcgacagagcctcagggtatagaaagcgagggccaaaacccaagcgtctgttactgcaggaacctcccgctccggacgtgcttcaagcagcaggagaatgggaacctgccgctcagcctcctgaggaggaagccgatgccgatctagctgaagggccgccaccttggacacccgcactgccatcctctgaggtcaccgtcacagacatcacagccaactccatcaccgtcacctttagagaggcacaggcagcagaagggttttttcgggatcgaagtggaaagttctag

SEQ ID NO: 277363 - DNA, 477 bp, Artificial Sequence
  derived and/or modified sequence
atggagctgagcgccatcggggagcaggtgtttgctgtggagagcatcaggaagaagagggtgaggaagggcaaggtggagtacctggtgaagtggaagggctggccacccaagtacagcacctgggagcctgaggagcacatcctggacccccggctggtgatggcctatgaggagaaggaggagcgggaccgggccagcggctacaggaagaggggccccaagcccaagaggctgctgctgcaggagcccccagccccagatgtgctgcaggccgccggggagtgggagcctgctgcccagcccccagaggaggaggctgatgctgacctggccgagggccccccaccctggaccccagccctgcccagcagcgaggtgacagtgacagacatcacagccaacagcatcaccgtgaccttccgggaggcccaggccgctgagggcttcttccgggacagaagtggcaagttctag

SEQ ID NO: 277364 - DNA, 477 bp, Artificial Sequence
  derived and/or modified sequence
atggagctgagcgccatcggcgagcaggtgttcgccgtggagagcataaggaaaaagagagtgcggaagggcaaggtggagtacctggtcaagtggaaggggtggcccccaaaatattctacttgggagccagaagagcacatactggacccccgcctggtaatggcctacgaggagaaggaagagcgcgacagggcttcaggctaccggaaacggggccccaaaccgaaacgcctcctgctccaggagccgcccgcacctgatgtcctgcaggcagccggcgagtgggagccagccgcacagcctccagaggaggaagctgacgccgacttggccgaagggccacccccatggactcccgccctgccctcaagcgaagtcaccgtgaccgatatcaccgccaactctataaccgtgacctttagggaagcacaggccgcagaagggttctttcgggataggagcggtaagttttag

SEQ ID NO: 277365 - DNA, 477 bp, Artificial Sequence
  derived and/or modified sequence
atggaattgagcgccatcggggaacaggtgtttgccgtggagagcatccggaagaaacgagtgaggaagggcaaagtggagtacctggttaagtggaagggttggcctccaaaatactccacttgggagcctgaggagcacatccttgaccctcgactggtaatggcctacgaagagaaggaagagagggatcgagcctcaggatatagaaaacgcggaccaaaacccaaacgtctactcctccaagagcctcctgcgccagacgtcttacaggccgctggggagtgggaacccgcagcccagccccctgaagaggaggccgatgcggacctcgctgaggggccacccccatggactccagcattgccctcttccgaagtcacagtgactgacattaccgctaactcaataaccgtcacatttcgcgaagcgcaggctgcagaagggttcttcagagatcggtcaggcaaattctag

SEQ ID NO: 277366 - DNA, 784 bp, Artificial Sequence
  derived and/or modified sequence
atggagctgtcagccatcggcgagcaggtgttcgccgtggagagcatccggaagaagcgcgtgcggaagggtaaagtcgagtatctggtgaagtggaaaggatggcccccaaagtacagcacgtgggagccagaagagcacatcttggacccccgcctcgtcatggcctacgaggagaaggaggagagagaccgagcatcggggtataggaagagaggtccgaaacccaagcggcttctgctgcaggagccaccggccccagacgtcctgcaggcggctggcgagtgggagcctgctgcgcagccccctgaagaggaggcagatgccgacctggccgaggggccccctccctggacacctgcgctcccctcaagtgaggtgaccgtgaccgacatcaccgccaactccatcaccgtcaccttccgcgaggcccaggcagctgagggcttcttccgagaccgcagtgggaagttctgaatcaccgtttttactcttcttaaactgttttcttttgggcttggggtgggacttccagagatagggatgggttgggggcggggtaattattttatttaaaaaaataccgagcagcaaaaggggagaagatcccactactctcccaccacctgccctttctctgagggacgtttaccacgaggcctcaggctggggatggagagagttgctctgggagttggggtaccacccccagggcaggatggggacaggatcacctgcccgggacaccaccattatcattctcctctagtgacgcagcagctgg

SEQ ID NO: 277367 - DNA, 477 bp, Artificial Sequence
  derived and/or modified sequence
atggagctgagcgccatcggcgagcaggtgttcgccgtggagagcatcagaaagaagagagtgagaaagggcaaggtggagtacctggtgaagtggaagggctggccccccaagtacagcacctgggagcccgaggagcacatcctggaccccagactggtgatggcctacgaggagaaggaggagagagacagagccagcggctacagaaagagaggccccaagcccaagagactgctgctgcaggagccccccgcccccgacgtgctgcaggccgccggcgagtgggagcccgccgcccagccccccgaggaggaggccgacgccgacctggccgagggcccccccccctggacccccgccctgcccagcagcgaggtgaccgtgaccgacatcaccgccaacagcatcaccgtgaccttcagagaggcccaggccgccgagggcttcttcagagacagaagcggcaagttctag

SEQ ID NO: 277368 - protein, 589 aa, Artificial Sequence
  derived and/or modified sequence
MPRRSRRGIWRIPVDEIDRPGSFAWHMNRSIVLLLKVLAQLRDHSTLLKVSSMLQRTPDQGKKYLRDADRQVLAQRAFILTVKVLEDTLSELAEGSERPGPKVCGLPGARMTTDVSHKASPEDGQEGLPQPKKPPLADGSGPGPEPGGKVGLLNHRPVAMDAGDSADQSGERKDKESPRAGPTEPMDTSEATVCHSDLERTPPLLPGRPARDRGPESRPTELSLEELSISARQQPTPLTPAQPAPAPAPATTTGTRAGGHPEEPLSRLSRKRKLLEDTESGKTLLLDAYRVWQQGQKGVAYDLGRVERIMSETYMLIKQVDEEAALEQAVKFCQVHLGLPPRDRPRDTPTTPKHPKDSRENFFPVTVVPTAPDPVPADSVQRPSDAHTKPRPALAAATTIITCPPSASASTLDQSKDPGPPRPHRPEATPSMASLGPEGKLRPEPRRDGEAQEAASETQPLSSPPTAASSKAPSSGSAQPPEGHPGKPEPSRAKSRPLPNMPKLVIPSAATKFPPEITVTPPTPTLLSPKGSISEETKQKLKSAILSAQSAANVRKESLCQPALEVLETSSQESSLESETDEDDDYMDI

SEQ ID NO: 277369 - DNA, 1770 bp, Artificial Sequence
  derived and/or modified sequence
atgccccgccgttcccggcgtggaatttggaggatcccagtggatgagatcgatagacccggaagctttgcgtggcacatgaatcggagcatcgtcctactcttgaaagtgctcgctcaactgcgggaccactcaaccttactcaaagtcagcagcatgttacagaggacaccagaccaggggaagaaatatctaagagatgctgacaggcaggtgctagcccagcgagcctttatcctcacagtgaaagttctggaggacactctgtcagaactggccgaggggtcagagcgtcctggccccaaagtctgcggccttcccggcgccaggatgacaaccgacgtctcgcacaaggcctctccggaggacgggcaggagggactgccacaaccaaagaagcccccgcttgctgatggctccggaccgggcccggagccaggagggaaggtgggactcctgaatcataggcccgtcgccatggatgccggagattctgctgaccagagcggagagcgcaaagataaagaaagtccacgagcaggtcctaccgagcccatggatacatcagaagccaccgtctgccactcagatctcgaacgaactccaccactgctgcccgggcgtcccgcccgagacagggggccagaatccaggcccaccgagttatctctggaggagctatcaataagcgctcgtcagcaacctacacccctgacacccgcacagcccgctcccgcgcctgccccagcgaccacaacaggcaccagagccggtgggcaccctgaggagcccctgagcaggctttcgcgaaaacggaagttgcttgaggacaccgaatccggcaaaaccttgctactggatgcatacagagtatggcagcaggggcagaaaggagtcgcctacgacttagggcgtgtcgaaaggatcatgtccgagacatacatgctgataaagcaagtggacgaggaggccgccctcgagcaggccgtgaaattttgtcaagttcacctgggtctgcctcccagagatcggccgagagatacccccaccacaccaaagcaccccaaagattcgcgggagaattttttccccgttactgtagttcccacagcgccagacccagtccctgccgattctgtacagcgcccctcagatgcccacacaaaaccacggcctgctcttgcagcggccactacgatcatcacctgcccaccttcagccagtgcctccaccctcgatcaatctaaggaccccggtcctcctcgtccacatcgtcctgaggccacacctagcatggcctcactggggcctgaaggtaaattaaggccggaaccgagacgggacggagaagcccaagaggctgcttctgaaacacagccactgtcatccccccctacagcagccagctccaaggcccctagctcaggatctgcacaaccacccgagggccatcccggcaaaccagagccttcacgggcaaagagtcgacctctccccaatatgcccaagttagtaattccatcagccgccaccaaattcccacctgaaataacagtcacgccgccaaccccaaccttactgtcccccaaagggagtattagtgaagagaccaagcagaagcttaaaagcgccatcctttccgcacaaagcgctgcgaatgtgcgaaaagagtctctctgccagcccgctctggaggtgctcgagacgagttctcaagagagctccctggagagtgagacagatgaagacgatgattacatggatatctag

SEQ ID NO: 277370 - DNA, 1770 bp, Artificial Sequence
  derived and/or modified sequence
atgcccaggaggagccggcggggcatctggagaattcctgtggatgaaattgaccggcccggcagctttgcctggcacatgaacagaagcatcgtgctgctgctgaaggtgctggcccagctgcgggaccacagcaccctgctgaaggtgtcctccatgctgcagaggaccccagaccagggcaagaagtacctgagagatgctgaccggcaggtgctggcccagagggccttcatcctgactgtgaaggtgctggaggacaccctgtctgagctggccgagggcagcgagaggcctggccccaaggtgtgtggcctgcccggggccaggatgaccacagatgtgagccacaaggccagcccagaagatggccaggagggcctgccccagcccaagaagccacccctggctgatggcagcggccctggccctgagcccggcggcaaggtgggcctgctgaaccacaggcctgtggccatggatgctggggacagcgctgaccagagcggggagaggaaggacaaggagagcccccgggccggccccacagagcccatggacaccagcgaggccaccgtgtgccacagcgacctggagaggaccccacccctgctgcccggccgcccagcccgggaccggggccctgagagccggcccacagagctgagcctggaggagctgagcatcagcgcccggcagcagcccacccccctgaccccagcccagcctgccccagccccagccccagccaccaccaccggcaccagggctgggggccaccctgaggagcccctgagccggctgagcaggaagaggaagctgctggaggacacagagagcggcaagaccctgctgctggatgcctacagagtgtggcagcagggccagaagggcgtggcctatgacctgggccgggtggagcgcatcatgtctgagacctacatgctgatcaagcaggtggatgaggaggccgccctggagcaggccgtgaagttctgccaggtgcacctgggcctgcccccccgggaccggccccgggacacccccaccacccccaagcaccccaaggacagccgggagaacttcttccctgtgacagtggtgcccacagccccagaccctgtgcctgctgacagcgtgcagaggcccagtgatgcccacaccaagcccaggcctgccctggccgccgccaccaccatcatcacctgcccccccagcgccagcgccagcaccctggaccagagcaaggaccccggccccccccggccccacaggcctgaggccacccccagcatggccagcctgggccctgagggcaagctgcggcctgagcccaggagagatggagaggcccaggaggccgccagcgagacccagcccctgagcagccccccaacagctgccagcagcaaggcccccagcagcggcagcgcccagcccccagagggccaccctgggaagccagagcccagccgggccaagagccggcccctgcccaacatgcccaagctggtgatccccagcgctgccaccaagttccccccagagatcaccgtgaccccacccacccccaccctgctgagccccaagggcagcatcagcgaggagaccaagcagaagctgaagagcgccatcctgagcgcccagagcgctgccaacgtgaggaaggagagcctgtgccagcctgccctggaggtgctggagaccagcagccaggagagcagcctggagagcgagacagatgaagatgatgactacatggacatctag

SEQ ID NO: 277371 - DNA, 1770 bp, Artificial Sequence
  derived and/or modified sequence
atgccccggcggagccggcggggcatctggcggatccccgtggacgaaatcgatcgacctggcagcttcgcctggcacatgaaccggtcaatcgttcttctactgaaggtgctagctcagctgagagatcattctactctgctcaaggtttcctccatgttgcaaaggacacccgaccaggggaagaagtaccttcgcgatgcagaccgtcaagtgttggctcaaagggcctttatcttgactgtaaaggttttagaggataccctcagtgagctagccgagggcagcgagagaccggggccaaaggtctgcgggctaccaggggcccgtatgacaaccgacgtgagccacaaggccagcccagaggacggccaggagggcttgccacagccaaaaaaaccgcccctggccgacggctccgggcctgggcccgagcctgggggtaaagttggcctcctgaatcaccgacctgtggcaatggatgccggtgattctgccgatcagtctggagagaggaaggataaggagtccccaagggccggaccgacggaaccaatggacacctcagaggcgacagtctgccactcagacctggaaagaacccctcctctgctccccggccgccccgctcgcgaccgcggccctgagtccaggcctactgagctatccctcgaggaactgagtatttccgcacgccaacagccaaccccactgacccctgcccagccggccccagccccggcccccgctacgactaccggaacacgggcaggtggacatccagaggagcctctcagccgcctctcaagaaagcgcaagctgctggaagataccgaaagcggaaaaactctcttgctggacgcctatcgagtctggcagcagggacagaagggcgtggcttatgatttgggccgagtagaacggataatgtctgagacctacatgctgataaagcaggtagacgaagaggctgcccttgagcaggctgtgaagttctgtcaggtgcatctcggactaccaccacgggatcggccacgtgatacgccaactactcccaaacatcccaaagattcccgagagaacttcttcccagtgactgttgtaccaaccgcccctgaccctgtgccagcagactcagtccagagaccaagtgacgcacacaccaaacccaggcccgccctggctgcggccaccacaatcatcacatgccctccctctgctagtgcctctactttggatcagagcaaggatccgggcccccctagaccccaccgtcctgaggctaccccgtctatggcaagtttgggccccgagggcaaactgcgccccgagccccggcgtgacggtgaggcccaggaggcagcgtccgagacccagcctctgagttctccgcctaccgcagcttcctctaaagccccatcatccggaagcgctcagccgcctgagggccatcccggcaagcctgagccatcacgcgcaaaatcccgcccgctccctaatatgcccaaactggtgatcccttccgccgcgaccaagttccctcccgaaatcacggtcaccccccctaccccaactctcctgagtcctaagggttctatctccgaagagaccaagcagaaactgaagtctgctatcctctcagcccagagcgctgcgaacgtcagaaaggagtcactctgtcagccggctctggaggtgctcgagacgagttcccaggagagctcactggaatcagagacggatgaggacgatgactacatggatatctag

SEQ ID NO: 277372 - DNA, 1770 bp, Artificial Sequence
  derived and/or modified sequence
atgccgagacgttccaggcgcggaatatggcgcatcccagtagacgagattgatcgacctggctcatttgcatggcacatgaatcgctctatcgtgctgttgctgaaagtcctcgcgcagttgagagatcattcaactctcctaaaagtctcctcaatgttacagcggacacctgaccagggtaaaaaatacctccgagacgcagacaggcaggtgctggcccaaagagcgttcatactgacggtgaaagtgctggaggataccctatcagagctcgcagagggcagcgagcgacccggtccaaaggtgtgtgggcttccgggagccagaatgactactgacgtttctcataaagctagtcccgaggacggtcaggaaggcttgcctcagcctaaaaagcctcctttggcagacggatccgggccaggccctgagcccggtggcaaagtcggcctccttaaccacaggcctgtggccatggatgccggtgactcagcagaccagagcggtgagagaaaagacaaagagtccccgcgagccggtccaacagaacctatggatacctctgaagccactgtgtgccactcggatctagagcggactccccctctactccccggaagaccggctagggatagagggccagagtctcgtcctacagagctatccctcgaagagctgtctattagcgcgaggcagcaaccaactcctctcactccggcacagccggctcctgctcccgcacctgcaacaacaaccggaaccagggcaggtggccaccctgaggagccactgtctaggctatcaagaaaacgcaaactgctggaggacactgaaagcgggaagacgttactcttggacgcttatagagtctggcagcagggccaaaagggagtggcatacgacctgggcagggtggaacgtatcatgtccgaaacatacatgcttattaaacaggtcgacgaagaagctgctctggagcaggccgtgaagttctgccaggtccacttaggactccccccacgcgacagacctagggataccccaaccacccctaaacaccccaaagatagtagagaaaatttttttcccgtgacagtcgtccccacagctcccgacccggtgccagcggactctgtacagcgaccctccgatgctcataccaaacccaggcccgctttagcagcagccaccacaatcatcacgtgccccccttctgcttccgcctctaccttggatcaatctaaggaccctgggccacctaggccacacaggcccgaggccaccccatctatggcctcattgggccctgagggcaaactccggccagagccaaggcgggacggcgaagcccaggaggccgcttcagaaacccagccccttagttcccctcctaccgctgcctcttctaaggccccaagttccggcagcgcacagcccccagagggacaccccggtaagcccgaaccctcgcgcgctaagtcaagacccctgcctaacatgcctaaactcgtgatcccttcagctgcaaccaagtttcctcccgagattacggtgactccccctactcctactttgttatctccaaagggtagcatttctgaggaaactaaacagaaactgaagtctgcaatcctctcagctcagtctgctgcgaacgtgcgcaaagagtccctctgccagcccgctctcgaagtgttggagacttccagccaggaaagcagtctggagtccgagacagatgaggacgacgattacatggatatttag

SEQ ID NO: 277373 - DNA, 2253 bp, Artificial Sequence
  derived and/or modified sequence
gaacgagcctccgcggccatggcccggcgctcgccctagctccactgcacagatgccacggcggagccggcggggcatctggcggatccccgtggacgagattgaccggccgggcagctttgcctggcacatgaaccgctccatcgtgctgctgctcaaggtgctggcccagctgcgggaccacagcaccctgctgaaggtgtcctccatgcttcagcggaccccagaccagggcaagaagtatctgcgagatgctgaccgccaggtcctggcgcagcgggccttcatcctcactgtgaaggtgctcgaagacacgctgagcgagctcgcagaggggtcagaacgcccagggcccaaggtctgtggcctccccggagccaggatgaccaccgatgtctcacacaaggccagtcctgaggatggccaggagggcctcccccagccgaagaagccccctctggctgatggctcagggccagggcccgagccaggaggcaaagtgggcctcctcaaccaccggcctgtggccatggatgcaggagacagtgcagaccaaagcggggagcggaaggataaagagagcccacgggcagggcccactgagcccatggacacgagtgaggccactgtttgccactcagacttggagcggacaccacccctgctgccaggtcgccccgcaagggaccggggccccgagagccggcccactgagctgtccctggaggagctgagcatcagtgcccggcagcagcccaccccgctcaccccagcccagccagcccccgcccccgcccccgccaccaccacagggaccagggcagggggccacccggaggagccgctctcccggctcagccgcaagaggaagctcctggaggacacagagtcaggcaagacacttctgttggatgcctaccgtgtgtggcagcagggccagaagggtgtggcctatgacctgggccgtgtggagaggatcatgtcggagacctacatgctcatcaagcaggtggatgaggaggctgcgctggagcaggctgtgaagttctgccaggtccatcttgggctgccgcccagagacaggcctcgggacacccccaccactccaaagcaccccaaagacagccgagagaacttctttcctgtgacagtggtgcccacagcccctgaccctgtgccagctgactctgtccagcggcccagtgatgctcacaccaagcctcgccctgcactagctgccgccacaactattatcacctgccctccgtcagcatcagcttccaccctggaccagtccaaggaccctgggcctccccggccacacaggcctgaagctacccccagcatggcctctctgggcccagaggggaaactgaggcctgagccgagaagggatggggaggctcaggaggctgcgagtgagactcagcccctgagctctcccccaacagctgccagctccaaggcccccagcagtgggagtgcccagccaccagagggtcacccaggcaagcctgagcccagccgggctaagtcccgccccctgcccaacatgccaaagctggtcatcccctccgccgccaccaagttcccccctgagatcaccgtcacgccacccaccccaaccctgctctcccccaaaggcagcatctcggaggagaccaagcagaagctgaagtcagccatcctttctgcccagtctgctgccaacgtgaggaaggagagcctatgccagccagccctggaggtcctggagacatccagccaggagtcctcgctggagagcgagacagacgaggacgacgactacatggacatttgaggggccactgcagccccaccgccacgccccaggggaccagccaggcctggaatgccccctgggcaggaccctgggcaggaccagaggcccacatggatgccactccccacacagcccccaggcctgcccagcccacctcctcatggcatcctccctgtacccaggtcaggctgtccacaccacatgggagcccagaggaggaggggcccgccttagccatgtgaaggtggattggtcgccatctgcacgccaggcggcatccttttctatgaagtgttgactttgtaaatctgcccacacccagctggccatatccacccctcgacgccgggatgagccggctctgcctgtgtcacagtggaggggtcctttagggccaggctcacccctcaccctttttttggttgcttttctaataaagatggaacagt
